United States Patent Application Publication US 2017/0114356 A1 - sequence listing, part 106

SEQ ID NO: 202495 - DNA, 2198 bp, Zea Mays
cgctcttccatatcggcacgctcccaggtcccagcactgctgacaacctcctcctccctctcagctccacgcccctagacccagcaccaccggcgagcatcccctccacgcctctcacgccggcctctaagctctccactttgactcttcccagtccggcccaacccctcccgatgccgacggactccgcgccgccgaacgcagcgtcgctgtccgaagacgaccgactgctcgtcgcccactgcgccacgctctccttcccctccagctcccccacagccgccgccgccactacccattccgcctcctccttccaggtacaccatgcgtcccacccctacccctgcgccgccttcgtcttcccgccctcctggtccgctgccgactggatgggaggcgatggcggccatccgccgttcggggacgccgaggtggacccggccctgttcccgtcactccgcgctgtcgggagcggcatccccgcgcgcaccaacgccgccttcctcgggaacttccgtcggctgctcgacggatcgacgctccagtccgaggtatcaagagctgttgcggaggagaaacgtgtagtattcacaggccattcatcaggaggttcaatagccacacttgctgctatatggtttcttgagaagtgcaccagacgaggaagtgttaatcaagcacatccattttgtgtgacctttggggctccccttattggagacaatatcttcaatcatgctgttaaaagagagggctggtcacagtgtattttgcatttccttcttccactagacattgtcccacgcataccactgactccacttgcatccttcagagaagaaactcaagctgttctggatcggttatcttctcagacgccaaacaactctcctgctgggaggtcccttgttatacctgaatattatgaaactttattgagaagcacactatctattgccagttatgaggcctgttctttcatgggatgtaccagctccatcctggggacattgacttctttcattgacctctccccttacagaccttgtgggacttatcatttcttgacaagcagtgagcaattgattgttctcgcaaattcagatgctgtactgcagttgttattctactgccttcagttggatccccagcaacaactgcttgatgctgctgctagaagcttaagtgctcactggcagtacgaaccaattaaatactgcatacaggatatagtttgtgtggattacctgggaacaatctcatcagctgttcctggtaggcaggcaggcagagtggcccttggaagcattgaactgagcagggaagctatactgcacctttctgcagctgctcaatgggagaagcaaagacagagaaaccaaacaaaaatagatgaaagctgccaaaagattcaggaagctctcaggtccctaaacgagtacaaaagatcaagggaactcgatggcgtgagctactacgattccttcaagctccaacgtgaggagtgggtgagcctggggaccttgttccgtcgcctggtcgagccgctggacatcgccaactactaccggcactccaagaacgaggacaccggctcctacctctccaaggggcggccgaggcggtacaagtacacgcagaagtggcacgagcagctgcagcgcgttcccgtcgggtccagcctcgagtcctgcttctgggcggtggtcgaggagctccaggccgagatggccgacggtagggcgttcgaggatctgagagaacggttggttaaacttgagaacgatgcgcatggctggtataattctggaagtttgggcaaggacgtgtttctggggagctcgtctttcgtggcgtggtggaggacgctcccagagcagcatagggcggcgtcgagcattgcgaaacttgtatctctataaagggattttggctgaggaactagcgtttctagatctttgtaattatgctgctctatatgtacttcccaagttcaataagaagactagcatagttcttagggttcgtttggatgtagatattgaagatgttagaattaaattatatcaatatcaaatatgtctagtattggaaatgagtttcaatgtaaatctgttatttggatgtatctggaattacaattccatccaatacctagagtcttgactctgaattgtgagagacaccttttagttaaa

SEQ ID NO: 202496 - DNA, 1312 bp, Zea Mays
atttctcctctcgcttcttccattttgaggcgctacttcgaacagaccttgtgggacttatcatttcttgacaagcagtgagcaattgattgttctcgcaaattcagatgctgtactgcagttgttattctactgccttcagttggatccccagcaacaactgcttgatgctgctgctagaagcttaagtgctcactggcagtacgaaccaattaaatactgcatacaggatatagtttgtgtggattacctgggaacaatctcatcagctgttcctggtaggcaggcaggcagagtggcccttggaagcattgaactgagcagggaagctatactgcacctttctgcagctgctcaatgggagaagcaaagacagagaaaccaaacaaaaatagatgaaagctgccaaaagattcaggaagctctcaggtccctaaacgagtacaaaagatcaagggaactcgatggcgtgagctactacgattccttcaagctccaacgtgaggtgcatgacttcaatgcaaacgtgaaaaggctagagctagctggcctctgggacgagatagtggagatgctgcggaggcgtgagctgccggacggcttcgaggctcgtgaggagtgggtgagcctggggaccttgttccgtcgcctggtcgagccgctggacatcgccaactactaccggcactccaagaacgaggacaccggctcctacctctccaaggggcggccgaggcggtacaagtacacgcagaagtggcacgagcagctgcagcgcgttcccgtcgggtccagcctcgagtcctgcttctgggcggtggtcgaggagctccaggccgagatggccgacggtagggcgttcgaggatctgagagaacggttggttaaacttgagaacgatgcgcatggctggtataattctggaagtttgggcaaggacgtgtttctggggagctcgtctttcgtggcgtggtggaggacgctcccagagcagcatagggcggcgtcgagcattgcgaaacttgtatctctataaagggattttggctgaggaactagcgtttctagatctttgtaattatgctgctctatatgtacttcccaagttcaataagaagactagcatagttcttagggttcgtttggatgtagatattgaagatgttagaattaaattatatcaatatcaaatatgtctagtattggaaatgagtttcaatgtaaatctgttatttggatgtatctggaattacaattccatccaatacctagagtcttgactctgaattgtgagagacaccttttagttaaa

SEQ ID NO: 202497 - DNA, 1644 bp, Zea Mays
aagtgaaaacggagttcttcggagtcctatatttgtaaataactgtactattgcaaagagcgaacgggggcgacctccaggaaaatcgcagagaatgagggggatcctcttcgggccccggcggcagccgccgccgctcccgctcttccccgccgccaagcgctcctcggcacccgcgaaccttcttttcgctcgcctctatcgcttcctcccggccagccccatcctccggctccttctcctcctcgcactcctctccctcatcccgccggccttcttccacctccgtctccgccgcttccaccaagtgcgccctccagccacctagattcgagatcttcaataaggagccttttacgccccgagatctcacttatccaatttattcggtttcttctctgacacgtttgttaatcctttttggttgctgtgttccagatgcgcgagaggaagtgcgggtggatcgcgaggccacccatggtgtgcgcgcacggcggtgactccaccaacgccttccccaattcgatggacgcatttcggatggctctcgacgcgcgggtcgactgtgtggaggtggatgtttcgaggtcctatgatggtgtgctctttgctctgcatgacaggcagggatctacaaaagatgtctggtaattctacagcaaaagttggccactggaccacagatgagataaaagcactaaggacgaggtttcagttgtcaaaaagagtccaaaatgaggaagttcccatggcagaggaagctctggcgatgatatcacaatcatttaggcaggtcgttcttgatgtgaaagttggacccccttcatttgagaaaggtttagctgaggatattttgtctcttgagaacaaattgcaagaattgtcttgtctgggcaaaaagtgatgatataggaagagagataattaaattgtctaaagatgttattgtacattgttctctcttttttatttctttatttgaactatccatctgttatctgtacctaggaccacttttactgcacagtttaacaggcgtctcatatgctgtaggttggctatgttgtcatggtggataaatttaccaatagaagaacggagttagtgaggattgaaggggctaaagttgctggcatatatcatcctttgatccatgagaaggttatgaaggtcatgcgcaggcatgacaggagagtttttgcatggactgttgatgatagcagctccatgaagaagatgctgtatgagcatgttgatgccattgtgaccagtaacccttctcttctgcagcagcttatgcaggagaccagagctgagtgtatggaagatggttttgccttaccataggaatttctagctgtcagaacataagggtttaacttctcagcagagaggaccaactagcgagttgagtttgagggattattcataaattagatgataattactttagtttttggcacattccgcacttctgtcatataattgaaataagaaaatatggttagcttgtcatgaaatatgttgtttccttttacagcttgatcagatcaggtcagtgagaagatcgcaacaataatatcattgattaacagaatcatgctttagttaccattgatattcaagtttgtttctcactttttg

SEQ ID NO: 202498 - DNA, 875 bp, Zea Mays
tatgtccaatgcatttcttaactaactaccttcatctaacacaatatttagggctacatcatcttgttgttgacgggttccctgtgttcaatcgccgagcagaaagccaggaacagaactcaggcgttggtgattggcatctccctcccctaagccatggctaccgggcgacccatacgactcatgttggatgcctccctcctcctcgacccctcctccaccagggaggcggcggcggtggctctgtggcccggggtagaggagctgctgcggcggttgcactactccaacctgactgtggcaatctgctatgcagagggcatgccaactaatgagctaatgaatgtagcatagaggttcctggtgttttaaatgttcaaaggctttagcagttgcttctcaccttggctactctaataaaaagggaactatgtgactcatctattctggtgattggatatataacgaaaaaatcccatgaggaagacttcgcaagggcaagttactttagagtttagagtgtaaatgaatattaacagctacttatgtattgggtaacaacatgaacatcatgctttttcatcttgcttacttacagagatgtggttctgtcacttctgtgactgttgccgtgtacggagacgaggacaagccaacgcttataatgtttacagagatgtggttctgtgaccgttgccgtgtactcaggctttatttcaacaggatttaaatatgagatgtagagtgattgatgtacatcacttcactaatcatgaaatctgtagaaggcgaaactactagccatatatgatatgcataatccatgtggtaaacattatcaatatcaaacaaattatttctaatggatttcgcgc

SEQ ID NO: 202499 - DNA, 433 bp, Zea Mays
ctgtgttcaatcgccgagcagaaagccaggaacagaactcaggcgttggtgattggcatctccctcccctaagccatggctaccgggcgacccatacgactcatgttggatgcctccctcctcctcgacccctcctccaccagggaggcggcggcggtggctctgtggcccggggtagaggagctgctgcggcggttgcactactccaacctgactgtggcaatctgctatgcagagggcatgccaactaatgagaatggcatcatgttaacaaaaatgaatgagaaatcagtcatttctaatggaaaggctgtttcttactgctgatctggtggcaatttcctgtcaaacttctgcttactagcatatgtttcaataatctttaggcatggtcaaatgtttctatattatgtcgtgatataatcaagtgcat

SEQ ID NO: 202500 - DNA, 3807 bp, Zea Mays
tgattgtgaaaaggagtgttataatatggaaaaaggaataattggatctataacattaaaaagttacaattttagatatatatatcattggctccacatgttattgatttattggaccataagtgagataacaattgtacatatctaaagttatataatattttaattgtaaagatccaaattttcaaaaaaaaaaaaaaactcaccccgtccccttacccttgtccgtttcctcgcgaatctacttgctctcgcacgagacacgcacgcccgcgcgcgtgaaggtacgcggaagcaggggcgaggattctccgaagcggagggcgaggcggcggcagcgaccttgagggagatggcggcgggcggtagggtttcaatcccggcaggggcgcggcgcacgatcgcggacatcaaggagatcgccggcggccacaccgacgaggaggtctacgctatgctccgcgagtgcaacatggatcccaacgagaccgttcagaggctcctcctcgaagatacctttcatgaggtgaaaaggaagcgtgacaagaaaaaggaggttagtaaagagccatcagattctcggtggagacctgccgtgcaggggcaaggtggaaagaattgtcggaattgtgcttcacgcagtttgtccagctctaatgattctgctggacgaagtgctatttctggaaaggagaatggaataagtttgatcatgggaaaaggtagtggttctactccgataaccaatatgaatatggatgtcaaagcttccactttcatgccaagtaacagtttgttgagtggtctttgcaacggtccatatcaatcagttgatcctgctgctgtgctggtgtctagttctagtgctgttggtgataagtctggttcaacagccttggctgatcttacaggtggtcttccattcaaagatgtagtcgctactatagatccaaattcactgcaaccattgaaaccagcaccaccatcagatcctgtggttgtatcttttctcaactctcacagccttggtgacgttggtgcttccagacaaactattggaatcaagaagacatcagtagaacataaggtggggcgtgatgtatcaacagacaaaggctcctccgaacaatctgtgcaatcttcatttcgacgatcctctgctagtagaccatcttccagctacaacagtcattcagaacaatcccaaaaagttattccaagtaaagaatggaaacctaaactgacttgcttggctgcttctcaagcaaccgaggatgctaccgtacatgataatgtacctttggctgctgctgacactatcacccaatcagctccagtaccgaattcagctggtacagaggattcgttgaaggtggacatatgtttaaatgatctacagttatcagataagcagcatgtgataattccagatcatcttcaagtttctgagtctgaaaagtatgttctaagctttggaagcttcgacgtcagttttcagcaaactaagggctcttcagatcctgattatgtgaagagctctttaccgaaattcagttcgtctcatgagttggatggcaacattgatgaacttcagtccatgcaaagagatcagaattcaacatctgttgtccaagaggaagctggtcatgttcctcaaccttctgcaaagctagaaaaatgtgcaccctcagcaatggagatttcatctattgcccttatggaatcaaaagactgtgatgacgattcagccacttcaggggatccccaatctacaggaactcatagtgcaccatcttatgtgacatatggatttgcaccacaatcacatgttaatcagattgagaagtccgaatctcattctcagtcgtaccatcccacaactgatgctgatgaacggctgtccccttctcttgctactcaagctgctcacaagtatgggaatatcccagttgttcccacacaaactggccaggatcaagaggggaacgactcacctgtgattatttcatctgtttctgcttccgttgctacccctgctgctggagttctgtcggcttcagttgctatccctcaacagtctgttcctgtatttcgccagcctttaggtgttcatataccacatctcccgatgaattatgtcccttacaatcagtacatttcaccattttttattccaccccctacccttcacccttttatgggtaatgctacattttctcagccaccttcaacaggggtcatgtacccaactcctggaaccgcaagagttcttccacctgtcaaattcccagttccttcattcaagcctggtgctaacattgggagccaggcatctattggagttcctggttgctatggaacatatggttctagtccatcggtttacactaataacgcacccgtgtcatctggaaatctagcagaaaatgacaatgttacttcatctcagttcaaggaaaataacatctattttgctgggctccagaccgacggcttgactctgtgggttcctacacctggacgtgatatttctgctctccaggtcaattccttctatggtctcccccctccgggacaccaggtaacatatgcgcctcaggctggacatggtccttatggagggatctaccacccagcacattctgtggcaggagctactgttactccactgctccagccatctcacacaatggctggagctgttgaaatagttggggcacctggtggtgtttaccagcatccccaagctcacatgaattggggaagttactgataggccatgattattgtttctttgactttgggtgtccatgacaacacatttggcagaggtgttcaagttttaacaaaggtgaacttgatcaggagtgtatatatgttctcagcatggctgatctgcagggcgggttattgcttccagaagcttccagattgttgtggttgtatttgtagcagataatggccatgaaattggttgagtttatctgctcaggttccttaatacaattttagcctcctgcgcccatcctgaaacttctgcaaggagcgtgatttcgctatcttgtctgattgagggtatggagtacttgaaactgaaattgagcaagtggattttcgttctttccgctgctttacatgtaaattaaattttggttcgatgtgtgacagctgttgtacttggtatcagttgtggacttgcagctaaccagagtcaaagtgctttgaaggacttactgagcacgtttctgttcctgtaggctgtagctcagagcctagtgcttcgttatattgcttattactcattattactatttattgttcctatgaactcgtattgtttggggttaaagggccagacatttgttagtgcccctttggtataagaaaaaatggcatgcaggctacgtgccgactcacgaggttggcgtgtgggagtgatgatcggccgaatggccttggatgactctggtttggtctcgggtgggcgaatgatgtgatatgttattatttgagtaattacatttattggacaatgcacgtgaatgatcatttgataaagatcgtttctatttgattcatcatgaagagtaatatataatattttaattcaatactctatttgttctaaattataagatgttttggagttttcaaatatgtatttagatagtgaatatctgataacatagcttatatataaaaaattgaaacatcctaatttggaagagggagtacatagcttgtaaaatgatggtcatatgactttttagatcacatcgaccattgtggtgcaccacttaatcatac

SEQ ID NO: 202501 - DNA, 1412 bp, Zea Mays
gtttactgcccccgaattcctcccccaccggcccaccgtgcccacagcgggagcaccatgcccccgcctctgtgaccaccacgcctcgcccacacccgtcgcgcgatgcacgccgccgatttcgccccgtcccccagatgcgtgtgctgccccaaccccaccccgtcgtccctgcctctgtgaccccccacacacactcgtcgcatgatgcagcgccggtccacgctgcctccaaccccacctgccacctcgcgtgcccccacgcgatgacccgagtggccgacgccggatgcttcgtttaccttgacggcggacgcgaggggattaagcatgtttggcgcttcgtcctcgctcctctccctcatcccacgcacttgtagatggcaccgtccctcgccgagttcgtcgttgacctatgccatgtctccgccgccgcactcagggaccacggcgccgacccgccggagccggactaccttgtccgctccctccacaccgacatcactgcgcttccctgcctcccatggtgcaggtgcccgggggcgtgtggacaaggcgcggggggagggtcacccgagtgggcgacgtcggatgctttgtttgcctcgacggtggacgcaagggactcgtgcacgtctcccagatgctcggtcgacgccgcgctggcgccaccttcacgctcgggcaggtgtccttcaaggtcgtcttggtggacggcgccaagctagggctgtcaatggtagacgtcgatcaggatatagggaagggtcttcagtcgatgcgacgtcggcaccctgtggaggaggacgcgctgagggcaaatccgccaactaatcgctccagactcaccgggaggaggatggcggcagatcgatgagcgcacgcagctcgccaggaactgcagacatgccaaatggaaatactcaggattatcaagctggacattcttctattcatgggccactgcctcatttctgctagaatcctttgcatagtatgcaagcacctcaaatacaagtgccctattaagagttcatcggtaacaatgtggtaaatgtggtgcatggtttaaatccttctgccataggtcttcctttacatccaagaatgttggctctcccattcaatgttgaacacacttttgggcatctaatgcacccagctctgatgaactaagctaacaatggggctttaagaattcttccatattaggtggcttcatatttgcaattttttagccgtaaagttcttgcgtagctgcatgtatctgctaataacaatactggatgttggccgctgacgggctgcggttctgccgtgtggtgtgcaacgagcagcaggtcgtgtctactagagcttcaaacaacattaattttagcattggattgtttgaagattcaaaatcccaatat

SEQ ID NO: 202502 - DNA, 2639 bp, Zea Mays
cactacgcctctaaccctaggccaaccggccatgcccaggcccccacccgccaggccgccaggcggcgaggcgcggcgcccatctccatctctccctactcagcctctcctgcacgccgccgcccatggtaccaaactcgaccgccaaagcccctggccgagctcccccatggcgtctcccccaaccatggtcgcccaggtcgtggcctcgccggatcccgcgcgctcctgtgtcgtggcgttgtccccatgttttctccgcgccagcgcgccaccggctctacttgagctcctccctcgccgtagctcacaggtcgccaccccatggctgctgctcctctctccctcatctctgcaactcggcgcctcctctactcctccacctgcagttcgccccatgttctggacgccaaccctccatccccctaccctccagccatggacgccctagctcccttttgttgctcgctagggaccagctcggtgccctctcctcacttgaagccggcaacaacgccttggtagtggtcgagcagcacgtcgtcggctccgtgggttttttgggcagcccggttgcggtgtcgtcaaaccccgcttgcagttcaacagttgaatttcatcgagtcccagccagtttgattatatgaaccagaggcaagccaggatgccctaggtacataaatgtgtttctggtggaggtaaagttctaattccaacgtttgctctgggaagagctcaggtattgtagttctcttaattctactttatgagacaaagtgatggttaagtgtgataactatatatgacttaaatgagcaagtttccctgagaagtaccattctgagggcacactgttcgaaggtttcataatttgtgatgacttgttccactttttaaaaaaatcagtagagttgtctggacagctaacctcttgactgcttatgtttgatttgtatttgatatgtgcttttaattatttattaactagcagtagactcctaattccatgcttggttaattactctgaacttaaactagctaaatatagcttatgcaagttcttagactggcacatatcacttgcatccactgcctgtagccctgtacatgcaaaaattcgtgttagtagtatgtaatggccctagctacaactgcaaatagtacaagggatagcagtagagaaaacaaatgcggtgagaatgagaatcaaggtaagttggcttgcaagcttctatgcaagtgtttcctgtatccataactctgcaaaagttttggctaggataggaatcaaagggagagctaattcttccattgacttgctagtttggtggtactcccaacagaaactaaattgcaaggtaatgaacttaactttatatattccgttttgtggtactcccaacagaatctaaaattgcaaggtaattgcaagtgttctttgctaatcctcttgactggtgggataacaggacaaataaggttagactgggattgttcaaagttataaccacttgtcatttacatggtaacagtttacctcgcatctgaataataaaccttccttttgagcgcattctaattagcaaacataaaaaaacagagaacacatgagaactcaagaactaaataaaaaaagttcaaatatttactgagggagagggatatatggtcagtagagtgggtgaatattgagacggaaataataaacagccaaatgagttatgaaaggtattattgtttttctagtgatttaatgcatattttgtgtgtctttttatcatgatccatatgacgtttaatctgagtaacatgttacttgcacgattttttctgatgattgatacttatatgactgactattcaccctttaaaattattgcagtttaccaggatacatatttttgtaattgtttgtgacatgttagtcttttgtttaacctatttcatccatagggttctgcaaaacatccttttgtgaaatgatcctcgaccgtcaattctttgaaatgttccctagtaaaatgatttattcttgatggttcaaaagtttccctattccttggatgtatcatatgcatcggggatgtcatattgaagaatcagtataataatatggactatttggaggggtctttaaatgagcttggaagttggtgcataaggctgcaacaccgtctagtgagggtgttttggacaaagaaaacttgtaccttaaaacaggaggatacaagaagctggagtggttgtctgaaggcttttgaactgcttgaagcattagtgtagctttggtgcttttgtgactgatcaactctggagcagctagagtgatgtagttgtgggcttttgaacaatagctggagtgatatgaaatattagtgatgtagttgtgggcttttgaactgcttcaagctggagtgatgtcgttgtggtgcttttgtgactgatcatctctggagcttttgtgaatgatctagctagctatctgtaaatgatctagtcgtgaatgatattataattgtgatgcttttgtgaatatataattgtggtgcttttgtgtttatgtgatggatctatggctatggtatactgattaactgtgtatatctttatgatttgtgtataaaaatcagtgatttgtg

SEQ ID NO: 202503 - DNA, 2573 bp, Zea Mays
ccacactacgcctctaaccctaggccaaccggccatgcccaggcccccacccgccaggccgccaggcggcgaggcgcggcgcccatctccatctctccctactcagcctctcctgcacgccgccgcccatggtcgcccaggtcgtggcctcgccggatcccgcgcgctcctgtgtcgtggcgttgtccccatgttttctccgcgccagcgcgccaccggctctacttgagctcctccctcgccgtagctcacaggtcgccaccccatggctgctgctcctctctccctcatctctgcaactcggcgcctcctctactcctccacctgcagttcgccccatgttctggacgccaaccctccatccccctaccctccagccatggacgccctagctcccttttgttgctcgctagggaccagctcggtgccctctcctcacttgaagccggcaacaacgccttggtagtggtcgagcagcacgtcgtcggctccgtgggttttttgggcagcccggttgcggtgtcgtcaaaccccgttcaacagttgaatttcatcgagtcccagccagtttgattatatgaaccagaggcaagccaggatgccctaggtacataaatgtgtttctggtggaggtaaagttctaattccaacgtttgctctgggaagagctcaggtattgtagttctcttaattctactttatgagacaaagtgatggttaagtgtgataactatatatgacttaaatgagcaagtttccctgagaagtaccattctgagggcacactgttcgaaggtttcataatttgtgatgacttgttccactttttaaaaaaatcagtagagttgtctggacagctaacctcttgactgcttatgtttgatttgtatttgatatgtgcttttaattatttattaactagcagtagactcctaattccatgcttggttaattactctgaacttaaactagctaaatatagcttatgcaagttcttagactggcacatatcacttgcatccactgcctgtagccctgtacatgcaaaaattcgtgttagtagtatgtaatggccctagctacaactgcaaatagtacaagggatagcagtagagaaaacaaatgcggtgagaatgagaatcaaggtaagttggcttgcaagcttctatgcaagtgtttcctgtatccataactctgcaaaagttttggctaggataggaatcaaagggagagctaattcttccattgacttgctagtttggtggtactcccaacagaaactaaattgcaaggtaatgaacttaactttatatattccgttttgtggtactcccaacagaatctaaaattgcaaggtaattgcaagtgttctttgctaatcctcttgactggtgggataacaggacaaataaggttagactgggattgttcaaagttataaccacttgtcatttacatggtaacagtttacctcgcatctgaataataaaccttccttttgagcgcattctaattagcaaacataaaaaaacagagaacacatgagaactcaagaactaaataaaaaaagttcaaatatttactgagggagagggatatatggtcagtagagtgggtgaatattgagacggaaataataaacagccaaatgagttatgaaaggtattattgtttttctagtgatttaatgcatattttgtgtgtctttttatcatgatccatatgacgtttaatctgagtaacatgttacttgcacgattttttctgatgattgatacttatatgactgactattcaccctttaaaattattgcagtttaccaggatacatatttttgtaattgtttgtgacatgttagtcttttgtttaacctatttcatccatagggttctgcaaaacatccttttgtgaaatgatcctcgaccgtcaattctttgaaatgttccctagtaaaatgatttattcttgatggttcaaaagtttccctattccttggatgtatcatatgcatcggggatgtcatattgaagaatcagtataataatatggactatttggaggggtctttaaatgagcttggaagttggtgcataaggctgcaacaccgtctagtgagggtgttttggacaaagaaaacttgtaccttaaaacaggaggatacaagaagctggagtggttgtctgaaggcttttgaactgcttgaagcattagtgtagctttggtgcttttgtgactgatcaactctggagcagctagagtgatgtagttgtgggcttttgaacaatagctggagtgatatgaaatattagtgatgtagttgtgggcttttgaactgcttcaagctggagtgatgtcgttgtggtgcttttgtgactgatcatctctggagcttttgtgaatgatctagctagctatctgtaaatgatctagtcgtgaatgatattataattgtgatgcttttgtgaatatataattgtggtgcttttgtgtttatgtgatggatctatggctatggtatactgattaactgtgtatatctttatgatttgtgtataaaaatcagtgatttgtg

SEQ ID NO: 202504 - DNA, 1815 bp, Zea Mays
ctcagactgacatgggggttaacatcagtaattggggcccttcataagcaacatctcttttgtggtcacattatgacttccgtttgctctttgatagtgtattctccccaaattgccatccaaaatattttccccagaagaggattgcgaggttatagaatcagagaaacactcccatgttttttaccaagccgaaacggatatttggatggttctggttgtggaaaaaaacaaggaaaatgaattgacttggcgttgtggtgcactacaagggattcttaaagaggctcattctctctttgcaatgtttcatggaccaatccgaactttgcttcacaaacaacccagtgcagagcttgctcgtggtcacctccgcacatttcttacagattatttgagcgattttaatgttggaaagaagttacaatttccaacctaccgtgacagcctaaaggagaggggaacagtccaaatgcttacggtatcacgagaagtggcacttgacgttcagtcactcgccacagtacttggatcatgtcttggaaatgttacctgccaatcacttgtactatttgaagacctcttggtgtcaacgacactgcccccggatgatactttaaacctatatacatatgctgttctgaggttaactccgcgtgctttatattccaatgcaagttcttggtcctatttgcggaaaggaacttctgttagtgctggccaaacatcaagttcatcaaatggaacaactgcaggagaaaggcctctcctacgtgagaaattgtcaaagggaaaggatggctttgttgctgctgatttcacagctacagaagctcgttgtgctgtaccctcgactccaatactttggttccagcaggcagatgagtgcatgcacctatgcatttatcagcacaaaagtctcactatcttactgctggttcctgcttcctcagtgataaatggagaagagggcattactcatgtgaagaaggcgatgcttgaaaatgcatcacagaagattgtcactgttgagcagaaattgacacgaggatggggaggagaaaatgcgtatcatgttagtggatatcgttatttgcttgttgatccggagagaagagtatcaagagcctccccacctgggaaagtcaccaccctagcaaaggattctctacttgccctcaacatgctaagacaagaagtagatctagagaagtcaagatacaagagaggcgacccttgtcatgataaggatttcgaagtatgtatcagaacaaaaaacaatgcgtgggttattgctaaaatcagtcaaggaagggagctttacatggctctagagaagggtggtgaaacgcttctatatgcatccacagctgtagagaaattcagcaacaggtactgtgagggagcattctctacagattagaagcaccagagggagatcttagcttttccatacattacctattatgtacatcctgtttttttcccagctgtatcgttgccccctattgttgagagactcggaccactctttgcgaagggaataaggagttcgtatcagttgtacagctgctctgctgtcgtgtgctatctgcaaaagaatagcctagtctgggaataacgcagagcgggatagagtttgtttgttcacttatgcccttccttaacgcagagcattgtgcgtgttttcattttgctgtaacagccggcgatttacctgcagactgggaaagtaacttagcgtttaatttggtattctgcattttgatggtctcatatcatatggttcgagttgacgggttcgttctgcctccg

SEQ ID NO: 202505 - DNA, 1690 bp, Zea Mays
aagaagtaaaaagggcaaagatagccctggttgtggaaaaaaacaaggaaaatgaattgacttggcgttgtggtgcactacaagggattcttaaagaggctcattctctctttgcaatgtttcatggaccaatccgaactttgcttcacaaacaacccagtgcagagcttgctcgtggtcacctccgcacatttcttacagattatttgagcgattttaatgttggaaagaagttacaatttccaacctaccgtgacagcctaaaggagaggggaacagtccaaatgcttacggtatcacgagaagtggcacttgacgttcagtcactcgccacagtacttggatcatgtcttggaaatgttacctgccaatcacttgtactatttgaagacctcttggtgtcaacgacactgcccccggatgatactttaaacctatatacatatgctgttctgaggttaactccgcgtgctttatattccaatgcaagttcttggtcctatttgcggaaaggaacttctgttagtgctggccaaacatcaagttcatcaaatggaacaactgcaggagaaaggtaccgtagtcgatctcgtgatacttctccaggtggacaaaatcagatgaatcgtaatttcaggcctctcctacgtgagaaattgtcaaagggaaaggatggctttgttgctgctgatttcacagctacagaagctcgttgtgctgtaccctcgactccaatactttggttccagcaggcagatgagtgcatgcacctatgcatttatcagcacaaaagtctcactatcttactgctggttcctgcttcctcagtgataaatggagaagagggcattactcatgtgaagaaggcgatgcttgaaaatgcatcacagaagattgtcactgttgagcagaaattgacacgaggatggggaggagaaaatgcgtatcatgttagtggatatcgttatttgcttgttgatccggagagaagagtatcaagagcctccccacctgggaaagtcaccaccctagcaaaggattctctacttgccctcaacatgctaagacaagaagtagatctagagaagtcaagatacaagagaggcgacccttgtcatgataaggatttcgaagtatgtatcagaacaaaaaacaatgcgtgggttattgctaaaatcagtcaaggaagggagctttacatggctctagagaagggtggtgaaacgcttctatatgcatccacagctgtagagaaattcagcaacaggtactgtgagggagcattctctacagattagaagcaccagagggagatcttagcttttccatacattacctattatgtacatcctgtttttttcccagctgtatcgttgccccctattgttgagagactcggaccactctttgcgaagggaataaggagttcgtatcagttgtacagctgctctgctgtcgtgtgctatctgcaaaagaatagcctagtctgggaataacgcagagcgggatagagtttgtttgttcacttatgcccttccttaacgcagagcattgtgcgtgttttcattttgctgtaacagccggcgatttacctgcagactgggaaagtaacttagcgtttaatttggtattctgcattttgatggtctcatatcatatggttcgagttgacgggttcgttctgcctccg

SEQ ID NO: 202506 - DNA, 1479 bp, Zea Mays
caggtgcatgaagtggcgttaagcatatgttctatgtgacaagagggtaccatagaaactaaaagattttaatgttggaaagaagttacaatttccaacctaccgtgacagcctaaaggagaggggaacagtccaaatgcttacggtatcacgagaagtggcacttgacgttcagtcactcgccacagtacttggatcatgtcttggaaatgttacctgccaatcacttgtactatttgaagacctcttggtgtcaacgacactgcccccggatgatactttaaacctatatacatatgctgttctgaggttaactccgcgtgctttatattccaatgcaagttcttggtcctatttgcggaaaggaacttctgttagtgctggccaaacatcaagttcatcaaatggaacaactgcaggagaaaggcctctcctacgtgagaaattgtcaaagggaaaggatggctttgttgctgctgatttcacagctacagaagctcgttgtgctgtaccctcgactccaatactttggttccagcaggcagatgagtgcatgcacctatgcatttatcagcacaaaagtctcactatcttactgctggttcctgcttcctcagtgataaatggagaagagggcattactcatgtgaagaaggcgatgcttgaaaatgcatcacagaagattgtcactgttgagcagaaattgacacgaggatggggaggagaaaatgcgtatcatgttagtggatatcgttatttgcttgttgatccggagagaagagtatcaagagcctccccacctgggaaagtcaccaccctagcaaaggattctctacttgccctcaacatgctaagacaagaagtagatctagagaagtcaagatacaagagaggcgacccttgtcatgataaggatttcgaagtatgtatcagaacaaaaaacaatgcgtgggttattgctaaaatcagtcaaggaagggagctttacatggctctagagaagggtggtgaaacgcttctatatgcatccacagctgtagagaaattcagcaacaggtactgtgagggagcattctctacagattagaagcaccagagggagatcttagcttttccatacattacctattatgtacatcctgtttttttcccagctgtatcgttgccccctattgttgagagactcggaccactctttgcgaagggaataaggagttcgtatcagttgtacagctgctctgctgtcgtgtgctatctgcaaaagaatagcctagtctgggaataacgcagagcgggatagagtttgtttgttcacttatgcccttccttaacgcagagcattgtgcgtgttttcattttgctgtaacagccggcgatttacctgcagactgggaaagtaacttagcgtttaatttggtattctgcattttgatggtctcatatcatatggttcgagttgacgggttcgttctgcctccg

SEQ ID NO: 202507 - DNA, 713 bp, Zea Mays
ccgaagtccaacaaaagctagaaagagagcaacacaaacgacttccagattaccacattcaatatttcgttagttgttcatggaactattgctgaaaacatggactttacggaggatgatttacacccatatgctgttccaatggctatgggcatttaccgccgactggagagtcccttggatatcactacaagtactatcatcaggaggattgttgctaaccacgaagcctaccagaagcggaacgagaagaaggaagcaagcgagaagaagtactacgagagtaaaagcttcgtcaacggggagtgaagttacgagtagcagaacttggatgaagattgctgcctagaccgtttagcaactgcaacagttgggcgatctacagactacagccgtaccttttcttcggtatctttgatgttccgctgacatagcttaggaagcatgagcaaaaatgactaggcagaggagatggcgagtctaggagcatttccatcgtttccctagcgtcttcagccaattccctgcccccgctgtattgtatgtatatgcgccttccagctgagttgcatttgagatctataggcttttccacccattgaaactatgcgccacagtatgaaaaccctgaatgttagcgtggttgacaactattcgctgctggtgtttctttcccgtatgcgctggcaggcagtcattttcttgaaaatctg

SEQ ID NO: 202508 - DNA, 723 bp, Zea Mays
cgcattagcgctaacctgttccattttggatgctacattggactgaaatgaccatagaattaccacattcaatatttcgttagttgttcatggaactattgctgaaaacatggactttacggaggatgatttacacccatatgctgttccaatggctatgggcatttaccgccgactggagagtcccttggatatcactacaagtactatcatcaggaggattgttgctaaccacgaagcctaccagaagcggaacgagaagaaggaagcaagcgagaagaagtactacgagagtaaaagcttcgtcaacggggagtgaagttacgagtagcagaacttggatgaagattgctgcctagaccgtttagcaactgcaacagttgggcgatctacagactacagccgtaccttttcttcggtatctttgatgttccgctgacatagcttaggaagcatgagcaaaaatgactaggcagaggagatggcgagtctaggagcatttccatcgtttccctagcgtcttcagccaattccctgcccccgctgtattgtatgtatatgcgccttccagctgagttgcatttgagatctataggcttttccacccattgaaactatgcgccacagtatgaaaaccctgaatgttagcgtggttgacaactattcgctgctggtgtttctttcccgtatgcgctggcaggcagtcattttcttgaaaatctg

SEQ ID NO: 202509 - DNA, 715 bp, Zea Mays
ggcagtgaagcaaaggcggtggcgttgagcagggcgcacaccgcgtacagattaccacattcaatatttcgttagttgttcatggaactattgctgaaaacatggactttacggaggatgatttacacccatatgctgttccaatggctatgggcatttaccgccgactggagagtcccttggatatcactacaagtactatcatcaggaggattgttgctaaccacgaagcctaccagaagcggaacgagaagaaggaagcaagcgagaagaagtactacgagagtaaaagcttcgtcaacggggagtgaagttacgagtagcagaacttggatgaagattgctgcctagaccgtttagcaactgcaacagttgggcgatctacagactacagccgtaccttttcttcggtatctttgatgttccgctgacatagcttaggaagcatgagcaaaaatgactaggcagaggagatggcgagtctaggagcatttccatcgtttccctagcgtcttcagccaattccctgcccccgctgtattgtatgtatatgcgccttccagctgagttgcatttgagatctataggcttttccacccattgaaactatgcgccacagtatgaaaaccctgaatgttagcgtggttgacaactattcgctgctggtgtttctttcccgtatgcgctggcaggcagtcattttcttgaaaatctg

SEQ ID NO: 202510 - DNA, 755 bp, Zea Mays
aaaggttctttatgatcaatctcccgattttttccaccctgcttcattgatggagaaacatggggctagggaattccatctgtagtgctatgggcaatgccaaatgcatatcagtggaggaagtatgggaagacatgagcattactgtcttcgccagtaagattgacgatgaagttttcttgaagtctaatagaccggcacttgttgtgagcagcacaagctggacgctagatgaagatttcagcatacttctggaagcagcattgatgtacgagactacgacagacgtgtcgctgcagctttaggtgaagatgattcaacagatgaggagcaactttggattgatatcaagaatgggaagcaatttgtctacccaagattactgtttattgttacaggtaaaggacctgataggaagaaatatgaggttcagataaaaaggttgaagttgagacgtgttgccttgcggacgatgtggcttgcatcagaggactaccctctattgctcggatcagctgatctaggagtgtcgttgcatacatcttcgtcagggctggacctaccaatgaagatgctctttaaggggtttccagaagaatgcaatgccttgaaatccctcaaagaatgtgccatgaagtcaccatcatcttcgaaatggtcacagaatgggaaaccaacgccctaccgttggtgaaccaagagacgagacagtcgatgcattcgagtgggtcttcaatatgttcaaaacatgcatg

SEQ ID NO: 202511 - DNA, 3029 bp, Zea Mays
agttaaataaggtattaaatagaatttccattgaaaaaacatatagccggacagcgaagaggcaacacgcgaacgagaacgacgaagccaaagcaacacaccagcgcgcacgcacgcgcagcgtccggcgggcatcaccacctcctgtcctcctccctcctgccccgatccgccctccccgccgctcgccgcacccgatgtcggccgccgacccttccgcggctccggccgcggccgccgacccggacggccctgactccgtgcggctcacctggaatacctggccacggtcaaaggtcgaggccagccgctgcgtcgtgccgctcgccgccaccatctcgcccactcgcgtcccggatccctccgcggcatccccgccgccgctcccttaccctccgctccgctgcaagcctccctgttccgcgctcctcaaccccttcgcgcgcgtagacttcgctgccaagatctggatctgcccgctctgcttctcccggaaccactttcccccgcactatgctgccatatctgagtccaacgtccccgccgagctcttcccgcagtgctccaccgtcgactacatcgtcggcggagccggcatccctggggtaggcggcgcgccgccgcccccgccgcccgtatttctcttcgtcatcgacacctgcgtcatcgaggaggagctggagtacgttaagatggccatgcggaaggccgtcgcgctcctgccggagcacgcactcgtgggcctcgtcaccttcggcacgcaggtgcacctgcacgagctcggattctccgatctcagcaagatctacgtcttccgggggaccaaggagatctctaaggaccagattttggatcagcttggcctggcgggtgctgggcggccgggcttccccaagatgccacagcaaccgggcgggccacaggtgaatgggatgcatccgccgtccacggccggggtcaacaggttcctgctcccggtgtcagattgtgagattgctctcagcacgttgctggacgagttgcagcctgaccaatggccagtcgaggctgggaaccgtgcgatccgttgcactggtgttgcgctcagtgtagctgctgggttacttggtgcttgcatgcctggaacaggtgcaaggatcatcgcattgctaggtggtccgtgtactgagggacctggaatgattgtttcaaaagatttgtcagaaccagttagatcacataaggatcttgacaaggatgcagctcctcacttccagaaagcagttaaattttatgatggtcttgctaagcagttggtcagtcaaggtcacgtgttagatgtttttgcttctgctctcgatcaggttgggctagctgagatgaaggttgctattgagagaacaggtggccttgttgtcttgtctgaaagttttgggcattccgtattcaaggattctttcaaacgcatttttgagggaggtgaacagtctctaggactttctttcaatggcataattgaaataaactgttcaaaagatattaaagtccaaggtattattggaccatgcacatctttggagaagaaaggagccatgtgctctgacacagttgtcggtcaaggaaatacatcagcatggaaaatgtgtggtctcgatagaaatacttctcttacagtattttttgatgtctcaccgagtgaacgatcgagccagccaggaaaccaaaatccccatttgtatatacaatttgtgacaagttaccaacacccagaaggtcaaatgaggataagagttactacgatatgcaggaaatgggtagatggttccactaataccgaggaattagttgaaggttttgaccaggaaactgcagctgttgtgttggcaagatacatctctttgaaaatggagatggaggaagagttcgatgcaacccggtggcttgatagatctctcatacgtctttgttcaagatttggggattaccggaaggatgatccctcttcatttagcctgcattcaaatttctcattgttccctcagtttatgtttaatcttcggcgttcacaatttgttcaggttttcaataacagtccagatgagacagcttatttcaggatgttactcaatcgtgagagtatcactaactcggttgccatgatccagccttccttgatatcattttcttttgattcacctccatctccggtatttctagatgtggcatcaatagcagcagatcgtatactgctacttgatgcgtactttagtgttgtcatttttcacggaatgacaattgctcagtggagaaacatgggttatcagaaccaacctgagcatgagcaatttgcacaactattacaagcaccacatgaggaggcacaaatgataataaagggtcgatttccagttccaagactagttgtctgcgaccaacatggctcgcaggcaaggtttttgttggctaagctgaatccatcggccacatataactcagctcatgatgttgctcctggttctgacatcattttcaccgatgatgttagcttccaggtcttctgtgagcacctacaaaggctggctgttcagtcttgaggacctacctgtatgcaaagttttctgagatcagacaattttttcgggaaactgccctaaaggaatgtgtggttgcatgaattgagttgtgtgtcaagttcactttccagaaatcagaaatgtaagatcgcaaggcattataatgcagtgtgcatacaattgagcagcttagatcatgtttgaatgcactaggtctaatagttagctactaaaattagttgaaaacatttagctaatagttcagctattaattatttttagtaaattagctaatagttaagctatctatttgttagctagctaattccactagtattttttagcccacctaagtattagctctagtgcattcaaatactcccttaagcaattgtctctcaagcacatcagtttgtaaatgtgacattttggacgattgacatgctcttcaacattagattttactgctatcttata

SEQ ID NO: 202512 - DNA, 2204 bp, Zea Mays
ggcccgttcaccatttctcatcgttcaattcagagtctgacatatcagagaagggccacagcacagagagtgactgtctgccagcgccagactgccagtggactgcgagggagcgcctccgcctcagatccaaccccaccgatgcgagctccggcgatgctccgctgggccgcggcggcgctcgccgcgctcctcgccgcctcaccggccgccgcgttctatctacccggcgtggcgcccaacgacttccataagaaagatccacttttggtgaagtgcagagaatcttggagaagttctgcgtggtgatcgcattgagaactctccttatgtgtttgagatgggggaacccaagatgtgccagattatctgcaaagcaaaaattgatgataaacaggcaaaggagctcaaggaaaaaatagaggatgagtatcgggtgaacatgattcttgacaatctcccactagttgttcctcttgcaaggcaggataggggtgctactgtttaccaggctggatatcatgttggtgtcaagggccaatacgctggtaacaatgataagaagtcctttatccacaatcacttggcatttttagtaaaataccacaaggatgaaactacagatctctctagaattgttggatttgaggtcaaaccattcagtatcaatcaccagtttgaagggccgtggaatgataaaaacactcgtttaatcacatgtgatcctcatgccagcaagcttctggtaaactcagatactcctcaggaggttgaagccgggaaggaaatcatatttacctatgatgtaggcttcgaggagagtgatatcaagtgggcttctcgctgggacacctacttgttaatgatagatgatcaaattcactggttttctattgtgaactctctcatgatcgtactcttcttatctgggatggtggcaatgattatgctccgcaccctgtatagagatatctctaggtacaatcagcttgaaactgaagaagaaacccaagaggagacaggatggaagcttgttcatggagacgtattccgccctcctgcaaactctgacttactctgtgtctgtgttgggactggtgttcagttcttcggtatgctgctagtaaccatgatctttgctgttctgggtttcctttcaccatcaaaccggggaggactgatgactgccatgctgctcacttgggtcttgatggggttgtttgctggatatgcttcttcacgcctgtataagatgttgaaaggatcagaatggaagagcatcaccctgaggaccgccttcctgtttcctgggattgctttcggtattttcttcgtccttaatgctctaatatggggggagaagtcgtctggcgctgttcctttcaccacaatgtttgccttggtcctcctctggtttggtatctcggttcctcttgtatttgtcgggagctatctgggcttcaagcaacctgccattgaggctccggtgaagacgaacaagatcccgagacaggtccccgagcaagcttggtacatgaaccctgccttcaccattctgattggtggcatacttccgttcggagcagtcttcatcgagctcttcttcatcctgacgtcgatctggcttcatcagttctactacatctttggcttcctgttcctggtgttcattatcctcatcgtcacctgtgcggagatcacaatcgtgctgtgctatttccaactgtgcagtgaggactacctgtggtggtggaggtcctttctgacttcaggatcatcagcaatctacctcttcctgtatgccgggttctacttcttcactaagctgcagatcactaaggtggtgtcgggcatgctgtactttggctacatgcttcttgcctcgttcgctttctgtgtgctcaccggtacgatcggcttctacgcctgcttctgcttcacaagattgatttattcttctgtgaagatcgactaggcatgttccatgggcctgcagcgagtatgcccattgcgtttttttcatgaattttcagtgcagctgtacttttggtgttagcttataaaccatttatgctcactgtggttcagagttgtacaaggataggacactactgctagctttatatggggtaattttaacttgtgctgttgagaactgctgcatacgttcaatccatagtctcgttatcgtctgccaccccttt

SEQ ID NO: 202513 - DNA, 981 bp, Zea Mays
ccgcccagacgccccacaactctgcgcatcaccaattcaaataaaacgatattttaaaatactccagccagtggtgcggtgcctccttgggctcaccaaatctccactcccaatcaaccacttgctgcaaagaggaatacgattcagcttagctcagctccaccaccaccaagaacaagatctcgacgaagcagccagacgacaggcaggtagcaccggggtcaacgcggcagacaaacaggctctcccgctcgtcagctagcagccatgagtaccatgaagttttgccgtgaatgcaacaacatcctgtaccccaaggaggaccgggagcagaaggtgctcctctacgcctgccggaactgcgaccaccaggaggtcgcggacaacaactgcgtgtaccggaacgtggtgcaccacagcgccggggagttcacccaggtgctccaggacgtggccggcgaccccacgctgccccgcaccaagtccgtgcgttgctcctcctgcggccacggcgaggccgtcttcttccaggccactgcgagaggggaggaagggatgacgctcttcttcgtctgctgcaacccgagctgcggcaaccgttggagagaataatggacggttcctctggcgcaacagccaggacgacatgattttttttgcaagattttcatccgacagacctgctgctcccccccatatgagcatgtcaactgattggattggattggattggattgtactactatgttcccagtgcgttcagacatttcaataacttgccggcagggtaaacttccctgtggcctgtgcttcattcatttgcatcaaagaaaggatgagatgaggaaaactttttccatgttcgaatgattccctctgcacctaaaggtttcatccactcaaacaaattcaccatcaggtgaggtggagaaactgtcctcacttcacatgacacacgttgtcactcgaatggccatccag

SEQ ID NO: 202514 - DNA, 1419 bp, Zea Mays
ctcctgctagctctggctcctaaagcccgtcagccgacacacggacacggaggcagactctagcttgtcttcagccagagatcatcgcctcgctccctgccgccaccacgacgcagcaggtcttgtggtgccctgcacgccctctgagcaccaccaccgccacaacaattccctagccgtggcgcaacagcttgccgccgctggcggtcggaacggggaggatgatccgtgggggttgctgttgggggtgatctcgacgttgggggcggggggcgggggggggggggggcacaatctctggcgcagtgggcggcggcatctcgcgggcgcgacatctcacgggtcgagggtagtcactgactgggacatgggttgtggaagcgatggtgtggaagcaaatgtggggaagggagagaatggagcagaaaaccattgatgtcgtggatgaccgtgtactcgggaaggcccctcgccgagacctttcaccggccgagcgccccgagctgcgccgcggcgacggcgaggtccaccctgtcgccccaggcacgcgggctggtggccagcacggagaggtacccgaggagggcctcagcctagagcgcgcgcctggcgaaggccgcgtccaccgctgccccgggcgcgccatcacggacgccgacgtgctgggcacgctcctcgtgcagaacccatctctacgcgtcctctccatgggcgccccgacgctagcgccgccgccgaagacgccgcgcgtcctctcacctgcccggccgtcgttgcacagctcgaacacgcccctgttctcctgctggtccaggatcgcctgcgcgagggaagggacgggcgtgaggacacgacaggacgccgagacgcaatgcacaattactcagggacgcgcgcacgacacagcaggtttcgtgcggcgaggtgtccttggggatgtgaatccgtgcccgaggctggcgtggtgagggcggtcatctccctgtcgccggtggtgatgcagtgcgagaggacgacggcctccatcctcgggcagaccgccatgagcgcctccaggccacgccagccgacgccgctagcccgtgtgaggcgcacctagcggacggacagtggcggctcctcgggcagcgtggcagcacaaggaacggccggcaacaccagcgcgagcctggagcgtgtagaagccggtggaggaagagaaggaggcgacatacctgacctccacgctcacctccacgaaaatttagatctaaccgacctcgtccagcattatatgcctcctccctgactctctcccggcgctcgttcatcctccatgtcccgccgctgtgaaagcgaggtgctcgatgttgtcggggagcgggctggagaaggtgtcgtaggagaggttgagggatcgggtggtgtcgtaggaggcag

SEQ ID NO: 202515 - DNA, 1638 bp, Zea Mays
aaacgtcagagctaggtctcggggggcagtttggtcactccgtccccgccagggtttgacgtcgtcgtctctctctcggcggcccgtccggccgtccccgtcccgtctcttgcgtactccgccaccaaccgcttttgcttgccgctactcgccgcctgccaaaagcagccgtcctccctagctcgcccgcccgaagcgacgcctgacttcgcatctgtttcgttccacccgccccgcgagaagcttctagaagggggagacccgccggagccatgccggaggaggagtcgacgtcgatcccgctcagccaggcggcggaggccgtcgaccccgaggacccagccaagtcgccgccgcgacccagctcgcccaccacctccacacgcaaggcatgctgtgctgttcttcaaagttgggtctcaagaaaatttatgactggatgtccttttccctgttgcagtcacgttcttcatcacatggtggtttattcaatttgttgatgggtttttcagtcccctatatgcaaaacttggaatcaacatatttggtcttggttttttgacttctctggtattcatatttctggttggaatatttgtttcttcatgggttggttcaaccatcttctgggtgggagagtggtttataaagaaaatgccatttgtaaggcatatatattcagcgtcaaagcaagtcagcactgcaatttcaccagatcaaaatacgacagctttcaaagaagttgcaataattcgtcatccacgaattggtgaatatgcatttggattcataacatcaacggtggtccttcagactgacaaaggcgacgaagaactgtgtagtgtgtatgtgccaacaaatcatttgtacatcggtgatatatttctggtgaactctgaggaggtcataagacctaatttatctattcgagaaggaatcgaaataattgtttcaggagggatgaccatgcctcaggtgattgcatcactggagcccatgccacggaaaagccagaacattcgtctaaatagaatgacgtgatgtaaaacaagccacatgcatcaagatagcatgacctgtgtgcttagccatgtgatttggatagaggagcagctttgtgctgagctattgtggcattctgtagtgcaggggaagcatcgtgttgatgcccagggatattattcccacacaagttgtgctactcattgtgcggggtgtttggtttctaggtactaatttttagtctcttcattttattttataaattatcaaatacgaaaactaaaatagagttttagtttccgtatttgtcaatttagagactgaaataaaataaaatagatggattaaaaattaatcctcagaaaccaaacacccctaacactggtccaaaatgctaacgtctatgcttgaggtgcattattgattaaattcgtttataactgtgatgtataacatcttacgttacaaagagagcacacaacgctctgaccaattttcttctttcagacttacaatttcttcattttattttatcgtgtaatgtgtttaactggctatgatccagctttaggcataagcccatggttatcaatctacttgacaccataagtatcaatctacttgacaacaggttgg

SEQ ID NO: 202516 - DNA, 1136 bp, Zea Mays
tgatccctcttctacataaataatttggtcttggttttttgacttctctggtattcatatttctggttggaatatttgtttcttcatgggttggttcaaccatcttctgggtgggagagtggtttataaagaaaatgccatttgtaaggcatatatattcagcgtcaaagcaagtcagcactgcaatttcaccagatcaaaatacgacagctttcaaagaagttgcaataattcgtcatccacgaattggtgaatatgcatttggattcataacatcaacggtggtccttcagactgacaaaggcgacgaagaactgtgtagtgtgtatgtgccaacaaatcatttgtacatcggtgatatatttctggtgaactctgaggaggtcataagacctaatttatctattcgagaaggaatcgaaataattgtttcaggagggatgaccatgcctcaggtgattgcatcactggagcccatgccacggaaaagccagaacattcgtctaaatagaatgacgtgatgtaaaacaagccacatgcatcaaggtcaaagtttccaacttatataacccagctggtttgttttccatgtgatttggatagaggagcagctttgtgctgagctattgtggcattctgtagtgcaggggaagcatcgtgttgatgcccagggatattattcccacacaagttgtgctactcattgtgcggggtgtttggtttctaggtactaatttttagtctcttcattttattttataaattatcaaatacgaaaactaaaatagagttttagtttccgtatttgtcaatttagagactgaaataaaataaaatagatggattaaaaattaatcctcagaaaccaaacacccctaacactggtccaaaatgctaacgtctatgcttgaggtgcattattgattaaattcgtttataactgtgatgtataacatcttacgttacaaagagagcacacaacgctctgaccaattttcttctttcagacttacaatttcttcattttattttatcgtgtaatgtgtttaactggctatgatccagctttaggcataagcccatggttatcaatctacttgacaccataagtatcaatctacttgacaacaggttgg

SEQ ID NO: 202517 - DNA, 1008 bp, Zea Mays
  misc_feature (1)..(2): n is a, c, g, or t
nntgtaggtgacttttaataatattcccattgccggtcacaaaactcaagtattgtcacagatctttttattagggacataaagaatctattttgtgtggctacaaaggttacccatgctggcagaagcaatctactttcgtgtacgtacgaccaacctactaaaacatgccttgttttatgtatgttgctgcatcccgtatcagagaacacatagctttcgtctcctggggaactaattcgatgccacccgcaactccttttttataaatattatgttgtttgcttatttaaaaccaaacttcatgtatgatacatgttctgtctatgtactcttaagtttgtgttaattgtgctacaacatttatctactttacaaccaaaattgcctgttatacatacatacacaagttcgtccacgtcaacatttatctactctacaaccatcataacacactatccaccacagtatcacactatacatacatatgttcacttcgtcacgcgcgcatgggcgcgcgcaatacactagttaatagtaggcagcccaggatccacagaagaaaggtatttggcccacagcctgaaagtgaaagttgcaggacctgtgttgctggctggtgaaggtagccagcccactgaagactgggtccactgaagaccatcttggtggccacgctcggcgctcggcaggtcgctggaggagaacggaggcatgtaccgcgtcgtctccaaggagtgggaccatgaagatcgagaagatgaccatggcaaggctcagggacgacgacgccgtgcgtcgcgaccttcgcgacatcttcatcttttggttttgaagcacaagagaattggaaatcaacaactggtgtcactggttattcttaagaaccatttgctaccgaatgtagtccaaaggctccttaactcacaaacacatgagacacaaaaatatagaaagaccaaatattctcattcatctattctgttcactggttataataaatggtgg

SEQ ID NO: 202518 - DNA, 713 bp, Zea Mays
  misc_feature (1)..(2): n is a, c, g, or t
nntgtaggtgacttttaataatattcccattgccggtcacaaaactcaagtattgtcacagatctttttattagggacataaagtatgtgtatttctgttatcaccacaacatatagttactgcattgatttactcgacactcttcaatactgcttttatcatcacgtatttttttcttaaatctactacattgtatgcatgatacaccaacatcttctttagtaccaaacgaaaaacctagctacaattaacattttttaagtctcacaggaatctattttgtgtggctacaaaggttacccatgctggcagaagcaatctactttcgtgtagccagcccactgaagactgggtccactgaagaccatcttggtggccacgctcggcgctcggcaggtcgctggaggagaacggaggcatgtaccgcgtcgtctccaaggagtgggaccatgaagatcgagaagatgaccatggcaaggctcagggacgacgacgccgtgcgtcgcgaccttcgcgacatcttcatcttttggttttgaagcacaagagaattggaaatcaacaactggtgtcactggttattcttaagaaccatttgctaccgaatgtagtccaaaggctccttaactcacaaacacatgagacacaaaaatatagaaagaccaaatattctcattcatctattctgttcactggttataataaatggtgg

SEQ ID NO: 202519 - DNA, 2209 bp, Zea Mays
tacatggtaacatataacccaagcaaaggataaagtaattcctttgctcaaggaccaagctaaatcagacgataatatcaaagagctatataacagctggtctcagggagtcataggcttcctgttattgtcttgcattggtctgttgggtcagaagtacattctaagaaaggagggcatctttttgtttatggcggcgatgatatgggatctaaagaagttctcacggttcttagccaggaatcaacagctggattagaatcaaagagatgcatgtcacgaactgatctcaaacttgttggatcatttgctgatatgattcttattcctgatactagggttcctgataaaagaagaacttctgcactttttattttgacaaatcctgggcagctgaatttttatgatggtggctctctattttctgtgcaaaactcaaaagagggaaatcctcttcctgaagcacagaaatttccagtcgcaattcctacccttgatcccaacataacggtcactggtctttattcgctaaccgaaagtgaatttccaaatatttcagtgaaggtgcattatgctcaaatttggatattttactctatctagacatcatcattacttatgtaagaccatatcgctgtggatttgctgtagaaatttgatgctacgaaaaatgttgggcatttcatatcagagaacatgaaatggcctttgactggtggggttccaaatgagttgtcactgaacgaagatcatgctgttgaaagaatataaattgaaggctaccaagatggttctctgagaatatgggatgcaacatttcctgttctaatgccaaattttttcttggttggaaatgtcagtctcatttgtatatttgtagtattacttgcattattcctcattggtttataactaacggattaaccccaatcaagctgtaactattctttactataggttgctgatgttaatttggatggagctaatgcttttgtatcatctctagccttttgttcattaagcatgactttggctgttgggacaacaagtggtctagttagatcttgttggtcttacgaattggtcgaaagggtggtcatttgtatcattttagaatatgttttcataccattttttgtaggtgcacatctataaactccgagaacacactgagggttcaagcttccattttgtgagtgtgaatttaagcaagaaggctctttcaaatggcaagcccactgttgttgagttttatgcaaactggtgtggggtctgcagggaactagcttcagatatctacaaagctgaacaacaatacaaagactgtggaattgtggggtccgtccatgctgcctgctagaaatggaaaatgtgttagtagtagaaacaagtgttgtgggcctttgatcttctggaagtcatgtggttgcagttctaccgatacttgttctacttgggcaaaattaggacaattcagttggagtacactgatgctaaagaaagcctcctgcaagctgctcgtaaggcaccaacaacagcccatggttttcggatccagtgcaacaaatgggttatcatagtgaggctgctgcttggttggaacagaacaagacattgtgattttctttaactgttttgtaaggaattagtgaagcaggctgaattatggaatactattttgatgaacacagtgaagcaggctaagttgttgcgtggctctggttctggtctcagggagttacttgggagggtaacttcctaagaggctgcttcttacatacaaacctgaagattgagaggaaattcttgagcctgctcctcttgaagaggaaatagcaccagttgaagatcatgttcttgtaccacctgttaatgaagttgtttcacctcctcccaagactgaggtgtcctgatactggtgacttactggttggaaaaataacacattaatattatggtctaaatcttatgtgcttgattctaaaatctgaagttgtgttcctggtgtggaaataaagttgttgggctatttgtgtggggtgggggttggcatgttcggagctgttcctggttggaaccagtgattttgctactcattttgacggataatttgagttcgaagtcgtcgaattttgaaacaagggagtgggtttacatgtaatgttggcaaacggggtctgaattattaataaagccagactgtttcgct

SEQ ID NO: 202520 - DNA, 2396 bp, Zea Mays
atctaaatgacttacgggggttcacaacttcaaaactatacgattttatggaacacctaatggcctgctctatcaattccactaagaccccgtttggttccaattagtcctaggactaaagtttagttctaggactaaactttagtcccttcctgtttaattctagggactaaacaaattctaaagtaattaaatatagtgtccaaagactcaaatacccctggaatctatagcaacatggacgtgggataagggcaatggaggaaaaaaatatggtttagtcccctttagccaccacttgagggactagggactaaactgatttagtctctcctttagtccttatgtatggcaaattagagactaaaagagactaaaacgaagagactaaaaattatcccttgcaaccaaacaccccctaaattttctggagctggatcaatcccagacagcaccttaatttaagttgacagtctaacctgggaaattttcagagtgcattcatcccgttcataactgctggtgatcctgacctggtaaccacatcgaaagcattgaagattctcaattcctgcggttcggatgttatagaggttggcgtaccatactcggatccactggctgatgggccagttattcaggcttctgcaacacgggcgcttaagaaaggcactacacttgattctgtcatagagatgctgaagggggttacacctgagctttcttgccccattgttcttttcacatactataatccaattctgaaacgtggtgtgggaaacttcatgtctactatcaaacaagctggcatacatggacttgtagtgcctgatcttcctttggaggagacagcgttgctgaggagcgaggccattatgcacaacatagagctggtgctgcttacaacgccaaccacgccgacagatcggatgaagggaattgcacaagcttcagaaggatttctctatcttgtgagcgctgtaggggttacaggtgcacgctcaaatgtaaacttacgtgtagaacaccttcttagggagatcaagaaggttacagacaaaccggtagctgttggtttcggtgtatcgactccagagcatgtgaaacagatcgtgggctggggagcggacggtgtgattgttggcagtgcgattgtgaagcagttgtgtgaggctgctactcctgaagagggtctggaaaggctcgaggagtacgccaggagtatgaaggctgctatgccgtgagctgatctcactccccgtcacaggcaaggcttctggtgcagcacctccagataattctccagctggttcatccttgccaagtgtggatgttccacatgcaggccctcttaaacccatgggaggtactggaagtctagttcaaaacaagctagctggtgctccaggcgggggatcaagtccacatgtagtacaaaatgccgatattcctgttaagcaaaccactagctcttcctcacgtgagcagtcagacgatgatgatatggaaggagatgctgagactactggaaacggaaaccctgttcaacaaagattacagagaaggaagcaatccaaccgagaatcagccaggcgttcgagaagcagaaaggcagctcacttgaatgaactggaggcacaggtagcacagttaagagttgagaactcttcgctgctaaggcgacttgctgacgttaatcagaagttcaatgaggctgctgttgacaatagggtgctaaaggcagatgtcgaaaccttaagagcaaaggtgaagatggcagaggactcagtgaagcgggtaactggcatgaacacattgttccctgccgtgtctgatatgtcgtccctcagcatgccattcaatggctccccatccgactccgcctctgatgccgccgtacccatccaagatgacctgaacagttacttcgccaatccaagcgagatcggaggcagcaacggttacatgccagatatagcttcctcggctcaagaggacgacgatttcgtcaacggggctcaggtcgccggcaagatgggcagcactgactcgctgcagcgggtggcgagcctggagcacctccagaagaggatgtgcggaggcccggcttcatcggggtcgacctcctaggttcctactccatcggatatgataaaggccctgatgcagtgatgcccacggcaaagaatatgataaattaacagtttcacatactttgtagtggacattgctaatgctgcgatgcgcattcgttcgttgtggacttacgggtctactgctattgatttattgttcgttctccatgtggatctctggtgtccatgtgacgtgtactatgccaactgctgtctgctacacattgcagtggacacagcaagttcggtttccatcgaaga

SEQ ID NO: 202521 - DNA, 1126 bp, Zea Mays
atctgtgagcgctgtaggggttacaggtgcacgctcaaatgtaaacttacgtgtagaacaccttcttagggagatcaagaaggttacagacaaaccggtagctgttggtttcggtgtatcgactccagagcatgtgaaacagatcgtgggctggggagcggacggtgtgattgttggcagtgcgattgtgaagcagttgtgtgaggctgctactcctgaagagggtctggaaaggctcgaggagtacgccaggagtatgaaggctgctatgccgtgagctgatctcactccccgtcacaggcaaggtaattagaacatggttttagcaatattctgggcatggggttggcatccataactcatctagtgctgtacgggtcgttctccggtggtgagaacgaagtctggctttgcctataatagaaaagggttataaactgagttagtgcgacattttgatgaaaaagtgagcgattgcgagatatcagttcatgcttattggcagatcctttttttggctgaaagattgaaatgttagggatgaggttgccctggcctcttgagaggataggaataagagaggataagttcgttatgatttatatggcttttcgcttgaaccccaccagctggtgtccatggatgcgggcagagcagtgtctgattggctgcactgaaaatgacattaccttcagacaattcgccttgctctcttctggttctggagtactactttcgaggtccgtcagactgggtcacaagatgatcccaaacggccccagatgctggatttttggacaacggaaagtcgattctgacctctgttaatgtcggcactcatgggtcatgaccaagccatgtttatggtcaaatcagtcccggatgctaacacgcttctctaatctctacctacggagacgactttttccggtgcttatcgtatcattatcatgcatgttactggtagtaacatgttgtctgaacagattctttagctctgtcatggcagcatgaagtgtatctggatgcgaagaagcagtgttggtattgaactgtccatgtacgagttgtttgttgctgtgctttggcggggtgaacagctaggattggataggctctagtgcca

SEQ ID NO: 202522 - DNA, 3253 bp, Zea Mays
gtcggttaaatttgttgtcaaaaaacttaaacgacaatcttagggagtaccaaaaaaatcaacacacgtgcatatggaatgtaattcttgaattaaaattttgtcaggtttgagcctcagttactgcccacagtcgccacagatagacctccagtaccagtcacacacgtgacactcgcaatcgcaaagtcgcaagcggatcgcaaactcgcaatcaaggctgctcccctccgtctccgtgttcgccactcggttcaccgcccgccgccgccgagacctcctcctcgccggctactcctgaccccacaaaggcagcgctcggaggtggccctctgtcgggtggagtggtggacacatccgcgcccatggccaacggcggcgctgcggccggcaagctcaccgtcgccgagaccttctccaacctcagggagcaaggcaagggttggattgctggcgccgtggtggccgatacccaatgttggtcccggttggttgcagggaatacctaattttggtcccatttagttgcaaggaaatggattagggctttggaacaatctgtgtattccttgcatgaattgtccaaatctagtggttttatgtcgagtacacatcgtgctggtttaatttccgtaaaaatctagcctgatcttgcacaatagtggctgctggcttgatgtgcacattgatccgtctttgtctttaaaagcagtgtttatattttaggtgccacagtgttcattctcaacaaaggtaactgcattaagaaatttgtatccagagtagcgataacatgctaagcagagaccaatctttagttgcagggatcttgcattgtactccattccaaattctgtgttattttgtcttttctagatgcataccttattagcttttgttatgcactttgatatatggtatgtctagatatatagcaaaaactatgtacctaataaagcaaaaacgacttacaatttgcaattgaaagagtatggtgcagatctgccttaaatcgtatccagcagttcactcatatggttacccaaaatactgttttacactgttcgcagagtgaagttttaatatgggtgtgagcatgggtaaaagtcttagttggcaaatagtcttttggtgtaaggatttagaaaatactccagtgaacacgtgggaaaatcacttgtcagagagggagggtggagccacaaaccaaggagccgcacagatgccgacatcaatacacttatgttgtggagaggagccgcatctcgtaatgtctgattttgtttagatgccacacagtagtatcccagccatgggcgcatggatgggggatttggacccagggtcaatggaatttaattcccagatttagggggtgtatggtacggatccaggttccagctttaatttaaaggtgtagtttataatagaaatttaaatagttttaaaaatatttttaatctaaataataaataaaatgacttatctaaatgacttacgggggttcacaacttcaaaactatacgattttatggaacacctaatggcctgctctatcaattccactaagaccccgtttggttccaattagtcctaggactaaagtttagttctaggactaaactttagtcccttcctgtttaattctagggactaaacaaattctaaagtaattaaatatagtgtccaaagactcaaatacccctggaatctatagcaacatggacgtgggataagggcaatggaggaaaaaaatatggtttagtcccctttagccaccacttgagggactagggactaaactgatttagtctctcctttagtccttatgtatggcaaattagagactaaaagagactaaaacgaagagactaaaaattatcccttgcaaccaaacaccccctaaattttctggagctggatcaatcccagacagcaccttaatttaagttgacagtctaacctgggaaattttcagagtgcattcatcccgttcataactgctggtgatcctgacctggtaaccacatcgaaagcattgaagattctcaattcctgcggttcggatgttatagaggttggcgtaccatactcggatccactggctgatgggccagttattcaggcttctgcaacacgggcgcttaagaaaggcactacacttgattctgtcatagagatgctgaagggggttacacctgagctttcttgccccattgttcttttcacatactataatccaattctgaaacgtggtgtgggaaacttcatgtctactatcaaacaagctggcatacatggacttgtagtgcctgatcttcctttggaggagacagcgttgctgaggagcgaggccattatgcacaacatagagctggtgctgcttacaacgccaaccacgccgacagatcggatgaagggaattgcacaagcttcagaaggatttctctatcttgtgagcgctgtaggggttacaggtgcacgctcaaatgtaaacttacgtgtagaacaccttcttagggagatcaagaaggttacagacaaaccggtagctgttggtttcggtgtatcgactccagagcatgtgaaacagatcgtgggctggggagcggacggtgtgattgttggcagtgcgattgtgaagcagttgtgtgaggctgctactcctgaagagggtctggaaaggctcgaggagtacgccaggagtatgaaggctgctatgccgtgagctgatctcactccccgtcacaggcaagctggtgtccatggatgcgggcagagcagtgtctgattggctgcactgaaaatgacattaccttcagacaattcgccttgctctcttctggttctggagtactactttcgaggtccgtcagactgggtcacaagatgatcccaaacggccccagatgctggatttttggacaacggaaagtcgattctgacctctgttaatgtcggcactcatgggtcatgaccaagccatgtttatggtcaaatcagtcccggatgctaacacgcttctctaatctctacctacggagacgactttttccggtgcttatcgtatcattatcatgcatgttactggtagtaacatgttgtctgaacagattctttagctctgtcatggcagcatgaagtgtatctggatgcgaagaagcagtgttggtattgaactgtccatgtacgagttgtttgttgctgtgctttggcggggtgaacagctaggattggataggctctagtgcca

SEQ ID NO: 202523 - DNA, 2873 bp, Zea Mays
gtcggttaaatttgttgtcaaaaaacttaaacgacaatcttagggagtaccaaaaaaatcaacacacgtgcatatggaatgtaattcttgaattaaaattttgtcaggtttgagcctcagttactgcccacagtcgccacagatagacctccagtaccagtcacacacgtgacactcgcaatcgcaaagtcgcaagcggatcgcaaactcgcaatcaaggctgctcccctccgtctccgtgttcgccactcggttcaccgcccgccgccgccgagacctcctcctcgccggctactcctgaccccacaaaggcagcgctcggaggtggccctctgtcgggtggagtggtggacacatccgcgcccatggccaacggcggcgctgcggccggcaagctcaccgtcgccgagaccttctccaacctcagggagcaaggcaagggttggattgctggcgccgtggtggccgatacccaatgttggtcccggttggttgcagggaatacctaattttggtcccatttagttgcaaggaaatggattagggctttggaacaatctgtgtattccttgcatgaattgtccaaatctagtggttttatgtcgagtacacatcgtgctggtttaatttccgtaaaaatctagcctgatcttgcacaatagtggctgctggcttgatgtgcacattgatccgtctttgtctttaaaagcagtgtttatattttaggtgccacagtgttcattctcaacaaaggtaactgcattaagaaatttgtatccagagtagcgataacatgctaagcagagaccaatctttagttgcagggatcttgcattgtactccattccaaattctgtgttattttgtcttttctagatgcataccttattagcttttgttatgcactttgatatatggtatgtctagatatatagcaaaaactatgtacctaataaagcaaaaacgacttacaatttgcaattgaaagagtatggtgcagatctgccttaaatcgtatccagcagttcactcatatggttacccaaaatactgttttacactgttcgcagagtgaagttttaatatgggtgtgagcatgggtaaaagtcttagttggcaaatagtcttttggtgtaaggatttagaaaatactccagtgaacacgtgggaaaatcacttgtcagagagggagggtggagccacaaaccaaggagccgcacagatgccgacatcaatacacttatgttgtggagaggagccgcatctcgtaatgtctgattttgtttagatgccacacagtagtatcccagccatgggcgcatggatgggggatttggacccagggtcaatggaatttaattcccagatttagggggtgtatggtacggatccaggttccagctttaatttaaaggtgtagtttataatagaaatttaaatagttttaaaaatatttttaatctaaataataaataaaatgacttatctaaatgacttacgggggttcacaacttcaaaactatacgattttatggaacacctaatggcctgctctatcaattccactaagaccccgtttggttccaattagtcctaggactaaagtttagttctaggactaaactttagtcccttcctgtttaattctagggactaaacaaattctaaagtaattaaatatagtgtccaaagactcaaatacccctggaatctatagcaacatggacgtgggataagggcaatggaggaaaaaaatatggtttagtcccctttagccaccacttgagggactagggactaaactgatttagtctctcctttagtccttatgtatggcaaattagagactaaaagagactaaaacgaagagactaaaaattatcccttgcaaccaaacaccccctaaattttctggagctggatcaatcccagacagcaccttaatttaagttgacagtctaacctgggaaattttcagagtgcattcatcccgttcataactgctggtgatcctgacctggtaaccacatcgaaagcattgaagattctcaattcctgcggttcggatgttatagaggttggcgtaccatactcggatccactggctgatgggccagttattcaggcttctgcaacacgggcgcttaagaaaggcactacacttgattctgtcatagagatgctgaagggggttacacctgagctttcttgccccattgttcttttcacatactataatccaattctgaaacgtggtgtgggaaacttcatgtctactatcaaacaagctggcatacatggacttgtagtgcctgatcttcctttggaggagacagcgttgctgaggagcgaggccattatgcacaacatagagctggtgctgcttacaacgccaaccacgccgacagatcggatgaagggaattgcacaagcttcagaaggatttctctatcttgtgagcgctgtaggggttacaggtgcacgctcaaatgtaaacttacgtgtagaacaccttcttagggagatcaagaaggttacagacaaaccggtagctgttggtttcggtgtatcgactccagagcatgtgaaacagatcgtgggctggggagcggacggtgtgattgttggcagtgcgattgtgaagcagttgtgtgaggctgctactcctgaagagggtctggaaaggctcgaggagtacgccaggagtatgaaggctgctatgccgtgagctgatctcactccccgtcacaggcaagcatgaagtgtatctggatgcgaagaagcagtgttggtattgaactgtccatgtacgagttgtttgttgctgtgctttggcggggtgaacagctaggattggataggctctagtgcca

SEQ ID NO: 202524 - DNA, 6685 bp, Zea Mays
caccaatccacccttatcaatcccctgctcgctatcattctcgctccctccctcccttccttggccttgccacttcctccgcctctgccctgctctgctcagcttctcacctcccagctgggctccccacccctctcgctccctgttctatcctctcgttccctctgcaaccttctctctctctagcttatcccgataatggctgcctcgagcagcaccacctagctagccgtgcccgctccacgcaacacgtacgtacgtccgctgctcggcgtcggttccgcctcgtacaacaaccacactttgcattgagccaggtcgtccagcttctgaggaggagcggcagcacgcacctgggcgccggcccactgctgcagctgggctgctagcttgagctgagcttgccgttgggcgcgcgcgtgcatggcgcccaagagcaggcgtgggaaggccaagggcgagaagaagaagaaagatgagaaagttctccctgtggccattgacatcactgtcaacctcccggaccagtctcatgtcattctgaagggtatttcaacggacaggatcatcgatgtgaggcggctgctctgcgtcaacaccgccacgtgtgccatcacaaattattctctcacacatgagatgcgtgatggtgcgttgaaggatgccgctgacattgctacactaaaaccctgcactctcacattggtcgaagaggagtacagcgaggagagcgcggtcgagcatgtccggcgtctgctggacatcgtcgcttgcaccacctgcttcggcccagcgccgccacctcctcctccgccgtcccccaaggacgccgatgccgctaaggagacatccagctccagctccacatccaaggccgtcgcatccgcctcctcgggtgggcgccgcacggcctcaccgccgccggcctcgccgtcctccgctgccgcgaaggagtcgtcagccgcaaaggaggcagcagccaaggagtccgcggctgcggtagagctggaggccgagatgagcggcgcgtgccctcgcctcggcgccttctacgagttcttctcactagccaacctcacgccgccactccaatttgtaaggcgagtgttgcagcctcgacaggaggaacagccttcggatgaccatctgttctttcttgaggcaaagctatgtagtgggaagttccttgttgttgaagctcggcgaaagggattcttcagtctaggaaagcagcgagtcttgtgccacaacctagtcgatcttctgaggcatcttagtagagcatttgacaatgcttatgaagatcttatgaaggcatttttggaacgaaacaagtttggaaattttccttatgggtttcgtgcaaatacatggcttgttcctccaattgctgcgcagtcaccatcaacgtttcctcctcttcctgctgaggatgaaacatggggaggcagtggaggtggttggggaagggatggaaagagcgacatggtgccatgggcagatgaatttctctatctcacatccatgccttgcaaaactgctgaggagagggaactccgtgacaggagagcattcctacttcacagcctctttgtagatgttgccatctttcgggctattgcagcagtaaggcatgtaatggagggtacagagttatcggcatcaaccaatatagatgaagtcttgtattctgagacagtgggacattttagcatcactgtcacaagagattcttcagatgcaagctgcaagatggacactaagatagatggaaacagagccacaggaatggactctaaggatcttgcggaaagaaaccttttgaaaggaataactgcagatgaaaacacagctgctcatgatgtcgacagtttgggcattatcaaccttagatattgtggatatgttgcagtagcaaaggtggacaacatcgacaaaaccaaagtaaatgcttctatcaagcctatgaatatcgcagatcaacctgaagggggtgcacatgcattgaacattaacagtttgaggatgctccttaatgaagccacctctaccggggagaaaaagatatcaaacctttcacaaaatcataggcaggaagaactaattgcggcacaaacttttgttgagaagttattgaaggaaagtcttcaaaagcttgaggaagaggaaaatgtaaaacattcatttatgagatgggaacttggtgcctgctgggttcagcatttgcaggatcagaaaaattctgataaggataaaaagcaaggtggtgagaaggataagaaaaaaacactggacaaatctaaagaaccaaagattgaagggctagggaagcctctcaaagctcttaagaatgcaaaaaatgttgattctgctgacctgggttcctcagcgggacccaaaagctctgcagaaagccagaaagataagccatcagatgttaaattgcctcaaggagagtccagtgcttctgagaatgaaaatctgctgaaggatttattaccagaatctgcttttaccaggttgaaagaatctgaaactgggctccaccagaagtcaccacctgagttgattgagatggctctgaagtactatgatgaagttgcacttcctaagctggttgctgattttggttctctggaactttcacctgttgacggtaggactttgactgatttcatgcataccagaggcttacagatgcgttctctaggacgagttgtcaagctttcagagaagctttcacatgttcagtccctatgtgtgcatgagatgatagtgcgtgctttcaagcatatcgtccgttctgtgattgctgctatttcagacattcgacaattagcactaacaatagctgcagcgttgaacttattgcttggtgtccctgaatctgatgtctctggaagttctcctaatgtgcatcccctagtatggagatggctggtgatcttcttgaaaaagagatatgaatttgagctcacggagaaacattaccatgatgtgaggaaatatgctgtccttagaggactgtgccataaggtgggcattgattttgcaccccgagatttcattatggattgctctttcccattccataagcaggacattattagcctggtacctgtacataagcaagttgcatgctcatctgcagatggtaggcaactgctagaatcctctaaaactgcccttgacaagggtaaacttgaagatgctgtcaattatgggaccaaggctctttccaagctcataactgtatgtggtccctaccaccgaatgacagctggagcttatagtctgctagctgttgttttgtaccatactggtgattttaatcaggctactatttatcagcaaaaggccctagacatcaatgagagagaacttggacttgaccaccctgatactatgaagagttatggagaccttgctgtgttctactaccgtctgcaacatacagaattggccctaaagtatgtcaagcgtgcgctatatcttctgcatcttacgtgcgggccatctcatccaaatacagctgctacatatatcaatgtagctatgatggaagaaggattgggcaatgtgcatgtagctctaagatacttgcacaaagctttaaaatgcaaccagaaattactagggcctgatcatatacagactgctgccagctaccatgctatagccatagctctctcgttgatggaagcatattccttgagtgtccagcatgagcaaacaaccttgcaaatccttcgtgcaaagcttggaccagatgatctaagaactcaggatgctgctgcttggcttgaatactttgagtcaaaggtaattgagcaacaagaagctgcacggaatggaactcggaagcctgacgcatcaatagctagtaaaggacacctaagtgtatctgatctgcttgattacataaatcctgaccaagagagcaagggaagagattctgaatttggaaaaaggagatactcaagcataaagttcaaatggagcaagccctgagatatctccaagagattcaaatcccattatagatgaggaacagcaagttaaagagccatcaaaagatgacagcactaaaagtatttctgaagctgaagttaaacagactcctgaatcatttgagcatccagcaccttctgagccacaactagagatagttgaggcgaacattaatgcacctaaggaagttattgaagttgaaaattcagaacctgaagatggttggcagcctgttcaaagacctaaatcagctgggggttcaggaaaacagatgaaacattatcgcccaaccaccagaaaggtgtatgaccctgatagtcatgatccaacatatacttcacaatacaaggcaaggaattcctattcaaataaccggtattatttcttaaggaagagaacagttgtacctacaacgtacacagatcctcaacagcatgtgaaagttcagacatttggtgccaggtttggtcgcaagatttacaaggctgtgacctatcgggttaagccagcgactgcaacaacagaggtgctagatacttttaagagtacagagcagatgagtggtaaagcagaatcacaggtagcaaactcacaagcacacaatcctacctcaacagatcacaaaggaagtgagtcacatggaactttagttgcaagtagtggaaatgctccatcatacaaagatgttgcactagcacggcctggaacaattgccaagactcaaatacagaaacctagagacgatgtaccacagaaccaaccatcacttggtcagattattgcacaagaaatgaaagattctttggttgattcactccaagtggaacagggacctgtctctgcaaataccaataattctaaagaagaaaccaatgtgctaggaaaactccagaaattagaagaaacaaaattctctgaaggggaactggagattgagaatctgtgcaaagacagggtacaagatttgccaataccaaaggctgaggaatctggaattggaagtgagcctgtaaatagtaaaaaagatgccaatgtgttaagtaacacaagtcaagaactatcaagtagtagcaatgatggtgcagccattgagttttcggagtcaactggatctgtaaaaactgaacagactgagaagtctgatacggatttttttgaagctctaccccgcagtatagaaaatatttcagtttcagcatctactacaaacacagggagtcttggaggtgatggaagtgagaagtccaagcctaacttagtgctaagtaatattgatttgagagagatgcctaataagaagctatctgcttctgcaccaccgtttaatccatctccaccatctgtacttagcccactttctggcaatgttggtctcccgccaccaggtgccattccaggagtagcaccttggcctgtgaatgtatccctgcatcctgggcattcaactatggtgccaagtggtcctcctttgtgcacttcccctcatcatttataccctcctgctccccgatctcctaatctcatgcatcctgtgccatttatttatccaccatatagtcaaccacaggtggttccaaacaccacatttcccatgaacactaatatttttcggcctaaccattatggatggcaaccttatatgggcccagcgccatcagaatttgtgccaatgtcagcatggtcaagtagccatacaattgacttcattcccacaccacatgttgttgatcctatttctcaatctttagcagataagcatattcaatctgatgcagctgttgttagtataggcccttcactggacagtagcgctgtagtggccaaagaggagatggagactcctgcagtggcagtaagtggcaatttgataagcaacaaacatgatgatcaagataaacaattaaaggatgccactagaattgaactgagtcctgaaatgcaagaagacaacaagcatgatgaaggtagtttcaggatatatgtaaaggggaaaagccgtcggaaacaaactctgagaatcccaataagtttgcttaacaagacatatgggtcacgctcatttaagcttgtctataacaaagtagtcagagagaatgacatcttcaggccttcaagtgtgtcctttgctgaagttgtttcatctggcaactaggttatgcaaattctaaagcatctaattatgacattagtacccaaaagaaaattgtcatggatctccaattcaaatgtactgaaatgaagttattatttggaaggcagcattattctcataccatattccagatatgaaatcccaccactcgaaactattcaaaaaggataaatattttttcatttcaaatacggtaccgacaatcctgtgtagagtccagaaaagatgcaaggaattttgtgagatccagaactaataggagatggaagtattacgaataataatactagactgtctagacaggctgaattttcttcaattttgatagattaagagaaaggaatcctcttcaatttttggagctcacttttgggcttttgaagccgagcctttagattttgttcttttgttacgctgcggcacctaataaatgacttgccttctatgttttcgagaaacttacattattcttttttatataacaataatactgtctattcagtaaagctgcttgtttgtgga

SEQ ID NO: 202525 - DNA, 6646 bp, Zea Mays
caccaatccacccttatcaatcccctgctcgctatcattctcgctccctccctcccttccttggccttgccacttcctccgcctctgccctgctctgctcagcttctcacctcccagctgggctccccacccctctcgctccctgttctatcctctcgttccctctgcaaccttctctctctctagcttatcccgataatggctgcctcgagcagcaccacctagctagccgtgcccgctccacgcaacacgtacgtacgtccgctgctcggcgtcggttccgcctcgtacaacaaccacactttgcattgagccaggtcgtccagcttctgaggaggagcggcagcacgcacctgggcgccggcccactgctgcagctgggctgctagcttgagctgagcttgccgttgggcgcgcgcgtgcatggcgcccaagagcaggcgtgggaaggccaagggcgagaagaagaagaaagatgagaaagttctccctgtggccattgacatcactgtcaacctcccggaccagtctcatgtcattctgaagggtatttcaacggacaggatcatcgatgtgaggcggctgctctgcgtcaacaccgccacgtgtgccatcacaaattattctctcacacatgagatgcgtgatggtgcgttgaaggatgccgctgacattgctacactaaaaccctgcactctcacattggtcgaagaggagtacagcgaggagagcgcggtcgagcatgtccggcgtctgctggacatcgtcgcttgcaccacctgcttcggcccagcgccgccacctcctcctccgccgtcccccaaggacgccgatgccgctaaggagacatccagctccagctccacatccaaggccgtcgcatccgcctcctcgggtgggcgccgcacggcctcaccgccgccggcctcgccgtcctccgctgccgcgaaggagtcgtcagccgcaaaggaggcagcagccaaggagtccgcggctgcggtagagctggaggccgagatgagcggcgcgtgccctcgcctcggcgccttctacgagttcttctcactagccaacctcacgccgccactccaatttgtaaggcgagtgttgcagcctcgacaggaggaacagccttcggatgaccatctgttctttcttgaggcaaagctatgtagtgggaagttccttgttgttgaagctcggcgaaagggattcttcagtctaggaaagcagcgagtcttgtgccacaacctagtcgatcttctgaggcatcttagtagagcatttgacaatgcttatgaagatcttatgaaggcatttttggaacgaaacaagtttggaaattttccttatgggtttcgtgcaaatacatggcttgttcctccaattgctgcgcagtcaccatcaacgtttcctcctcttcctgctgaggatgaaacatggggaggcagtggaggtggttggggaagggatggaaagagcgacatggtgccatgggcagatgaatttctctatctcacatccatgccttgcaaaactgctgaggagagggaactccgtgacaggagagcattcctacttcacagcctctttgtagatgttgccatctttcgggctattgcagcagtaaggcatgtaatggagggtacagagttatcggcatcaaccaatatagatgaagtcttgtattctgagacagtgggacattttagcatcactgtcacaagagattcttcagatgcaagctgcaagatggacactaagatagatggaaacagagccacaggaatggactctaaggatcttgcggaaagaaaccttttgaaaggaataactgcagatgaaaacacagctgctcatgatgtcgacagtttgggcattatcaaccttagatattgtggatatgttgcagtagcaaaggtggacaacatcgacaaaaccaaagtaaatgcttctatcaagcctatgaatatcgcagatcaacctgaagggggtgcacatgcattgaacattaacagtttgaggatgctccttaatgaagccacctctaccggggagaaaaagatatcaaacctttcacaaaatcataggcaggaagaactaattgcggcacaaacttttgttgagaagttattgaaggaaagtcttcaaaagcttgaggaagaggaaaatgtaaaacattcatttatgagatgggaacttggtgcctgctgggttcagcatttgcaggatcagaaaaattctgataaggataaaaagcaaggtggtgagaaggataagaaaaaaacactggacaaatctaaagaaccaaagattgaagggctagggaagcctctcaaagctcttaagaatgcaaaaaatgttgattctgctgacctgggttcctcagcgggacccaaaagctctgcagaaagccagaaagataagccatcagatgttaaattgcctcaaggagagtccagtgcttctgagaatgaaaatctgctgaaggatttattaccagaatctgcttttaccaggttgaaagaatctgaaactgggctccaccagaagtcaccacctgagttgattgagatggctctgaagtactatgatgaagttgcacttcctaagctggttgctgattttggttctctggaactttcacctgttgacggtaggactttgactgatttcatgcataccagaggcttacagatgcgttctctaggacgagttgtcaagctttcagagaagctttcacatgttcagtccctatgtgtgcatgagatgatagtgcgtgctttcaagcatatcgtccgttctgtgattgctgctatttcagacattcgacaattagcactaacaatagctgcagcgttgaacttattgcttggtgtccctgaatctgatgtctctggaagttctcctaatgtgcatcccctagtatggagatggctggtgatcttcttgaaaaagagatatgaatttgagctcacggagaaacattaccatgatgtgaggaaatatgctgtccttagaggactgtgccataaggtgggcattgattttgcaccccgagatttcattatggattgctctttcccattccataagcaggacattattagcctggtacctgtacataagcaagttgcatgctcatctgcagatggtaggcaactgctagaatcctctaaaactgcccttgacaagggtaaacttgaagatgctgtcaattatgggaccaaggctctttccaagctcataactgtatgtggtccctaccaccgaatgacagctggagcttatagtctgctagctgttgttttgtaccatactggtgattttaatcaggctactatttatcagcaaaaggccctagacatcaatgagagagaacttggacttgaccaccctgatactatgaagagttatggagaccttgctgtgttctactaccgtctgcaacatacagaattggccctaaactgctacatatatcaatgtagctatgatggaagaaggattgggcaatgtgcatgtagctctaagatacttgcacaaagctttaaaatgcaaccagaaattactagggcctgatcatatacagactgctgccagctaccatgctatagccatagctctctcgttgatggaagcatattccttgagtgtccagcatgagcaaacaaccttgcaaatccttcgtgcaaagcttggaccagatgatctaagaactcaggatgctgctgcttggcttgaatactttgagtcaaaggtaattgagcaacaagaagctgcacggaatggaactcggaagcctgacgcatcaatagctagtaaaggacacctaagtgtatctgatctgcttgattacataaatcctgaccaagagagcaagggaagagattctgaatttggaaaaaggagatactcaagcataaaggttttatctcattcaaatgaaagttcaaatggagcaagccctgagatatctccaagagattcaaatcccattatagatgaggaacagcaagttaaagagccatcaaaagatgacagcactaaaagtatttctgaagctgaagttaaacagactcctgaatcatttgagcatccagcaccttctgagccacaactagagatagttgaggcgaacattaatgcacctaaggaagttattgaagttgaaaattcagaacctgaagatggttggcagcctgttcaaagacctaaatcagctgggggttcaggaaaacagatgaaacattatcgcccaaccaccagaaaggtgtatgaccctgatagtcatgatccaacatatacttcacaatacaaggcaaggaattcctattcaaataaccggtattatttcttaaggaagagaacagttgtacctacaacgtacacagatcctcaacagcatgtgaaagttcagacatttggtgccaggtttggtcgcaagatttacaaggctgtgacctatcgggttaagccagcgactgcaacaacagaggtgctagatacttttaagagtacagagcagatgagtggtaaagcagaatcacaggtagcaaactcacaagcacacaatcctacctcaacagatcacaaaggaagtgagtcacatggaactttagttgcaagtagtggaaatgctccatcatacaaagatgttgcactagcacggcctggaacaattgccaagactcaaatacagaaacctagagacgatgtaccacagaaccaaccatcacttggtcagattattgcacaagaaatgaaagattctttggttgattcactccaagtggaacagggacctgtctctgcaaataccaataattctaaagaagaaaccaatgtgctaggaaaactccagaaattagaagaaacaaaattctctgaaggggaactggagattgagaatctgtgcaaagacagggtacaagatttgccaataccaaaggctgaggaatctggaattggaagtgagcctgtaaatagtaaaaaagatgccaatgtgttaagtaacacaagtcaagaactatcaagtagtagcaatgatggtgcagccattgagttttcggagtcaactggatctgtaaaaactgaacagactgagaagtctgatacggatttttttgaagctctaccccgcagtatagaaaatatttcagtttcagcatctactacaaacacagggagtcttggaggtgatggaagtgagaagtccaagcctaacttagtgctaagtaatattgatttgagagagatgcctaataagaagctatctgcttctgcaccaccgtttaatccatctccaccatctgtacttagcccactttctggcaatgttggtctcccgccaccaggtgccattccaggagtagcaccttggcctgtgaatgtatccctgcatcctgggcattcaactatggtgccaagtggtcctcctttgtgcacttcccctcatcatttataccctcctgctccccgatctcctaatctcatgcatcctgtgccatttatttatccaccatatagtcaaccacaggtggttccaaacaccacatttcccatgaacactaatatttttcggcctaaccattatggatggcaaccttatatgggcccagcgccatcagaatttgtgccaatgtcagcatggtcaagtagccatacaattgacttcattcccacaccacatgttgttgatcctatttctcaatctttagcagataagcatattcaatctgatgcagctgttgttagtataggcccttcactggacagtagcgctgtagtggccaaagaggagatggagactcctgcagtggcagtaagtggcaatttgataagcaacaaacatgatgatcaagataaacaattaaaggatgccactagaattgaactgagtcctgaaatgcaagaagacaacaagcatgatgaaggtagtttcaggatatatgtaaaggggaaaagccgtcggaaacaaactctgagaatcccaataagtttgcttaacaagacatatgggtcacgctcatttaagcttgtctataacaaagtagtcagagagaatgacatcttcaggccttcaagtgtgtcctttgctgaagttgtttcatctggcaactaggttatgcaaattctaaagcatctaattatgacattagtacccaaaagaaaattgtcatggatctccaattcaaatgtactgaaatgaagttattatttggaaggcagcattattctcataccatattccagatatgaaatcccaccactcgaaactattcaaaaaggataaatattttttcatttcaaatacggtaccgacaatcctgtgtagagtccagaaaagatgcaaggaattttgtgagatccagaactaataggagatggaagtattacgaataataatactagactgtctagacaggctgaattttcttcaattttgatagattaagagaaaggaatcctcttcaatttttggagctcacttttgggcttttgaagccgagcctttagattttgttcttttgttacgctgcggcacctaataaatgacttgccttctatgttttcgagaaacttacattattcttttttatataacaataatactgtctattcagtaaagctgcttgtttgtgga

SEQ ID NO: 202526 - DNA, 6595 bp, Zea Mays
caccaatccacccttatcaatcccctgctcgctatcattctcgctccctccctcccttccttggccttgccacttcctccgcctctgccctgctctgctcagcttctcacctcccagctgggctccccacccctctcgctccctgttctatcctctcgttccctctgcaaccttctctctctctagcttatcccgataatggctgcctcgagcagcaccacctagctagccgtgcccgctccacgcaacacgtacgtacgtccgctgctcggcgtcggttccgcctcgtacaacaaccacactttgcattgagccaggtcgtccagcttctgaggaggagcggcagcacgcacctgggcgccggcccactgctgcagctgggctgctagcttgagctgagcttgccgttgggcgcgcgcgtgcatggcgcccaagagcaggcgtgggaaggccaagggcgagaagaagaagaaagatgagaaagttctccctgtggccattgacatcactgtcaacctcccggaccagtctcatgtcattctgaagggtatttcaacggacaggatcatcgatgtgaggcggctgctctgcgtcaacaccgccacgtgtgccatcacaaattattctctcacacatgagatgcgtgatggtgcgttgaaggatgccgctgacattgctacactaaaaccctgcactctcacattggtcgaagaggagtacagcgaggagagcgcggtcgagcatgtccggcgtctgctggacatcgtcgcttgcaccacctgcttcggcccagcgccgccacctcctcctccgccgtcccccaaggacgccgatgccgctaaggagacatccagctccagctccacatccaaggccgtcgcatccgcctcctcgggtgggcgccgcacggcctcaccgccgccggcctcgccgtcctccgctgccgcgaaggagtcgtcagccgcaaaggaggcagcagccaaggagtccgcggctgcggtagagctggaggccgagatgagcggcgcgtgccctcgcctcggcgccttctacgagttcttctcactagccaacctcacgccgccactccaatttgtaaggcgagtgttgcagcctcgacaggaggaacagccttcggatgaccatctgttctttcttgaggcaaagctatgtagtgggaagttccttgttgttgaagctcggcgaaagggattcttcagtctaggaaagcagcgagtcttgtgccacaacctagtcgatcttctgaggcatcttagtagagcatttgacaatgcttatgaagatcttatgaaggcatttttggaacgaaacaagtttggaaattttccttatgggtttcgtgcaaatacatggcttgttcctccaattgctgcgcagtcaccatcaacgtttcctcctcttcctgctgaggatgaaacatggggaggcagtggaggtggttggggaagggatggaaagagcgacatggtgccatgggcagatgaatttctctatctcacatccatgccttgcaaaactgctgaggagagggaactccgtgacaggagagcattcctacttcacagcctctttgtagatgttgccatctttcgggctattgcagcagtaaggcatgtaatggagggtacagagttatcggcatcaaccaatatagatgaagtcttgtattctgagacagtgggacattttagcatcactgtcacaagagattcttcagatgcaagctgcaagatggacactaagatagatggaaacagagccacaggaatggactctaaggatcttgcggaaagaaaccttttgaaaggaataactgcagatgaaaacacagctgctcatgatgtcgacagtttgggcattatcaaccttagatattgtggatatgttgcagtagcaaaggtggacaacatcgacaaaaccaaagtaaatgcttctatcaagcctatgaatatcgcagatcaacctgaagggggtgcacatgcattgaacattaacagtttgaggatgctccttaatgaagccacctctaccggggagaaaaagatatcaaacctttcacaaaatcataggcaggaagaactaattgcggcacaaacttttgttgagaagttattgaaggaaagtcttcaaaagcttgaggaagaggaaaatgtaaaacattcatttatgagatgggaacttggtgcctgctgggttcagcatttgcaggatcagaaaaattctgataaggataaaaagcaaggtggtgagaaggataagaaaaaaacactggacaaatctaaagaaccaaagattgaagggctagggaagcctctcaaagctcttaagaatgcaaaaaatgttgattctgctgacctgggttcctcagcgggacccaaaagctctgcagaaagccagaaagataagccatcagatgttaaattgcctcaaggagagtccagtgcttctgagaatgaaaatctgctgaaggatttattaccagaatctgcttttaccaggttgaaagaatctgaaactgggctccaccagaagtcaccacctgagttgattgagatggctctgaagtactatgatgaagttgcacttcctaagctggttgctgattttggttctctggaactttcacctgttgacggtaggactttgactgatttcatgcataccagaggcttacagatgcgttctctaggacgagttgtcaagctttcagagaagctttcacatgttcagtccctatgtgtgcatgagatgatagtgcgtgctttcaagcatatcgtccgttctgtgattgctgctatttcagacattcgacaattagcactaacaatagctgcagcgttgaacttattgcttggtgtccctgaatctgatgtctctggaagttctcctaatgtgcatcccctagtatggagatggctggtgatcttcttgaaaaagagatatgaatttgagctcacggagaaacattaccatgatgtgaggaaatatgctgtccttagaggactgtgccataaggtgggcattgattttgcaccccgagatttcattatggattgctctttcccattccataagcaggacattattagcctggtacctgtacataagcaagttgcatgctcatctgcagatggtaggcaactgctagaatcctctaaaactgcccttgacaagggtaaacttgaagatgctgtcaattatgggaccaaggctctttccaagctcataactgtatgtggtccctaccaccgaatgacagctggagcttatagtctgctagctgttgttttgtaccatactggtgattttaatcaggctactatttatcagcaaaaggccctagacatcaatgagagagaacttggacttgaccaccctgatactatgaagagttatggagaccttgctgtgttctactaccgtctgcaacatacagaattggccctaaagtatgtcaagcgtgcgctatatcttctgcatcttacgtgcgggccatctcatccaaatacagctgctacatatatcaatgtagctatgatggaagaaggattgggcaatgtgcatgtagctctaagatacttgcacaaagctttaaaatgcaaccagaaattactagggcctgatcatatacagactgctgccagctaccatgctatagccatagctctctcgttgatggaagcatattccttgagtgtccagcatgagcaaacaaccttgcaaatccttcgtgcaaagcttggaccagatgatctaagaactcagtgtatctgatctgcttgattacataaatcctgaccaagagagcaagggaagagattctgaatttggaaaaaggagatactcaagcataaaggttttatctcattcaaatgaaagttcaaatggagcaagccctgagatatctccaagagattcaaatcccattatagatgaggaacagcaagttaaagagccatcaaaagatgacagcactaaaagtatttctgaagctgaagttaaacagactcctgaatcatttgagcatccagcaccttctgagccacaactagagatagttgaggcgaacattaatgcacctaaggaagttattgaagttgaaaattcagaacctgaagatggttggcagcctgttcaaagacctaaatcagctgggggttcaggaaaacagatgaaacattatcgcccaaccaccagaaaggtgtatgaccctgatagtcatgatccaacatatacttcacaatacaaggcaaggaattcctattcaaataaccggtattatttcttaaggaagagaacagttgtacctacaacgtacacagatcctcaacagcatgtgaaagttcagacatttggtgccaggtttggtcgcaagatttacaaggctgtgacctatcgggttaagccagcgactgcaacaacagaggtgctagatacttttaagagtacagagcagatgagtggtaaagcagaatcacaggtagcaaactcacaagcacacaatcctacctcaacagatcacaaaggaagtgagtcacatggaactttagttgcaagtagtggaaatgctccatcatacaaagatgttgcactagcacggcctggaacaattgccaagactcaaatacagaaacctagagacgatgtaccacagaaccaaccatcacttggtcagattattgcacaagaaatgaaagattctttggttgattcactccaagtggaacagggacctgtctctgcaaataccaataattctaaagaagaaaccaatgtgctaggaaaactccagaaattagaagaaacaaaattctctgaaggggaactggagattgagaatctgtgcaaagacagggtacaagatttgccaataccaaaggctgaggaatctggaattggaagtgagcctgtaaatagtaaaaaagatgccaatgtgttaagtaacacaagtcaagaactatcaagtagtagcaatgatggtgcagccattgagttttcggagtcaactggatctgtaaaaactgaacagactgagaagtctgatacggatttttttgaagctctaccccgcagtatagaaaatatttcagtttcagcatctactacaaacacagggagtcttggaggtgatggaagtgagaagtccaagcctaacttagtgctaagtaatattgatttgagagagatgcctaataagaagctatctgcttctgcaccaccgtttaatccatctccaccatctgtacttagcccactttctggcaatgttggtctcccgccaccaggtgccattccaggagtagcaccttggcctgtgaatgtatccctgcatcctgggcattcaactatggtgccaagtggtcctcctttgtgcacttcccctcatcatttataccctcctgctccccgatctcctaatctcatgcatcctgtgccatttatttatccaccatatagtcaaccacaggtggttccaaacaccacatttcccatgaacactaatatttttcggcctaaccattatggatggcaaccttatatgggcccagcgccatcagaatttgtgccaatgtcagcatggtcaagtagccatacaattgacttcattcccacaccacatgttgttgatcctatttctcaatctttagcagataagcatattcaatctgatgcagctgttgttagtataggcccttcactggacagtagcgctgtagtggccaaagaggagatggagactcctgcagtggcagtaagtggcaatttgataagcaacaaacatgatgatcaagataaacaattaaaggatgccactagaattgaactgagtcctgaaatgcaagaagacaacaagcatgatgaaggtagtttcaggatatatgtaaaggggaaaagccgtcggaaacaaactctgagaatcccaataagtttgcttaacaagacatatgggtcacgctcatttaagcttgtctataacaaagtagtcagagagaatgacatcttcaggccttcaagtgtgtcctttgctgaagttgtttcatctggcaactaggttatgcaaattctaaagcatctaattatgacattagtacccaaaagaaaattgtcatggatctccaattcaaatgtactgaaatgaagttattatttggaaggcagcattattctcataccatattccagatatgaaatcccaccactcgaaactattcaaaaaggataaatattttttcatttcaaatacggtaccgacaatcctgtgtagagtccagaaaagatgcaaggaattttgtgagatccagaactaataggagatggaagtattacgaataataatactagactgtctagacaggctgaattttcttcaattttgatagattaagagaaaggaatcctcttcaatttttggagctcacttttgggcttttgaagccgagcctttagattttgttcttttgttacgctgcggcacctaataaatgacttgccttctatgttttcgagaaacttacattattcttttttatataacaataatactgtctattcagtaaagctgcttgtttgtgga

SEQ ID NO: 202527 - DNA, 6595 bp, Zea Mays
caccaatccacccttatcaatcccctgctcgctatcattctcgctccctccctcccttccttggccttgccacttcctccgcctctgccctgctctgctcagcttctcacctcccagctgggctccccacccctctcgctccctgttctatcctctcgttccctctgcaaccttctctctctctagcttatcccgataatggctgcctcgagcagcaccacctagctagccgtgcccgctccacgcaacacgtacgtacgtccgctgctcggcgtcggttccgcctcgtacaacaaccacactttgcattgagccaggtcgtccagcttctgaggaggagcggcagcacgcacctgggcgccggcccactgctgcagctgggctgctagcttgagctgagcttgccgttgggcgcgcgcgtgcatggcgcccaagagcaggcgtgggaaggccaagggcgagaagaagaagaaagatgagaaagttctccctgtggccattgacatcactgtcaacctcccggaccagtctcatgtcattctgaagggtatttcaacggacaggatcatcgatgtgaggcggctgctctgcgtcaacaccgccacgtgtgccatcacaaattattctctcacacatgagatgcgtgatggtgcgttgaaggatgccgctgacattgctacactaaaaccctgcactctcacattggtcgaagaggagtacagcgaggagagcgcggtcgagcatgtccggcgtctgctggacatcgtcgcttgcaccacctgcttcggcccagcgccgccacctcctcctccgccgtcccccaaggacgccgatgccgctaaggagacatccagctccagctccacatccaaggccgtcgcatccgcctcctcgggtgggcgccgcacggcctcaccgccgccggcctcgccgtcctccgctgccgcgaaggagtcgtcagccgcaaaggaggcagcagccaaggagtccgcggctgcggtagagctggaggccgagatgagcggcgcgtgccctcgcctcggcgccttctacgagttcttctcactagccaacctcacgccgccactccaatttgtaaggcgagtgttgcagcctcgacaggaggaacagccttcggatgaccatctgttctttcttgaggcaaagctatgtagtgggaagttccttgttgttgaagctcggcgaaagggattcttcagtctaggaaagcagcgagtcttgtgccacaacctagtcgatcttctgaggcatcttagtagagcatttgacaatgcttatgaagatcttatgaaggcatttttggaacgaaacaagtttggaaattttccttatgggtttcgtgcaaatacatggcttgttcctccaattgctgcgcagtcaccatcaacgtttcctcctcttcctgctgaggatgaaacatggggaggcagtggaggtggttggggaagggatggaaagagcgacatggtgccatgggcagatgaatttctctatctcacatccatgccttgcaaaactgctgaggagagggaactccgtgacaggagagcattcctacttcacagcctctttgtagatgttgccatctttcgggctattgcagcagtaaggcatgtaatggagggtacagagttatcggcatcaaccaatatagatgaagtcttgtattctgagacagtgggacattttagcatcactgtcacaagagattcttcagatgcaagctgcaagatggacactaagatagatggaaacagagccacaggaatggactctaaggatcttgcggaaagaaaccttttgaaaggaataactgcagatgaaaacacagctgctcatgatgtcgacagtttgggcattatcaaccttagatattgtggatatgttgcagtagcaaaggtggacaacatcgacaaaaccaaagtaaatgcttctatcaagcctatgaatatcgcagatcaacctgaagggggtgcacatgcattgaacattaacagtttgaggatgctccttaatgaagccacctctaccggggagaaaaagatatcaaacctttcacaaaatcataggcaggaagaactaattgcggcacaaacttttgttgagaagttattgaaggaaagtcttcaaaagcttgaggaagaggaaaatgtaaaacattcatttatgagatgggaacttggtgcctgctgggttcagcatttgcaggatcagaaaaattctgataaggataaaaagcaaggtggtgagaaggataagaaaaaaacactggacaaatctaaagaaccaaagattgaagggctagggaagcctctcaaagctcttaagaatgcaaaaaatgttgattctgctgacctgggttcctcagcgggacccaaaagctctgcagaaagccagaaagataagccatcagatgttaaattgcctcaaggagagtccagtgcttctgagaatgaaaatctgctgaaggatttattaccagaatctgcttttaccaggttgaaagaatctgaaactgggctccaccagaagtcaccacctgagttgattgagatggctctgaagtactatgatgaagttgcacttcctaagctggttgctgattttggttctctggaactttcacctgttgacggtaggactttgactgatttcatgcataccagaggcttacagatgcgttctctaggacgagttgtcaagctttcagagaagctttcacatgttcagtccctatgtgtgcatgagatgatagtgcgtgctttcaagcatatcgtccgttctgtgattgctgctatttcagacattcgacaattagcactaacaatagctgcagcgttgaacttattgcttggtgtccctgaatctgatgtctctggaagttctcctaatgtgcatcccctagtatggagatggctggtgatcttcttgaaaaagagatatgaatttgagctcacggagaaacattaccatgatgtgaggaaatatgctgtccttagaggactgtgccataaggtgggcattgattttgcaccccgagatttcattatggattgctctttcccattccataagcaggacattattagcctggtacctgtacataagcaagttgcatgctcatctgcagatggtaggcaactgctagaatcctctaaaactgcccttgacaagggtaaacttgaagatgctgtcaattatgggaccaaggctctttccaagctcataactgtatgtggtccctaccaccgaatgacagctggagcttatagtctgctagctgttgttttgtaccatactggtgattttaatcaggctactatttatcagcaaaaggccctagacatcaatgagagagaacttggacttgaccaccctgatactatgaagagttatggagaccttgctgtgttctactaccgtctgcaacatacagaattggccctaaagtatgtcaagcgtgcgctatatcttctgcatcttacgtgcgggccatctcatccaaatacagctgctacatatatcaatgtagctatgatggaagaaggattgggcaatgtgcatgtagctctaagatacttgcacaaagctttaaaatgcaaccagaaattactagggcctgatcatatacagactgctgccagctaccatgctatagccatagctctctcgttgatggaagcatattccttgagtgtccagcatgagcaaacaaccttgcaaatccttcgtgcaaagcttggaccagatgatctaagaactcaggatgctgctgcttggcttgaatactttgagtcaaaggtaattgagcaacaagaagctgcacggaatggaactcggaagcctgacgcatcaatagctagtaaaggacacctaagtgtatctgatctgcttgattacataaatcctgaccaagagagcaagggaagagattctgaatttggaaaaaggagatactcaagcataaaggttttatctcattcaaatgaaagttcaaatggagcaagccctgagatatctccaagagattcaaatcccattatagatgaggaacagcaagttaaagagccatcaaaagatgacagcactaaaagtatttctgaagctgaagttaaacagactcctgaatcatttgagcatccagcaccttctgagccacaactagagatagttgaggcgaacattaatgcacctaaggaagttattgaagttgaaaattcagaacctgaagatggttggcagcctgttcaaagacctaaatcagctgggggttcaggaaaacagatgaaacattatcgcccaaccaccagaaaggtgtatgaccctgatagtcatgatccaacatatacttcacaatacaaggtttggtcgcaagatttacaaggctgtgacctatcgggttaagccagcgactgcaacaacagaggtgctagatacttttaagagtacagagcagatgagtggtaaagcagaatcacaggtagcaaactcacaagcacacaatcctacctcaacagatcacaaaggaagtgagtcacatggaactttagttgcaagtagtggaaatgctccatcatacaaagatgttgcactagcacggcctggaacaattgccaagactcaaatacagaaacctagagacgatgtaccacagaaccaaccatcacttggtcagattattgcacaagaaatgaaagattctttggttgattcactccaagtggaacagggacctgtctctgcaaataccaataattctaaagaagaaaccaatgtgctaggaaaactccagaaattagaagaaacaaaattctctgaaggggaactggagattgagaatctgtgcaaagacagggtacaagatttgccaataccaaaggctgaggaatctggaattggaagtgagcctgtaaatagtaaaaaagatgccaatgtgttaagtaacacaagtcaagaactatcaagtagtagcaatgatggtgcagccattgagttttcggagtcaactggatctgtaaaaactgaacagactgagaagtctgatacggatttttttgaagctctaccccgcagtatagaaaatatttcagtttcagcatctactacaaacacagggagtcttggaggtgatggaagtgagaagtccaagcctaacttagtgctaagtaatattgatttgagagagatgcctaataagaagctatctgcttctgcaccaccgtttaatccatctccaccatctgtacttagcccactttctggcaatgttggtctcccgccaccaggtgccattccaggagtagcaccttggcctgtgaatgtatccctgcatcctgggcattcaactatggtgccaagtggtcctcctttgtgcacttcccctcatcatttataccctcctgctccccgatctcctaatctcatgcatcctgtgccatttatttatccaccatatagtcaaccacaggtggttccaaacaccacatttcccatgaacactaatatttttcggcctaaccattatggatggcaaccttatatgggcccagcgccatcagaatttgtgccaatgtcagcatggtcaagtagccatacaattgacttcattcccacaccacatgttgttgatcctatttctcaatctttagcagataagcatattcaatctgatgcagctgttgttagtataggcccttcactggacagtagcgctgtagtggccaaagaggagatggagactcctgcagtggcagtaagtggcaatttgataagcaacaaacatgatgatcaagataaacaattaaaggatgccactagaattgaactgagtcctgaaatgcaagaagacaacaagcatgatgaaggtagtttcaggatatatgtaaaggggaaaagccgtcggaaacaaactctgagaatcccaataagtttgcttaacaagacatatgggtcacgctcatttaagcttgtctataacaaagtagtcagagagaatgacatcttcaggccttcaagtgtgtcctttgctgaagttgtttcatctggcaactaggttatgcaaattctaaagcatctaattatgacattagtacccaaaagaaaattgtcatggatctccaattcaaatgtactgaaatgaagttattatttggaaggcagcattattctcataccatattccagatatgaaatcccaccactcgaaactattcaaaaaggataaatattttttcatttcaaatacggtaccgacaatcctgtgtagagtccagaaaagatgcaaggaattttgtgagatccagaactaataggagatggaagtattacgaataataatactagactgtctagacaggctgaattttcttcaattttgatagattaagagaaaggaatcctcttcaatttttggagctcacttttgggcttttgaagccgagcctttagattttgttcttttgttacgctgcggcacctaataaatgacttgccttctatgttttcgagaaacttacattattcttttttatataacaataatactgtctattcagtaaagctgcttgtttgtgga

SEQ ID NO: 202528 - DNA, 844 bp, Zea Mays
tgataaatgcgtgatttctctttcagcatttcaaaagctaagctttctgagtattcagaaaagattgaagcacttgcttccaggcttgctgcttcagtgcctgaaaatgaaaagccgattattgaaagcaaagatgaaatctcttatgaagaagcaaagccagaaagtccaatatctttatcatcaggactgcgaaggagatcaacagcccatgctgtggttggaacaagccatcaggaaaataaagaagatatcggagcaccgataaaattggatgcagaagctcaggctcacattgagaagcataggaagctccaagaagatttgactgatgaaatggtcgagttagcacgtcaactgaaggaaagtagcctaatgatgaaccaatccgtgcaggagacagagaagatccttgattctaccgagagggccgtggagcacagcctggcaagcacaggccacgcaacctcgcgagctgcggaggtctactcgctggcttccaagactacgtgcttccagtggctgctaatgtttgtgatgacctgcatgtttgtaatggtggttctgctgataaggatcacttgaatgatgaggctgtagcaggcactcaaatcgtagtcacccttgtctttgtttcatgggaattctttgtggtcaggtcatggtatttttccgagcaagtgtccccaaccaaacaagcctgctgtatgagagagaaactggaacagctgcctgtacagaggcttggtggtcgctgttttattggtcaggcctgagagactcccgtcggagacagaaaccggcggtcggcgttgcctcagcgtggttttcacgcagggtgatt

SEQ ID NO: 202529 - DNA, 1858 bp, Zea Mays
ggcccgcccggcgccccctccctatcctctcacccacgaccacgacccaccccaccgcaccccaggtccccaccccactcactacaccaccagtccaccaccgctctcttaccccggaggccggaacaaaacacggagtggccgcgccccgcgcccgcgcggaatcggacgagccacggtctaccagcacagcgctatacaccgccggccttcttggcttccttctaccgattccgtgtgctgttcgctgtcgcctattgcgcttgcgcctacttgctcgcgccgctgtcgcctcaccccccaatccaatcctccgcgatcgatcggcgggcgcggatggaggcgctgaagaagcaggccagcaagctccgcgagcacgtcgccaagcagcagcaggcggtcctcaagcagttcagtacgcggtatagtcaagatccttctcttgttgatgaagcggagcttgagtgccaccagaatctccaaaggctttacagtactacaagagcagctaagcatttccagcggaatattgtacgaggggtggaaggtttcattgcagttagcaccaaacagatggagattgtgaaaaaactagccggggattgttgtaaatatggagacgacaatcagcattttggttttgctcttgcaagggcgtctgaggagttcggtaaatctcataaacaaatagagaaagagcgggaggatcttcttaaaattcttggagagcagatttttgagcctctccgagaaatgataatgagtgctcctcttgaagatgctcgattgctaacttaccgttatcaacggatcagacaggacatggagtctcagatagctgatgtgatgagaaagcaacttaaatccaaggaaagtagtggtaacacagataactctgtgaaactgcaacatgcagaatcgaaattatcagatcttcgaactacactggcagcgttaggaagagaagcaactgcagctatggaggctgtagaggctcagcaacagcaagttacgtacgaacgtctccttgcaatggttgatgctgagaggacatatcatcaaaatgctgctgatattctgaataaactccatgatgagatgctctatgcaaagcatcataatgagtcagcaaaccactacgatgaacagtcttcagagcctgaatcagatgcaggcccagcacaagtgcactcacgtagcacatctgaagatccagtattgactaaacctagcgaatccacagggaacagtcaggaggtgcaatttctgggggaggttattcatccattcgatgctcaggctgatggtgagctcagtctcgcggtgggtgaatacgttgtggtccgccaggtggctgcaaatggttggtctgaaggtgaatgcaagggaaaggctggctggttcccatctgcctacgtagagcagagggacagagccccggcaagcaaggtgatagagcctggacttctgactacctgatccatcccgtagttatggctgctgacttgctgtcatggtcctttttttttctacattattgtacatgacatgccccatgagtgattagcgtatggcagaaccttcaccttttctgtgcagattattgttcttctagccttttcgttggtcggtaactgtatgtaaaatgtagttctgtctgttaggatttccttccggtattataacattgtacagagctattggtgatgagatgctgtcagcttgccctttcttttcggacagtgtgcttcctgacagatttatgctaactaatggtttcgtaacagtgagactggcactgctgccggtggttatggtacgaaacactgtagatggtagaagcggaatatgatttgag

SEQ ID NO: 202530 - DNA, 1845 bp, Zea Mays
ctctcacccacgaccacgacccaccccaccgcaccccaggtccccaccccactcactacaccaccagtccaccaccgctctcttaccccggaggccggaacaaaacacggagtggccgcgccccgcgcccgcgcggaatcggacgagccacggtctaccagcacagcgctatacaccgccggccttcttggcttccttctaccgattccgtgtgctgttcgctgtcgcctattgcgcttgcgcctacttggtaactacagcgtcggccgccatcccccgcagcagccgttttctagctgcttcccgctggttcgcggccgccgtcctgggcgtctgagcgaggggtaaccctgcccttttgttcctgggctattcctcagctcgcgccgctgtcgcctcaccccccaatccaatcctccgcgatcgatcggcgggcgcggatggaggcgctgaagaagcaggccagcaagctccgcgagcacgtcgccaagcagcagcagcatttccagcggaatattgtacgaggggtggaaggtttcattgcagttagcaccaaacagatggagattgtgaaaaaactagccggggattgttgtaaatatggagacgacaatcagcattttggttttgctcttgcaagggcgtctgaggagttcggtaaatctcataaacaaatagagaaagagcgggaggatcttcttaaaattcttggagagcagatttttgagcctctccgagaaatgataatgagtgctcctcttgaagatgctcgattgctaacttaccgttatcaacggatcagacaggacatggagtctcagatagctgatgtgatgagaaagcaacttaaatccaaggaaagtagtggtaacacagataactctgtgaaactgcaacatgcagaatcgaaattatcagatcttcgaactacactggcagcgttaggaagagaagcaactgcagctatggaggctgtagaggctcagcaacagcaagttacgtacgaacgtctccttgcaatggttgatgctgagaggacatatcatcaaaatgctgctgatattctgaataaactccatgatgagatgctctatgcaaagcatcataatgagtcagcaaaccactacgatgaacagtcttcagagcctgaatcagatgcaggcccagcacaagtgcactcacgtagcacatctgaagatccagtattgactaaacctagcgaatccacagggaacagtcaggaggtgcaatttctgggggaggttattcatccattcgatgctcaggctgatggtgagctcagtctcgcggtgggtgaatacgttgtggtccgccaggtggctgcaaatggttggtctgaaggtgaatgcaagggaaaggctggctggttcccatctgcctacgtagagcagagggacagagccccggcaagcaaggtgatagagcctggacttctgactacctgatccatcccgtagttatggctgctgacttgctgtcatggtcctttttttttctacattattgtacatgacatgccccatgagtgattagcgtatggcagaaccttcaccttttctgtgcagattattgttcttctagccttttcgttggtcggtaactgtatgtaaaatgtagttctgtctgttaggatttccttccggtattataacattgtacagagctattggtgatgagatgctgtcagcttgccctttcttttcggacagtgtgcttcctgacagatttatgctaactaatggtttcgtaacagtgagactggcactgctgccggtggttatggtacgaaacactgtagatggtagaagcggaatatgatttgag

SEQ ID NO: 202531 - DNA, 1720 bp, Zea Mays
ccccaccccactcactacaccaccagtccaccaccgctctcttaccccggaggccggaacaaaacacggagtggccgcgccccgcgcccgcgcggaatcggacgagccacggtctaccagcacagcgctatacaccgccggccttcttggcttccttctaccgattccgtgtgctgttcgctgtcgcctattgcgcttgcgcctacttggtaactacagcgtcggccgccatcccccgcagcagccgttttctagctgcttcccgctggttcgcggccgccgtcctgggcgtctgagcgaggggtaaccctgcccttttgttcctgggctattcctcagctcgcgccgctgtcgcctcaccccccaatccaatcctccgcgatcgatcggcgggcgcggatggaggcgctgaagaagcaggccagcaagctccgcgagcacgtcgccaagcagcagcaggcggtcctcaagcagttcagtacgcggtatagtcaagatccttctcttgttgatgaagcggagcttgagtgccaccagaatctccaaaggctttacagtactacaagagcagctaagcatttccagcggaatattgtacgaggggtggaaggtttcattgcagttagcaccaaacagatggagattgtgaaaaaactagccggggattgttgtaaatatggagacgacaatcagcattttggttttgctcttgcaagggcgtctgaggagttcggtaaatctcataaacaaatagagaaagagcgggaggatcttcttaaaattcttggagagcagatttttgagcctctccgagaaatgataatgagtgctcctcttgaagatgctcgattgctaacttaccgttatcaacggatcagacaggacatggagtctcaggttgatgctgagaggacatatcatcaaaatgctgctgatattctgaataaactccatgatgagatgctctatgcaaagcatcataatgagtcagcaaaccactacgatgaacagtcttcagagcctgaatcagatgcaggcccagcacaagtgcactcacgtagcacatctgaagatccagtattgactaaacctagcgaatccacagggaacagtcaggaggtgcaatttctgggggaggttattcatccattcgatgctcaggctgatggtgagctcagtctcgcggtgggtgaatacgttgtggtccgccaggtggctgcaaatggttggtctgaaggtgaatgcaagggaaaggctggctggttcccatctgcctacgtagagcagagggacagagccccggcaagcaaggtgatagagcctggacttctgactacctgatccatcccgtagttatggctgctgacttgctgtcatggtcctttttttttctacattattgtacatgacatgccccatgagtgattagcgtatggcagaaccttcaccttttctgtgcagattattgttcttctagccttttcgttggtcggtaactgtatgtaaaatgtagttctgtctgttaggatttccttccggtattataacattgtacagagctattggtgatgagatgctgtcagcttgccctttcttttcggacagtgtgcttcctgacagatttatgctaactaatggtttcgtaacagtgagactggcactgctgccggtggttatggtacgaaacactgtagatggtagaagcggaatatgatttgag

SEQ ID NO: 202532 - DNA, 1733 bp, Zea Mays
cccaccccactcactacaccaccagtccaccaccgctctcttaccccggaggccggaacaaaacacggagtggccgcgccccgcgcccgcgcggaatcggacgagccacggtctaccagcacagcgctatacaccgccggccttcttggcttccttctaccgattccgtgtgctgttcgctgtcgcctattgcgcttgcgcctacttggtaactacagcgtcggccgccatcccccgcagcagccgttttctagctgcttcccgctggttcgcggccgccgtcctgggcgtctgagcgaggggtaaccctgcccttttgttcctgggctattcctcagctcgcgccgctgtcgcctcaccccccaatccaatcctccgcgatcgatcggcgggcgcggatggaggcgctgaagaagcaggccagcaagctccgcgagcacgtcgccaagcagcagcagtgaaaaaactagccggggattgttgtaaatatggagacgacaatcagcattttggttttgctcttgcaagggcgtctgaggagttcggtaaatctcataaacaaatagagaaagagcgggaggatcttcttaaaattcttggagagcagatttttgagcctctccgagaaatgataatgagtgctcctcttgaagatgctcgattgctaacttaccgttatcaacggatcagacaggacatggagtctcagatagctgatgtgatgagaaagcaacttaaatccaaggaaagtagtggtaacacagataactctgtgaaactgcaacatgcagaatcgaaattatcagatcttcgaactacactggcagcgttaggaagagaagcaactgcagctatggaggctgtagaggctcagcaacagcaagttacgtacgaacgtctccttgcaatggttgatgctgagaggacatatcatcaaaatgctgctgatattctgaataaactccatgatgagatgctctatgcaaagcatcataatgagtcagcaaaccactacgatgaacagtcttcagagcctgaatcagatgcaggcccagcacaagtgcactcacgtagcacatctgaagatccagtattgactaaacctagcgaatccacagggaacagtcaggaggtgcaatttctgggggaggttattcatccattcgatgctcaggctgatggtgagctcagtctcgcggtgggtgaatacgttgtggtccgccaggtggctgcaaatggttggtctgaaggtgaatgcaagggaaaggctggctggttcccatctgcctacgtagagcagagggacagagccccggcaagcaaggtgatagagcctggacttctgactacctgatccatcccgtagttatggctgctgacttgctgtcatggtcctttttttttctacattattgtacatgacatgccccatgagtgattagcgtatggcagaaccttcaccttttctgtgcagattattgttcttctagccttttcgttggtcggtaactgtatgtaaaatgtagttctgtctgttaggatttccttccggtattataacattgtacagagctattggtgatgagatgctgtcagcttgccctttcttttcggacagtgtgcttcctgacagatttatgctaactaatggtttcgtaacagtgagactggcactgctgccggtggttatggtacgaaacactgtagatggtagaagcggaatatgatttgag

SEQ ID NO: 202533 - DNA, 1558 bp, Zea Mays
ccaccaccgctctcttaccccggaggccggaacaaaacacggagtggccgcgccccgcgcccgcgcggaatcggacgagccacggtctaccagcacagcgctatacaccgccggccttcttggcttccttctaccgattccgtgtgctgttcgctgtcgcctattgcgcttgcgcctacttggtaactacagcgtcggccgccatcccccgcagcagccgttttctagctgcttcccgctggttcgcggccgccgtcctgggcgtctgagcgaggggtaaccctgcccttttgttcctgggctattcctcagctcgcgccgctgtcgcctcaccccccaatccaatcctccgcgatcgatcggcgggcgcggatggaggcgctgaagaagcaggccagcaagctccgcgagcacgtcgccaagcagcagcagatttttgagcctctccgagaaatgataatgagtgctcctcttgaagatgctcgattgctaacttaccgttatcaacggatcagacaggacatggagtctcagatagctgatgtgatgagaaagcaacttaaatccaaggaaagtagtggtaacacagataactctgtgaaactgcaacatgcagaatcgaaattatcagatcttcgaactacactggcagcgttaggaagagaagcaactgcagctatggaggctgtagaggctcagcaacagcaagttacgtacgaacgtctccttgcaatggttgatgctgagaggacatatcatcaaaatgctgctgatattctgaataaactccatgatgagatgctctatgcaaagcatcataatgagtcagcaaaccactacgatgaacagtcttcagagcctgaatcagatgcaggcccagcacaagtgcactcacgtagcacatctgaagatccagtattgactaaacctagcgaatccacagggaacagtcaggaggtgcaatttctgggggaggttattcatccattcgatgctcaggctgatggtgagctcagtctcgcggtgggtgaatacgttgtggtccgccaggtggctgcaaatggttggtctgaaggtgaatgcaagggaaaggctggctggttcccatctgcctacgtagagcagagggacagagccccggcaagcaaggtgatagagcctggacttctgactacctgatccatcccgtagttatggctgctgacttgctgtcatggtcctttttttttctacattattgtacatgacatgccccatgagtgattagcgtatggcagaaccttcaccttttctgtgcagattattgttcttctagccttttcgttggtcggtaactgtatgtaaaatgtagttctgtctgttaggatttccttccggtattataacattgtacagagctattggtgatgagatgctgtcagcttgccctttcttttcggacagtgtgcttcctgacagatttatgctaactaatggtttcgtaacagtgagactggcactgctgccggtggttatggtacgaaacactgtagatggtagaagcggaatatgatttgag

SEQ ID NO: 202534 - DNA, 870 bp, Zea Mays
ggctgaagtcaaagggctgcctgtattttaaaatgtgcctttttgtgtgcagaaactcagcaggaagcttgttcatataagcgttgggctggtattcatgctcttttggcctctttttagcaccaggggttaacattataaggatgcttctactggggctgggacttatgaaaaacgaggctatggttaaatcaatgagccgctctggagattacagggaacttctcaagggcccactgtattatgctgctactataacttttgccacgtctcttttatggagaacctcaccagttgctatagcacttatatgcaacttatgtgctggggatggtatagccgatgttgttgggagacgcctaggtaaagaaaagcttccatacaatcccaacaaatcatatgctggaagcatagcaatggcggtggctggttttctggcctcagttgggtatatgcattacttccacactttcggttttattgaggaaacatggtacatggctttaagcttcctcgtggtctctgtagctgcagcactcgttgaatcgcaccccatcagcacagaacttgatgacaatttgactgttcctttgacatcattcctagttggtagcctcatcttttgatgtttaggcgcaaggacgtatgagatgtttctccgtcatgctgtaatcttctgatgtttaggctcaaggacatatgagatgtttctccgtcatgctgtattttatgtaaaacgtttctaaaatactactataattgtgagaatctgtacctagagtttggagaatatgttcggtttgtttatcataatacaagagtgtgtttggttagggagttgactggaatgaagcagttccattccggttc

SEQ ID NO: 202535 - DNA, 2303 bp, Zea Mays
ttcgttagtgatgctagtaaaccgaaaagagggaacaccagaaccatctataccctgactactcccctagaatgggaaaccagcaactcctcactctactttcactagcttgtattaattcttccttccttcctagtgtagctgcaccattccatttcccctccgcccttgttctattccgtccgtagtgccccagcttcccctgtgtccattcagttccttcattcaatgcaaccccagctcgaatctcctccgtgacgtgcagctctccacacgtcctgcttctccgatgccactccaggtccaccccctcctcctgctcctcttggtcagctcgcttccctcctgcgccatctcctccggttcctcctcttgcgccggccgcgacgacgcggccatcgtcgccgccgcgttccggcacgtgcgcaacttccgggccccgaggacgaaagcatgccagccggtcagagcgctccgcctcccgtcgcggaacctcaccggcgcggtgtcgtgggcggcgctggcaaacctgtccgcgctcgccgcggttgacctctcgggcaacgcgctccagggcgccatcccgggcgggttctggcgcgcgccatcgctccgcgcggttgacgtctcccgcaaccagctcggtggcgcgctccgggtggagcccaacccgcagctccagtcgctcaacgtatccggcaaccgcttcaccggcgtcgacggggtggaagggctctcggggctcgtcgcgcttgacgtgtcaacgaacaggatccgggcggtgccgcggggtctgcggcgtctgacacggttgaagcggctcgacctgtcctcgaacgggatgcgggggtggttccccggcgacttgccgccgctcggtggggtgcgttcgttgaacgtctcgtacaacaagttctccggcgtggtggacacgggcgccgtcacgaagttcggccactcggcgttcgttcacgccggcaatgcgtcgctggtgttctcgggccactcgacagagccacggcggccacggccatcacctcctcatggaaaaagcaaaaagaacggtggttcggccgggacgtcgacggagagcaaggcgacgaggagtagcaagaagaggaagcatctgagcaccgggctcggcgaggacgacaacccggcggccgctgccaccgcattccgggagctcgcgcgcctccgccaccccaacattcttccgctccttggctactgcattgcaggcaaagagaagctgctactgtacgagtacatggagaagggcgatctgcaccggtggctgcacgagctgccagcgggtcggccggacatggacgacacgggcagcggcgacatttgggaggcggcggaggtcaagcggtccatctccgactggccgacccggcaccgcatcgcgctgggggtcgcccggggcctggcgttcctgcaccagggatgggccggcgggtcggggcgcgcggcggtcgtgcacggccacctggtgccgaccaacgttctgctgtgcgacgacctggagccccggatctcagacttcgggcacaacaacgacccgccgtcggcggcgacgcccgagggcgacgtgtacgggttcggcgtgctggtgctggagctgatgacggggcaggccgggtgggacgaggcgtccgtgagctgggcgcggggcatcatccgcgacggcaaagggctggacatcgtggaccctagggtgcgggacgaggccgccggggcggaggcggaagcggagcgagagatggtggagtgcctgcgggtggggtacctctgcacggcgcacgcgccggacaagcggccgacaatgcagcaggtagtgggggtgctcaaggacatccggccggcgcctcccacacccggtccgggcagctgagccaagtgccaccagccacgccgggggggtcggactcggacggacacatgctcggggtcggggtcgctggcttgcacgaagcggcggcgtggccagtggccgttccctcccaatcgaggagaagcgtccgtccgttgttttgccttatgccttgcggttgcgggttatccatgatccaccaatggatcgggagcagcttttgctgttgcacggggtcctggtggcctgatgtagtgtggaccagaacgagacctcgttgtttgtactttgctgagatgtgaatgtaacagttttctttgccacttttcattgatgagatgcctgatttctatcttctcttttaaaaaaataatgtatccatccatttgtttaatttttttcctgtaataaaattgatctcaac

SEQ ID NO: 202536 - DNA, 876 bp, Zea Mays
ccgcatcgcctctccctgcagtaccccctacctggggttcctcttctctctcacgctagatcaggcggagcactattcatcccccaacctttccttccggaggatggcagcgagcgcgccttggcgaagaaacctcccgctccgttgcggtgggtttggactccagcgcggaggcctggacacgacaatgtgcaaggcggaggaaggccgactcggatccgctcgatctcgccgacgacgaggcccaacaacaggacgttgcggcgctgaggaagcattcccatcgattcctccctgagctgatccctggctcctcctcctcctccccgagaccccgaccaactactgcgttgaattgctgatcaagaacaagagccaactctggttatcaactccagcgactcaggcagacaagaagatgagtacttcatctgaagatatcagtgttcaagtcattttccctggatcacaatatcaaacaaatgagcaggagcagccaaagcatgtctcctctgctgtggatagtaccaatccagttggtttggcatcctcggctgctcctctctctgtgtgtgttcattatttatttttcggattcctgttgcttttcagtagattccattcacaaatgctcctgcacttttttaccgactgcgattgtgattgcttatcaatttcagttctaagagattttcagtaatcaagtgttccattgtatacttaattatgggtttttaaaatttagaaattaaatagtacataattatacacattatgtgcccctcaatattttatggagattatatgtctaaattgaaaaaaattaaatcaattattcaatggatttgtacgttaagaaaataaaaattgaaaaaa

SEQ ID NO: 202537 - DNA, 1126 bp, Zea Mays
atcttctgaacccatcccgccaattcgctatgcggaggctgttaaggaggcaccacgctcatcaacattgccgtcaagatcaactgtaatgaaagctggtccacaacaagtcctggattcactgtttaaaattcctgaaacacgcacgtatgagccaagttctatggactggaaaaaggtagtaaagaaactgcaaacaatcaattataccgctgcatcaaacaatcacgaaaggcctaaggatgggggtggctatcgtgagctccgtggtgttgctgcaaggcattacgataaaatgaaagaatactatcagaaagctgcctttgcatattcgaagggtgacaggtcatatgcttcttaccttgctgaggaggggaaacattatcgagaactaggtcgcatagaagacgagaaggccagcaggaatatatttgaagccagaaataagcatataacgaacacagtaaccatcgacttgcatggccaacatgtccaacatgctatgaaccttctcaaaattcacatgatgatttgtatttgcattccatctgtcttactgagggtaattaccggttgtggttcagaaggtacagggaagggaaaaataaagcgctcggttatagagcttgcggagaaggaacatattgagtggcgcgaagagaactctggaactgtagcccttcgacttggtgggccaagagagtatcggttccttgagcatgaaagcgattctgacctagtggggaactttaacatagattaacttctgatctaatctatgtattcccgtatttatgtgttatagctatggatgctgcctaggttgcgatgtaggctgtagttctgacacagaagctcggtattgtagttgggtaaattatggtgtaatgttgaccccaggctgctaactgtgcaatcacagaagctctgactgtacaaccgtagcccttctgtgagcaatgcaacacaggaaccgtaatcatcgtgagttgaagaatatcatactatggccgattgccacgggaaccaattttggcctgtaccaactggaacttacgatttgtatgaaaatatattcaacacttaggccacaaatattacttatcatgttcaactgaatactttt

SEQ ID NO: 202538 - DNA, 1377 bp, Zea Mays
gagaaagtaaagtatggccaaggtccagttgcaccagctttggatgcattgcttgatatatctggtgtgtcttcagttgaaaacatggaaacaaaccatcaaagtgccagaaggaatgacacatgtcatctagatatgttttctggaaatgggctatcagtggagaatctgactgcagggaatagaagaagtctacgccagttgacagatgagatatccaacactgggctccagtctgaattaggacacgagtttttatggggtgaacctcagatcagctatgcggaggctgttaaggaggcaccacgctcatcaacattgccgtcaagatcaactgtaatgaaagctggtccacaacaagtcctggattcactgtttaaaattcctgaaacacgcacgtatgagccaagttctatggactggaaaaaggtagtaaagaaactgcaaacaatcaattataccgctgcatcaaacaatcacgaaaggcctaaggatgggggtggctatcgtgagctccgtggtgttgctgcaaggcattacgataaaatgaaagaatactatcagaaagctgcctttgcatattcgaagggtgacaggtcatatgcttcttaccttgctgaggaggggaaacattatcgagaactaggtcgcatagaagacgagaaggccagcaggaatatatttgaagccagaaataagcatataacgaacacagtaaccatcgacttgcatggccaacatgtccaacatgctatgaaccttctcaaaattcacatgatgatttgtatttgcattccatctgtcttactgagggtaattaccggttgtggttcagaaggtacagggaagggaaaaataaagcgctcggttatagagcttgcggagaaggaacatattgagtggcgcgaagagaactctggaactgtagcccttcgacttggtgggccaagagagtatcggttccttgagcatgaaagcgattctgacctagtggggaactttaacatagattaacttctgatctaatctatgtattcccgtatttatgtgttatagctatggatgctgcctaggttgcgatgtaggctgtagttctgacacagaagctcggtattgtagttgggtaaattatggtgtaatgttgaccccaggctgctaactgtgcaatcacagaagctctgactgtacaaccgtagcccttctgtgagcaatgcaacacaggaaccgtaatcatcgtgagttgaagaatatcatactatggccgattgccacgggaaccaattttggcctgtaccaactggaacttacgatttgtatgaaaatatattcaacacttaggccacaaatattacttatcatgttcaactgaatactttt

SEQ ID NO: 202539 - DNA, 2344 bp, Zea Mays
acgactgaaaaaattctggaaatcgaaacccaccctcgagcgacgccaagcggccaagacggagaggagaacaattggggacggggaaagtccagggggaagccacggccaccggcgcgatgaaaccgtcgctttcgaagaagaagggcaagaagaagaagaagtcctcgctgccggccgccgcaccggcccctccgccggcggagggcgctgcggatacggaggcatgtcccccgctgcccggaaccataaccctaaccgctgccaccgctgctgcggcggtggtttcggagacggagtccagcagcagcggcgaggcctcgacgtgcccatccgcctgcttcaccgcaagctcgtctgggaccgcgtcctcgcactccttctctgccttgtcctcgtcggcgtccacagcttcgtcgtcggccgccggcgaggagcggcgggacctcacctggctgctcgacgcattcgccagcgccaccttcgaccagatcgactccgcctaccgcgaggccggaggggaccctttcgtggccgccggtatcctgtcctccacgcaggacactcacccgccgcagcccccgcagccggcgccgcagcccccgccgccaccagacctctcgccgcgcagtggatctggtggaaggaaggctggtcggaggcccaagcgggttgccgtggccgctacgggcatggtcgcggacgtgattggcaaggagtacacgcgacccgcggctaattctgtagtaagcatgccaaatgcttggaagggtcgggacggggagagcgatggcagcgggtctggtggccgcaaggacagtgttgaagaggcagagcagttcctgtgctccatgctcggggataattccgagcttggcatgggtgttgtcagagacgtgctaggccagtatgggtacgatgttgagaaggaacaactcgctgctttgtgttctgaatggatatactgttggtttgtacagttgtgctaatcaagtgctttcaggctttggatgcattgcttgatatatctggtgtgtcttcagttgaaaacatggaaacaaaccatcaaagtgccagaaggaatgacacatgtcatctagatatgttttctggaaatgggctatcagtggagaatctgactgcagggaatagaagaagtctacgccagttgacagatgagatatccaacactgggctccagtctgaattaggacacgagtttttatggggtgaacctcagatcagctatgcggaggctgttaaggaggcaccacgctcatcaacattgccgtcaagatcaactgtaatgaaagctggtccacaacaagtcctggattcactgtttaaaattcctgaaacacgcacgtatgagccaagttctatggactggaaaaaggtagtaaagaaactgcaaacaatcaattataccgctgcatcaaacaatcacgaaaggcctaaggatgggggtggctatcgtgagctccgtggtgttgctgcaaggcattacgataaaatgaaagaatactatcagaaagctgcctttgcatattcgaagggtgacaggtcatatgcttcttaccttgctgaggaggggaaacattatcgagaactaggtcgcatagaagacgagaaggccagcaggaatatatttgaagccagaaataagcatataacgaacacagtaaccatcgacttgcatggccaacatgtccaacatgctatgaaccttctcaaaattcacatgatgatttgtatttgcattccatctgtcttactgagggtaattaccggttgtggttcagaaggtacagggaagggaaaaataaagcgctcggttatagagcttgcggagaaggaacatattgagtggcgcgaagagaactctggaactgtagcccttcgacttggtgggccaagagagtatcggttccttgagcatgaaagcgattctgacctagtggggaactttaacatagattaacttctgatctaatctatgtattcccgtatttatgtgttatagctatggatgctgcctaggttgcgatgtaggctgtagttctgacacagaagctcggtattgtagttgggtaaattatggtgtaatgttgaccccaggctgctaactgtgcaatcacagaagctctgactgtacaaccgtagcccttctgtgagcaatgcaacacaggaaccgtaatcatcgtgagttgaagaatatcatactatggccgattgccacgggaaccaattttggcctgtaccaactggaacttacgatttgtatgaaaatatattcaacacttaggccacaaatattacttatcatgttcaactgaatactttt

SEQ ID NO: 202540 - DNA, 2163 bp, Zea Mays
acgactgaaaaaattctggaaatcgaaacccaccctcgagcgacgccaagcggccaagacggagaggagaacaattggggacggggaaagtccagggggaagccacggccaccggcgcgatgaaaccgtcgctttcgaagaagaagggcaagaagaagaagaagtcctcgctgccggccgccgcaccggcccctccgccggcggagggcgctgcggatacggaggcatgtcccccgctgcccggaaccataaccctaaccgctgccaccgctgctgcggcggtggtttcggagacggagtccagcagcagcggcgaggcctcgacgtgcccatccgcctgcttcaccgcaagctcgtctgggaccgcgtcctcgcactccttctctgccttgtcctcgtcggcgtccacagcttcgtcgtcggccgccggcgaggagcggcgggacctcacctggctgctcgacgcattcgccagcgccaccttcgaccagatcgactccgcctaccgcgaggccggaggggaccctttcgtggccgccggtatcctgtcctccacgcaggacactcacccgccgcagcccccgcagccggcgccgcagcccccgccgccaccagacctctcgccgcgcagtggatctggtggaaggaaggctggtcggaggcccaagcgggttgccgtggccgctacgggcatggtcgcggacgtgattggcaaggagtacacgcgacccgcggctaattctgtagtaagcatgccaaatgcttggaagggtcgggacggggagagcgatggcagcgggtctggtggccgcaaggacagtgttgaagaggcagagcagttcctgtgctccatgctcggggataattccgagcttggcatgggtgttgtcagagacgtgctaggccagtatgggtacgatgttgagaaggctttggatgcattgcttgatatatctggtgtgtcttcagttgaaaacatggaaacaaaccatcaaagtgccagaaggaatgacacatgtcatctagatatgttttctggaaatgggctatcagtggagaatctgactgcagggaatagaagaagtctacgccagttgacagatgagatatccaacactgggctccagtctgaattaggacacgagtttttatggggtgaacctcagatcagctatgcggaggctgttaaggaggcaccacgctcatcaacattgccgtcaagatcaactgtaatgaaagctggtccacaacaagtcctggattcactgtttaaaattcctgaaacacgcacgtatgagccaagttctatggactggaaaaaggtagtaaagaaactgcaaacaatcaattataccgctgcatcaaacaatcacgaaaggcctaaggatgggggtggctatcgtgagctccgtggtgttgctgcaaggcattacgataaaatgaaagaatactatcagaaagctgcctttgcatattcgaagggtgacaggtcatatgcttcttaccttgctgaggaggggaaacattatcgagaactaggtcgcatagaagacgagaaggccagcaggaatatatttgaagccagctgtcttactgagggtaattaccggttgtggttcagaaggtacagggaagggaaaaataaagcgctcggttatagagcttgcggagaaggaacatattgagtggcgcgaagagaactctggaactgtagcccttcgacttggtgggccaagagagtatcggttccttgagcatgaaagcgattctgacctagtggggaactttaacatagattaacttctgatctaatctatgtattcccgtatttatgtgttatagctatggatgctgcctaggttgcgatgtaggctgtagttctgacacagaagctcggtattgtagttgggtaaattatggtgtaatgttgaccccaggctgctaactgtgcaatcacagaagctctgactgtacaaccgtagcccttctgtgagcaatgcaacacaggaaccgtaatcatcgtgagttgaagaatatcatactatggccgattgccacgggaaccaattttggcctgtaccaactggaacttacgatttgtatgaaaatatattcaacacttaggccacaaatattacttatcatgttcaactgaatactttt

SEQ ID NO: 202541 - DNA, 3341 bp, Zea Mays
gtcaacactgtacaaacatctctttttaagaaaatataataatgttaaggtttttaaaagaaatatagatatagactatatcatccatctaaaactaataatgtacaaaaaaaaaaagtacaacgcgtccgctgccgagacgacgaagagataaacccaaatggaatggaccaccagaaaccaaaccgtcgtcaagaggatcggagggagggccggatcggaggggcgggcgctggaagccacggtctgcttttagggtttctctcccctcgccgagacagacaagtactccaccacacacacgcgccctacccacgaaattcacaaacccaccggaggcacagaaatttcccaggcaaggaaaaatcccgtccgaaatccagcgctccaaatccgttcgtctcctaggcgctcccccgaacccgtcacgaatccctcagatccccgctgaaatccctcaatcctccgtgctcgccgccgccgcctcctccctgcgacagccgcggccgcggatttccacccgagggtttcgtctcgctctcgctctctccgctctactgcctccacagattggcgcgaccgacccgtcatcgaggaccttcttccgcccgagaggccggggctcctcccgcggaaattcactctcgttcagaggcggcgctctcctcttcatcgccgcccccgcgctctgcttgtactggagtggcgcggaataccaatctatagaagtgcacgaggagtttttatatccccgatttttagggggttcaactgaactcccatgccccacgctaagtccgcccctggtggtggtggactgaattggtggacactgttgattttgtcgtgggcatggagcgaagtgagccctcgttgaagccagaatggctgctgcggcccacagtacctgccacgacccataagccggtgacttcgccccgcgcagatgatcacggcaggggtgcttcatcaagaaaccgttcatcgggacgagatcgtgatcggagctcccaacagtcctcgtctcggaggggttcaagctctagtggttcaaggaggaatgatcgcgatggtacagggaaatcaagaggctatggtaattttggaaagcacagcaaggataggatacaagaaaaggacttggattttcgtgaacgggagagtaggttggttcaaccagatgatcctttacgtgatggctttgagtcctttagctcatgcagatctgaaaaggacaggcttaaccgtactcgttcaaaggtggccataccaaatcgggcaggagtaagtttagacaatggtaatgtatctaaaaaagataatggtgtcatctcctttgagcgggaatttccacaccttggttctgaggacaaaaatggaaagcaagacataggtcgagttccgtctcctggaattagcacgccaattcagaacataccattggtagtatctgatggctggaattcagtgcttgcagaagtacctgccttagtagatccaaacattaactctgtttcctcttcctcatcacccgctggttctagtaaaccgattgaagtgtccaactctgggagtgcgttaagcatggctgaaacagtgatgcagtcaccgttaaatatttgtaccacacctcagttatcaattgatgctcagaagattgaagaaagaactatgaggcagtgcattttaagacctctaacaccatcgtcaaacaaaatatctgcatctatttccttggataagttattaaaatccaaaggtgcaagagctggagagtctaatggacctatcaaggttgctccacagctgtcaatacagccatctagcaactctgttcgcactccagtcaaaactgagctcgtaaagcaatctcaatcaggcagccttcaagtccttagccgtgagcagaatggtactgtaaatactgctgccaaagacatcaccagcaacaatcctgtgagccctgttttgggtcgatcttcttcaatggaacctatgagaaagtctattgtcaacccaaagcttaaggttggtactaatggccgttctttgcatcctctgcaaggttcatttgcagacagaaaagcaagtgcaaaagacaagtacaaattttttgagttgttgcgaagtaagtctgtaaatggttcaagcgctgctattgagtctccatctagcctgactgatgatcagcagaactctagtcctgaattgcctttcaagtttattgaaaatgggaacagttcctgtgaagaagcaaattcttgtgagggatcacagcgacacttgtcggacaatgaggaaattattccaccttcagaatctcatgacgttttagatgagggatctctggggattcaagttgacgacaagggttccagctcttcaccagtacttggcacacaagatatatcttccaagaagccccaggaagacaatgttgatattgttgtacctgtttatgtaaatgatggttctgtgatgcccaattctgttgacaatgaagcaagattgctgttggaggaagccaatcctgctcaagtgttacagcacattgatgcaagggaggagaatccctgtcctgctcaagagttcgagtccataggggcaggtggggaggaagagttgaacctcctgagatctatgggctgggatgagaatgaagaggttcagcctcttcagcaggaggagattgctgattgtgtaaggcagaacgtcaggctgcagcagaagcttcaggaatgcaggggctgatcgccgaatcaatggagcaacgtcactgtgcgtcaccatgctgagaagatgtgggccgcgtggagggagctgggttttggacttttggtaccttccgggcaaccgatcagataatgattgtctctagcttagcaaatggagagttttgtttttgttaatgcttgttcagcattgtgggggaaggtttcctggtagagctgacaattttcccccattgagaagaggttttagggtttctcttcctcattttcccagaaggaatacaccaaatggaagtcttgtctggtgttggaggcacataggtgtgcgttgctctcaaagaagaataggttgtctcttacttttcgccgctatgttttcttttttggaaaaaagggaaaaaagaatgatccagcttaacatgaaaaaggtgcacagggattgccttggtctttaatcttgctttatttgcgatctttaaagagaacgatcgagcttaacacttaaatagatgactgtcgaaatgatagcagcttgagttgctcaccgaaccaacacattcgtatattgtgataagaagctcccccatgaaaggttctctacttttgttc

SEQ ID NO: 202542 - DNA, 1639 bp, Zea Mays
tctcaagtgaagtcaagtatgtgaagttgtgaacaaatgagtagcagactagcagcagtacacacgctacgttacctcttttccccttgctgaggttctgctatttttttaattaaaactaaaaccctattttatccaagccgataacttagagagaaaatacgcagatctactgcttccgccgtactgtaaaaaaacagtgcacagtactataggcagtattatccacagaaaaacgagcaagatatcatctttttttactttttggcccactgacggaggtcggaaggcatggacagatcgcgttttagaacgggtggtagctccggcgcagcccactgacgttggcgaacagcccgacgagctcttgcttgtacggtaggacgaggcggatccggaacggcggtgaggaacacgaacttctccttgccgtcgctgtggctgcggccgacgaggcggtcgctgatgcggcgccagcggaggacggagcccgtggagccgctcttccggcaccggcgcggggacgcgggcgccggcgactgcccgccgggcgcccacaggcagtagctctccgccggcacgccctgcaggtcctcgtccccggcgccgccgccgccgccggaggcgtcgtcctcgtcctcgtcctgccacgcctgcgcactcgacgatcgcccgtccggctcccgcgcgcggaactcccgctcctccagcaggagccggcccagcggcacccgcaaggtggccgtctccggctcctcctcctcctcctcccgcagcggggacgggggccggccgaagatcgggtacacgggcacgatgcacgcgccggcggcgaccggaggaacggggaagctgaactcgtcgccgtcctcgtcctcggcctccacggctggagacaggggctccggaaggggagtggtggcgccaacagagaaggaggccggtccggccgtgtcacgctcacggtgtgggatgagccgaaccaaggcgtgaggcgcgacggatacggcacggggagcttccgtgacgctggccggtgggccgcgtcacgaaaccgggaccacgactcagtgggaaacagcgagggtagttggggagcggtgggctgagccgcccagcccgcggaggtgctgtctcgtttggggcgcaccggtgaggtgagccgttccgagggtgtggcgcgccgtgctggggcagtggggctggtgagccgttccgaggccaggccaagccaagccagaagaatgaggcgggtagcggcggtggcggttctagaagtccgagaacgcgaacgggatggggtcagcacgcgagacggacgggttcgcctttcgcggaagagaacagaagcgaaccgcgatcagcttcgagggtccgcctgttcttctggtggttcatagaacgcggacgtggcttaccgcttaccgaaccgcggcggaggaacagggctcgttggattggatcgccagcactgcgcaccgcacaccggacacgggcaggctacggatttggtgggctttggtcgctaggaaactcaagacacacgaataataccaatcatatcttcaacacactatattttttatttttttctatacaacaaagaaataatttattataataaacaattggagagggg

SEQ ID NO: 202543 - DNA, 799 bp, Zea Mays
gacgtgatatgacccgtcctcgcctgtagatgggcaagtgcgacctcccatcgacggtctgaactgaagcagcagcggcgaggaccgtaacgccagcggccatctcgaggaacaaaagaatcgatggcaggcaggaggcagcacagcagctcagctcatcagtcgccctagagactggactggactctgggggacgccggaatctttgcccaccctttcagactttctttaccgctgcagctttgactccagccccgcagcgacgccgtagaacgaacatcgctgtactaggctgtagctgtacgccttcctttttgcagctttggctaatggtgggtgtgtgtgtggatatgtttgtttagtcatgaccagcactactacttctactactagcatgctactattaaaatctgatgaccagtacgtatagattaattaatttaaatggtttagccttttgcgcccatgtgacccactacggtttgtctcgactcgagtgagcattttgactcttgttccgtcatcggctcaaatgtgcgtgccggaggcggaaatggtgcttagcgtggacgacaatgcacactactggcagcagcacccgcactcgagtagtgctactagtcaaatgtctgccctttggcgagcaattaaaaccttggaaatggaggatttgtgccgaattgctttggaacgtttcagatctcaaagcaaggctgttttttttcgattctgtaaataaacactgtctaaagcttcattattggacttctctactaatggggaagtcaaaaaaaaaaaa

SEQ ID NO: 202544 - DNA, 1205 bp, Zea Mays
gccgctttctccgcctccactcgcgggcctcctcccgggctgcccctcctccgcccccgcggccccgcccccgtcctctcctcggcgcgacaccgttgccgcccccagacccttccccgttgctggttgctgtctctcccgcacgcagccttgtgaacaagccccagcgggccgagcagacgaggagcaaaggagcgagcggagagagaggagtaggcagcggccgtcgacagcacctggcggaaaggcggcggagcagacgcacatcccagcggtggtgcggtagtaagttgcttgctgggaggtttcacatggattgaccattacttggcattaagttgttcttcaatggcgtatttcatggatttacgggctttcatcctgcgtacacatgtcttgaagctttatagacaggcattgcgtatcactcaccgagccccggtacatgctcgagatgagttgaggcagaccgcaagggccgagtttgagaaatatcgccattgtgatgacaaacaaaagattaggtttttgattagtgaagggaagcagagactaaaaggtgtaatcatgcagtgtgtttgcacaaagactttgagaactgaagcataggaaagtaggccagcagaaggcaagttctacctaattgacgccaaatatggagctaaaccaggatttttgcctgcttttcgtggtgtacgataccacttgaatgagtgggggcaacaatcttgttcaaaatgagaaggaattattcaatcataggcactcatctctaagagtttcagtagagtggacattttattcattgaagcgaagatttaaaattcttgatgatgctacaccattctttcccttctctacaaaagtagaaattgtggttgcgtgttgtattattcacaactgggttatacaagatggaggagatgaatttaccattcctgagagtgagaaattgcctaccattaatcatcaaacatcttcgcatggacaagcaatgaaacatgccattatggttaatctcaggcaggaactagctaatgctatgtgggaagactataatgcaaacactatttgattgttatttattttccattgttatgtgacaagatgtatggacatgtatcttttattcgtatggacatgtatcttcctgaaatttggacatatatcttgctgaaattgggacatatatcatatgattattc

SEQ ID NO: 202545 - DNA, 1662 bp, Zea Mays
ggccttttcaggaaccaactgtgacaatccagtcaattatgatctctagcccccctccttccggctcctgtcatcctgcgcatgccatcggggcgctcgccgggacaacatttacctcgacagcgacgccgccgctctccctcgacgagagctcgtagctgtgtccgcgcaaggcttactcctttcttggccccgaccccttctccccgccgccggcgccgcgcttggcttgatgctcgacgtctgcgcgccacacgggcccgccaagctcccggctgcgtttgtcgccggcgtgcgagtcgcctgggtcgccggcaggtggtggtggcgatccgtggcggtgggggcggcgcgccatggcgtcaccacgcgggcgtcgttcttcgggctcgattcccaggttgcttcatttctgcatcatcaagaaaaaatgaatgttcttgtggaacctgatgttcatgatacatttgctagaattccaggttatggttttgtgcaaaccttctatactcaagataccagtgaccttcatgagagagttgattttgttacatgcttgggtggtgatggactcattttgcatgcatcaaacttatttagaacttctgtaccacctgttgtctccttcaatctcggatctcttgggttcttaacttcacataatttcaaagatttcagacaagactcgagagatttaatccatgggaacaacacacttggagtttatataacccttagaatgcgcctaagatgtgagatctttcgtagtggaaaagcaatgcctgataaagtgtttgatgtgctgaatgaagttgttgttgatcgaggttccaatccatacctatcaaaaattgagtgttatgagcataaccaccttatcactaaggtgcaaggtgatggggtgatagttgcaacaccaacaggcagcacggcatattctactgcagctgggggatcaatggttcatccaaatgtcccatgcatgctgtttactccaatctgccctcactcactgtcatttagacctgtcatccttccggattccgcacggcttgaattaaagataccagatgaggcaagaagcaatgcatgggtttcatttgatggcaaaaggcggcagcaactatcaagaggagactctgttcgtatatccatgagtcagcacccgctaccaactgttaataaatctgaccaaacgggtgattggttccgcagcctgatcaggtgcctcaactggaacgagagattagaccagaaggcactatagacactagaatctttttttattttttgatgtacatatgtaaattcacgcacaaatatagttttgttttttctgccaacatgtacagtgcgtaacaacaaagaactttgcatatcaaggatctaatcaggtggcttgagggataaatgagagttaataaaaaattgctcaatagaatcttgtttttcaaaacttcaaccaagtttttaacacatcgaaaatgacaaataaaaaaatgttaaatgagtagcccacaagcccaaaacaatggcttcatatttttaatgatgactgacgaacaaatcagagtaacgaaacctgtaggaaacaagtacaacattgaaaacctctaaaataaaaaagcacatcaaaagtcttcgaaattagaaaaacatgac

SEQ ID NO: 202546 - DNA, 1764 bp, Zea Mays
gccacggccttttcaggaaccaactgtgacaatccagtcaattatgatctctagcccccctccttccggctcctgtcatcctgcgcatgccatcggggcgctcgccgggacaacatttacctcgacagcgacgccgccgctctccctcgacgagagctcgtagctgtgtccgcgcaaggcttactcctttcttggccccgaccccttctccccgccgccggcgccgcgcttggcttgatgctcgacgtctgcgcgccacacgggcccgccaagctcccggctgcgtttgtcgccggcgtgcgagtcgcctgggtcgccggcaggtggtggtggcgatccgtggcggtgggggcggcgcgccatggcgtcaccacgcgggcgtcgttcttcgggctcgattcccaggttgcttcatttctgcatcatcaagaaaaaatgaatgttcttgtggaacctgatgttcatgatacatttgctagaattccaggttatggttttgtgcaaaccttctatactcaagataccaggtacaattaaacatttatgtttgtgataagtgcgaatgtgcatatattttcatgatactatttactaatgtttgtgtttcagtgaccttcatgagagagttgattttgttacatgcttgggtggtgatggactcattttgcatgcatcaaacttatttagaacttctgtaccacctgttgtctccttcaatctcggatctcttgggttcttaacttcacataatgtacatttcaataatctctgagagagaatttcaccagattaagccgtttttgtgtagaaactaagcatattatcattttgttcacctcagttcaaagatttcagacaagactcgagagatttaatccatgggaacaacacacttggagtttatataacccttagaatgcgcctaagatgtgagatctttcgtagtggaaaagcaatgcctgataaagtgtttgatgtgctgaatgaagttgttgttgatcgaggttccaatccatacctatcaaaaattgagtgttatgagcataaccaccttatcactaaggttcatccaaatgtcccatgcatgctgtttactccaatctgccctcactcactgtcatttagacctgtcatccttccggattccgcacggcttgaattaaagataccagatgaggcaagaagcaatgcatgggtttcatttgatggcaaaaggcggcagcaactatcaagaggagactctgttcgtatatccatgagtcagcacccgctaccaactgttaataaatctgaccaaacgggtgattggttccgcagcctgatcaggtgcctcaactggaacgagagattagaccagaaggcactatagacactagaatctttttttattttttgatgtacatatgtaaattcacgcacaaatatagttttgttttttctgccaacatgtacagtgcgtaacaacaaagaactttgcatatcaaggatctaatcaggtggcttgagggataaatgagagttaataaaaaattgctcaatagaatcttgtttttcaaaacttcaaccaagtttttaacacatcgaaaatgacaaataaaaaaatgttaaatgagtagcccacaagcccaaaacaatggcttcatatttttaatgatgactgacgaacaaatcagagtaacgaaacctgtaggaaacaagtacaacattgaaaacctctaaaataaaaaagcacatcaaaagtcttcgaaattagaaaaacatgac

SEQ ID NO: 202547 - DNA, 3493 bp, Zea Mays
ctccctcaaaggccacggccttttcaggaaccaactgtgacaatccagtcaattatgatctctagcccccctccttccggctcctgtcatcctgcgcatgccatcggggcgctcgccgggacaacatttacctcgacagcgacgccgccgctctccctcgacgagagctcgtagctgtgtccgcgcaaggcttactcctttcttggccccgaccccttctccccgccgccggcgccgcgcttggcttgatgctcgacgtctgcgcgccacacgggcccgccaagctcccggctgcgtttgtcgccggcgtgcgagtcgcctgggtcgccggcaggtggtggtggcgatccgtggcggtgggggcggcgcgccatggcgtcaccacgcgggcgtcgttcttcgggctcgattcccagaattttcagacaagggacccgtcccagttgttgtggatcggtccggtgcctggtgacatcgcggagattgaggcctactgccgcatattccgtgctgccgagcagctccacaccgcagttatgtcagcactttgtgatccagagacaggagagtgtcctgtacgctatgatgtggaatcagaggatctgccaatcctggaagacaaggtcactgccgtccttggttgcatgctggcgttgctgaaccggggaaggaatgaggtgctctcagggagatcaggtgttgcaagtgctttccatggatctgtggacagcacctctgatatgatcccaccactcaccttgttccgtggagacatgaagcgttgctgtgagagtatgcagctggcacttgccagctaccttgtaccgagtgagcccagggggttgaatatatggaggaagctgcagagattgaagaacgcttgttacgatgcaggtttctcaaggcctgatggttatccatgtccgacattatttgcgaattggtttccggtgtacctttcgattgtgtcagatgattcaggaacagatgagcccgaggttgcattttggaggggagggcaagtcagtgaggaggggctggcatggctactagaaaagggattcaaaactattgttgatctccgggaagaagatgttaaagatgatttgtacctttcagcagttcaggaggctgtctcatctgggaagatagaggtggtgaatatgctggttgagatcggaactgcaccatcagctgaacaggttaaacaatttgcagctcttgtgtcagatggcgcaaagaagcccatttatctccatagcaaagaaggtgtttctaggacgtctgcaatggtctcaagatggaaacaatatgttactcgttcagagagattggctgtccaaaatcactatataaatgggaatggtaaggtcctgacaagtgacaagaccaagcagcacacgggcagcccaagctcctctatgaatcgaactgaaattggtatggtaacggaatctgataggaccatgaacaatggagaatcatgtgagatagacatagagacagctcgtcataatctggaggtcactaatgccctttccgatgaccaaagtactcaacaaggtgaaatgcttgggactgggacagaacccttgtcaaactttaaactggagagtaacccccttaaagcacaatttcctacttgtgatattttctctagaaaagagatgagcaagttttttagaagcaaaaaggtttatccaaaatctgttctgaactcaaggagacaatcaagtagcttgctggtctcaaggagaaaacaaaatttcagcacagagcgtaatggaaccattgactatgaagcagcagagttcacaattttagaaagttcaaatggaacatcatttgacaatgattatattctatcagtttcttcaggtatcactgatggaaaaccttccaacaatggagccttttcgttaattgagaaaaaggaaagggaagtttcagtcactacttttgatactagagcatcggcgagcagttctaatggaaaggttcaggttggatcacaaaaaactgctgaaaagaatggtaccccttatctggagagaaacaattcaaataatgttgatggaagtatgtgtgcatctgcaactggtgtcgttagactccagtcgagaagaaaagcagagatgtttctgcaacagatgcttatgtggaaatctcctccaaagactgtcttacttttgaagaaattaggcgatgagctgatggaagaagctaaagaggttgcttcatttctgcatcatcaagaaaaaatgaatgttcttgtggaacctgatgttcatgatacatttgctagaattccaggttatggttttgtgcaaaccttctatactcaagataccagtgaccttcatgagagagttgattttgttacatgcttgggtggtgatggactcattttgcatgcatcaaacttatttagaacttctgtaccacctgttgtctccttcaatctcggatctcttgggttcttaacttcacataatttcaaagatttcagacaagactcgagagatttaatccatgggaacaacacacttggagtttatataacccttagaatgcgcctaagatgtgagatctttcgtagtggaaaagcaatgcctgataaagtgtttgatgtgctgaatgaagttgttgttgatcgaggttccaatccatacctatcaaaaattgagtgttatgagcataaccaccttatcactaaggtgcaaggtgatggggtgatagttgcaacaccaacaggcagcacggcatattctactgcagctgggggatcaatggttcatccaaatgtcccatgcatgctgtttactccaatctgccctcactcactgtcatttagacctgtcatccttccggattccgcacggcttgaattaaagataccagatgaggcaagaagcaatgcatgggtttcatttgatggcaaaaggcggcagcaactatcaagaggagactctgttcgtatatccatgagtcagcacccgctaccaactgttaataaatctgaccaaacgggtgattggttccgcagcctgatcaggtgcctcaactggaacgagagattagaccagaaggcactatagacactagaatctttttttattttttgatgtacatatgtaaattcacgcacaaatatagttttgttttttctgccaacatgtacagtgcgtaacaacaaagaactttgcatatcaaggatctaatcaggtggcttgagggataaatgagagttaataaaaaattgctcaatagaatcttgtttttcaaaacttcaaccaagtttttaacacatcgaaaatgacaaataaaaaaatgttaaatgagtagcccacaagcccaaaacaatggcttcatatttttaatgatgactgacgaacaaatcagagtaacgaaacctgtaggaaacaagtacaacattgaaaacctctaaaataaaaaagcacatcaaaagtcttcgaaattagaaaaacatgac

SEQ ID NO: 202548 - DNA, 1082 bp, Zea Mays
ataaaaactaccgctctacttggcctttccgcgatggctgagactagggtttcagtggcggcggttgcacgacatgagggagcgcagcgaagccagcacaaccgcggtggacaagcgtccccatagacgagatccatggcggagcgctggaagagcgtctcctccgtgccgaaggccgagaacgcgcggccgacgggacgatggccggcggcgaagcccaaggcgtcggacctgctcgcccatagccttgactgcagcctcgaccgcaaggactccatcctcgccgccatccacctcctccgccgctctatggccttcgactccacgacatctctctcgtcgtccgacccagccgctccagacctctacgcgtcctctgacaccgacatcgtctcctctggtagcaactcggtagccagtgatccgccgcgtcagggcatcagcgtgccggcgaggttctggcagaaaaccaatagccgcatgctacatgcaagctcaagaattgcaataaggttgttctgaaactccgaaagaggatgcacctggctcatcgtcattactcttcacctggcacagtggcacctaacacttgtgcattatgttgagtcttcaagaagaacgtcatcagcaccgaggtggatgtcctgcaagtgcagtgcaacatggcgctctggactattcaagattcaagtcaaattaggctaagatgtttacaatgccgagacgattggaagctgaaatttgtgaatctatggtccataacttctatagttgtttacaagcacaaaagagcaaataatttattgttcccttatgccatatcacactttgatgtttccatgtcacagggggagttctgcttacttcaaaagaacactgacaagctagatttaagacgacgagttcacatggctatagacattatgagtactgtttatctttctataaagttctttgaaattgcaggccaaatcaatgattgatattgttttttgtaattaacaatgattagcagagaattggataaacattctgtgttgtcaagaagcataatgaataaaacagagaagcattaccgtgtc

SEQ ID NO: 202549 - DNA, 1116 bp, Zea Mays
gtcaactcgttgacccgcgagaacctaacatctgccaacaatccaacatctcgcagtcgcgttcgctgctcctcggtcctcagccctcacacgccgcccgcccgcgacgaagcccgcatagccgccgccgagcgccggagttgccacctaccgcgcgcccatctgccgccgatgctgcgcactcatctgctacccgaggcttggcggcggccactgccccaggaggcaggagcgcgacaccaaagtccgcgcatttccttccaccgagccgcaccaagatccgggatccaaggtggccaagttcgttgcggcggccctgaacttcgatggctgtcctcgtcacggaattcgtcctcagattcacagccatggactacaatgtgcgtgaatgcagactataccactcctgctgattctgtcgccacctcggagcaagcaggtggtgaagctgaggccaccttagaaacaggtggtgaagctgcagccaccttggagcaaacaggtggcgaaaccgaagagccaacaattgtagcacctgctaatgaatatacagagcaggaggctgctcctcagcagaagtgtgcaaagatacacgacttttgcctagggataccttttggtggacttttactctccatgggccttattggatttctcttctggaggagccctgcgagtcttacctttggcgttgcacctggccttgccatattggccctggctgtacttagcctcaatgtctggaggagcgggaagtccagcttaccgttcatactggcgcaagcaggcattgccgctgccgtagcatggaagcacggccaggcgtacaccactacgaggaagctgcttccgtggggattctacgtcgcgctgagtgccgcaatgatctgcttctactcctacgttcttcttgccggagggaatccgcctcctaagaaggcgaaggcgaaggcgaaggctgctgcttgatttgatgttgaaggcattcaccggagcgtctcataattgcactaccttcctctggtaaatagggttgtgagagaagcacattctgccacaagaggctcaacatgctattgcaattcgatatgggctgctatgattttccttgtgggt

SEQ ID NO: 202550 - DNA, 1374 bp, Zea Mays
cggaaggcctgcgctccacggaccacggcaacggggatgtggaggcaccccgacggtgaattccccattcacatctgtagccgcgcctctccgtatcactccgcgcctctctcccgccaggccgccgcccaagcaaccatggtggccgcgctgctccgccgcgcgctccacctccgccgtgtgctcccctcgcccgccgtcaccgccgccgcctcccagcgcctcatccccgccttctcgaccacccccacgccgaccccgaccacctcccagcagaacgccgccaccactacgatcgacctctcctccgacgagagccgccgccgcctcctcaataggttggtgtaccggagcaagcagcgaggttttctggaactggacctggtgctggggacctgggtcgagcagcacgtgcacgccatggacgaggccaacatccgcgccctcctgcaagtgctcgacctcgaaaacccagatttgtggaaatggttgactagccaggagcagccaccagaggatctgaattctaatccggtgtttgctgccatcaaatcaaaggtcacagataacctgaccaagcatgcttctcctgagacccgatctacaccaggtcaaccatgggttagaggatgggacgacataaagaaaggcaaagatggacccaagtatggaaatcagtgataagctgcttgaaatggggatgacggctttccatcctaaataatagctgtccgcccaccccaccccccaatatgcttgttttgtgattgtgtagaataaagtgaactgccaccggcatgtgtgaagtttgttaaattgtagaatcagcttgtaactatggatggtactcctgatgtttgcctggcaattccagccttccagggatcaatggccgattttcaaaagaatgattgagaaggttaaagatagctagttctaaatgtcaacggagttgttcgacacttagagattagtaatagaacctttattttcctttaagttgtattataaaggggaatgaaataggttgcttgacctaggtgagtttagttaggtttggtggtgcacacttttacaaactagtgctaggtaaacctaagattgtccacaaaaagtttgaaagaaagcccaattctaaaagtgagtgaaatgagtgagctggtgactttacagtagcatcagacttgtttgatgcttcactgctatgacactagataagagtgtgtcctatatttttaagagttccatcgatgtgttcggcgtacaccgaatatggtgcaccaggcatggtatctagaaagcttgtagaagtggtctaaagagacatgtactcaccggacatgttcaattaccatcagatatgacacttgttgc

SEQ ID NO: 202551 - DNA, 403 bp, Zea Mays
aaatcacactccgatagcaaaaaaccaatgttgaacggattataataataaaactccaattacaatgttcaggatactattttttagaagcccagtcttgtcttgatgatacctggttcaaaaagctcgtcgggaagaggagcaaaacaaaccctatctaaaccgcggcggactcttcgtccagcaaggtttcccatccagatccggccacgccacttgctcctcttctccgccacaccgatggtgtacgtggattcctgggacgagttcgtggagcggtccgtgcagctcttccgcggcgaccccaacgccacccgctacgtgatgaagtaccggcactgcgaggggaagctcgtgctcaaggtcaccgacgaccgcgaggcctgatgcgcagtgcagtggt

SEQ ID NO: 202552 - DNA, 405 bp, Zea Mays
aaatcacactccgatagcaaaaaaccaatgttgaacggattataataataaaactccaattacaatgttcaggatactattttttagaagcccagtcttgtcttgatgatacctggttcaaaaagctcgtcgggaagaggagcaaaacaaaccctatctaaaccgcggcggactcttcgtccagcaaggtttcccatccagatccggccacgccacttgctcctcttctccgccacaccgatggtgtacgtggattcctgggacgagttcgtggagcggtccgtgcagctcttccgcggcgaccccaacgccacccgctacgtgatgaagtaccggcactgcgaggggaagctcgtgctcaaggtcaccgacgaccgcgaggggcaagcatcttatgtagagggg

SEQ ID NO: 202553 - DNA, 1007 bp, Zea Mays
tttctttgtaaaatgtggtgctggaactgttcagggctagccatggctggacctgctgttctcaatgagcgtatcctttcttccatgtcccagaaacatgttgctgctcacccatggcatgatttggagataggaccaggggctcctgaattcttcaattgtgtggttgagattcctagaggcagcaaggttaagtacgagttggacaaggcatctggtctgatcaaggtggaccgtgttctttattcctctgttgtttacccacataactatggcttcattccacgcacactctgtgaggataacgaccccctggatgtcctcatactgatgcaggaacaagttgtccctgggtgtttcctgcgagctcgtgctattgggctcatgcctatgatcgatcagggcgagaaagatgataagattatagcagtctgtgctgatgaccctgaattccgtcactacacggacatcacggacctcccaccgcatcgccttcaagagatccgccgcttttttgaagattataaaaagaatgaaaacaaagaggtcgcagtgaatgagttcctgccagcgaaagatgccatcaacgcaatcaagtactcgatggacctgtatggctcatacgtcatcgaaagcctgaggaagtgatctccagctgcttgattgtggttgtggatgctacaccattttctcaacagctcatccagagtaccgtagtacagacttaacacgaacgaactgtaatcgtgaccaagggatgctattaccttctgctcatgttgaaacaatcagcagtgcctttctttccattatatgccatgtcgaatcaaggcaacttggccctgaaatctttgtggtcaagttaaaccagcactttgacagaacaaggattgctggatgcctggattactgttacataaatgaccattactgaacttcatttcttgctcttatcttttggtgagatgcccagttctcatccgatgcataactataactagtactag

SEQ ID NO: 202554 - DNA, 1010 bp, Zea Mays
ctggtggtttggtttcgtttgtgttctcctccttttcccggagccatggctggacctgctgttctcaatgagcgtatcctttcttccatgtcccagaaacatgttgctgctcacccatggcatgatttggagataggaccaggggctcctgaattcttcaattgtgtggttgagattcctagaggcagcaaggttaagtacgagttggacaaggcatctggtctgatcaaggtggaccgtgttctttattcctctgttgtttacccacataactatggcttcattccacgcacactctgtgaggataacgaccccctggatgtcctcatactgatgcaggaacaagttgtccctgggtgtttcctgcgagctcgtgctattgggctcatgcctatgatcgatcagggcgagaaagatgataagattatagcagtctgtgctgatgaccctgaattccgtcactacacggacatcacggacctcccaccgcatcgccttcaagagatccgccgcttttttgaagattataaaaagaatgaaaacaaagaggtcgcagtgaatgagttcctgccagcgaaagatgccatcaacgcaatcaagtactcgatggacctgtatggctcatacgtcatcgaaagcctgaggaagtgatctccagctgcttgattgtggttgtggatgctacaccattttctcaacagctcatccagagtaccgtagtacagacttaacacgaacgaactgtaatcgtgaccaagggatgctattaccttctgctcatgttgaaacaatcagcagtgcctttctttccattatatgccatgtcgaatcaaggcaacttggccctgaaatctttgtggtcaagttaaaccagcactttgacagaacaaggattgctggatgcctggattactgttacataaatgaccattactgaacttcatttcttgctcttatcttttggtgagatgcccagttctcatccgatgcataactataactagtactag

SEQ ID NO: 202555 - DNA, 995 bp, Zea Mays
atctttgcttggtgctggcgcttctttgccatggctggacctgctgttctcaatgagcgtatcctttcttccatgtcccagaaacatgttgctgctcacccatggcatgatttggagataggaccaggggctcctgaattcttcaattgtgtggttgagattcctagaggcagcaaggttaagtacgagttggacaaggcatctggtctgatcaaggtggaccgtgttctttattcctctgttgtttacccacataactatggcttcattccacgcacactctgtgaggataacgaccccctggatgtcctcatactgatgcaggaacaagttgtccctgggtgtttcctgcgagctcgtgctattgggctcatgcctatgatcgatcagggcgagaaagatgataagattatagcagtctgtgctgatgaccctgaattccgtcactacacggacatcacggacctcccaccgcatcgccttcaagagatccgccgcttttttgaagattataaaaagaatgaaaacaaagaggtcgcagtgaatgagttcctgccagcgaaagatgccatcaacgcaatcaagtactcgatggacctgtatggctcatacgtcatcgaaagcctgaggaagtgatctccagctgcttgattgtggttgtggatgctacaccattttctcaacagctcatccagagtaccgtagtacagacttaacacgaacgaactgtaatcgtgaccaagggatgctattaccttctgctcatgttgaaacaatcagcagtgcctttctttccattatatgccatgtcgaatcaaggcaacttggccctgaaatctttgtggtcaagttaaaccagcactttgacagaacaaggattgctggatgcctggattactgttacataaatgaccattactgaacttcatttcttgctcttatcttttggtgagatgcccagttctcatccgatgcataactataactagtactag

SEQ ID NO: 202556 - DNA, 1007 bp, Zea Mays
tgagtggcgaagggcccctcccggctcccgcttccctctgccatggctggacctgctgttctcaatgagcgtatcctttcttccatgtcccagaaacatgttgctgctcacccatggcatgatttggagataggaccaggggctcctgaattcttcaattgtgtggttgagattcctagaggcagcaaggttaagtacgagttggacaaggcatctggtctgatcaaggtggaccgtgttctttattcctctgttgtttacccacataactatggcttcattccacgcacactctgtgaggataacgaccccctggatgtcctcatactgatgcaggaacaagttgtccctgggtgtttcctgcgagctcgtgctattgggctcatgcctatgatcgatcagggcgagaaagatgataagattatagcagtctgtgctgatgaccctgaattccgtcactacacggacatcacggacctcccaccgcatcgccttcaagagatccgccgcttttttgaagattataaaaagaatgaaaacaaagaggtcgcagtgaatgagttcctgccagcgaaagatgccatcaacgcaatcaagtactcgatggacctgtatggctcatacgtcatcgaaagcctgaggaagtgatctccagctgcttgattgtggttgtggatgctacaccattttctcaacagctcatccagagtaccgtagtacagacttaacacgaacgaactgtaatcgtgaccaagggatgctattaccttctgctcatgttgaaacaatcagcagtgcctttctttccattatatgccatgtcgaatcaaggcaacttggccctgaaatctttgtggtcaagttaaaccagcactttgacagaacaaggattgctggatgcctggattactgttacataaatgaccattactgaacttcatttcttgctcttatcttttggtgagatgcccagttctcatccgatgcataactataactagtactag

SEQ ID NO: 202557 - DNA, 4035 bp, Zea Mays
cggggagagacgctcgtggtcgcctccatttctcctcacttgccgctacctagcatcgcatcccctccacccaagctcgatcgatgaccaataaaagaagcttgagatcggctcctgcatggccggttgcgtgtcgctgggggaaatagaatagaaagaggctagatttgaggtcgctgcgttctcaccaccctctccacttctgaattgaagaacctacgatccgttccacaaccgggcagcggtttgttccgtgctgcaaattagatcgagaggccatcttcttcatctcagagtttcgccgtcggcagtgtgatcccggactgtgcatgagctagctgaaaagggaaggggattccagagatgccgttgttcgaacgggatcgctaccagaggctggacggcgtgggcgcccggaggccgccgccgccgccgtcgtcgttctgctcgtcggcaaccgtcgtcgtcttcgtggcgctctgcctcgtcgccgcgtggatgatggcgtcgtccaacaacatcgccgtcaccgtaacgccagagaacaactcgggggccaaggaccaggacgggtccgtcgacgttggcggcgacacgcggcaggcgagcgacgaggtggcggacactggcagcggcacgcagtcgacggaggtgagtggggacgcaggcaagaaagatgatcgtagcggtggcgacgcttcgcagacgaaggaggacgctgatggggacaccgacaacaaagatggtggcgacgcttcgcagacgaaggaaggcgctgatggcgacaccggcaacaacaaggacgacggcgctggcgccacgcagacggccgaacctgtcactactgtcggcaacgacgtcaaccagagcgacgtcacggggagaacggatgcgacagccaacggcactaccagaggcacggacgcagaggactccggagagccagacagcggcaccgttgccgagggcgacacaccggccaggaaccagactttctccgacgagaacggcaagacggagggcggcgaggtggcgaagccggaggaccccgacaaaaaagtcgagcagagcgccgagcagacggcgatcgatggcaacactaccacaagcggacaggatcaggacgagaacaacaccgacaagaacaccaacgaaaccggcggccaggctgacaagagggaggaggaggcgtccactgacgacaagagcaccggcggccaggctgacaacactactgtacaagaggcatccaccactgacgataacagcaccggcggccaggctaacaatagcaccaaggagacaccgacagagtcaaaagagaccgttggcggtgacgacggcacggcccagagccagacgagcttcgacgacatgaatggcagtacgaacgactcgcagcccatgaaagaagacgggaaggtcgccgagaatagctccgatgaaactgccagcggcggcaaggtggaaagcacagacgacgacgcgacaaccggcgcggcgtcaaacaacgcaacttccggaggccagaacgtcgcggccgagaccatggcatttgcagccgcggatgatggcgccaacggcaacatcactgaaaacagctacgcaacgaacagcagcgccacgactgaagggaagataccgacggttggagaaggagacgcggcagagaaagccgacctgctgccgagcgggcaggcggagctgctgaacgagacggcgtcggcggtggcggagaacggcgcgttcccgacccaggcggcggaatcgagcgaggagaaggaggcgctcgcaggcaagaacaagaagaagaaccagaagaaaaagaagcagaagagcaaggaccagggcgccgcctctggcgagacggcggaggggaaggagacgtacgcccacacctggaagctctgcaacgcgagcaccggcgcggactacatcccgtgcctggacaacgaggcggccatcaagaagctcaagagcaccaagcactacgagcaccgggagcggcactgccccgccgacgcgccggcgtgcctcgtaccgctcccggagggctaccggcagccgatcccgtggccatacagccgcgacaagatctggtaccacaacgtgccgcacactatgctggcgtccttcaaggggcaccagaactgggtgaaggtctccggcgagcacctgacgttccccggcggcggcacgcagttcaagcacggcgcgctgcactacatcgaggtgatcgaggaggcgctcccggaggtggcgtggggccgccgcagccgcgtggtgctcgacgtcggctgcggcgtcgccagcttcggcggcttcctgttcgacaaggacgcgctgaccatgtcgttcgcgcccaaggacgagcacgaggcgcaggtgcagttcgcgctggagcgcggcatcccggccgtctccgccgtgatgggtaccaagcggctccccttccccggcaacgccttcgacgtcgtccactgcgcccggtgccgggtgccgtggcacatcgagggcggcacgctgctgctcgaggtgaaccgcctcctccggcccggcggcctcttcgtgtggtcggcgacgcccgtgtaccagaaggtgccggaggacgtcgagatctggcacgcgatggcggcgctcaccaagtccatgtgctgggagatagtgaagaagacgagcgacacggtggacgagaccgccatggtggtgttcaagaagccgacgagcaacgagtgctacgacgcgaggacgcgcgcggagccgccgctctgcggggcctccgacgaccaggacgcggcgtggaacgtcaccctgcggccgtgtatgcaccgggtgcccaccgacgcgtccgcccgcggctcgcggtggccgacgcagtggccccagcggctggcgacgacgccctactggctgagcgccgaccagacgggcgtctacggcaagcccgcgcccgccgacttcgccgcggaccaggagcactggaggaaggtagtcgacaactcgtaccgcgacggcatgggcatcgactggaagaacgtccggaacgtcatggacatgagagccgtctacggagggtttgcggcggcgttgtcggacatgaaggtgtgggtgatgaacgtggtgaccgtggactcgccggacacgctgccagtcatctacgagcgcgggctgttcgggatgtaccatgactggtgcgagtccttcagcacttacccgaggtcgtacgacctcgtccacgccaaccacctcttctccaagctgaagagtaggtgcaagctgctgccggtgatcgccgaggtggaccgagtcctgaggccggaggggaagctcatcgtccgcgacgacatggcgacggtcaaggaggtccagagcattgcgagatcgttgcactgggaggtgaggatgaccgtgtccaagcaggggcaggggctgctctgcgtcaggaagactatgtggcggcccacgcaagtcgaggcgctgagctagtgtaagttcatggtgatggctgctgatgttcttgttcttcctagcaaaacacagaataaccaagatagccattgggtggtatactaccgagtttcgtagctctctaacctgttattagtagctaaagtattagctctatttacaacttgacttgagtgctgttggggaaactgaagatggcgatttgaaactgcaaaatcatgagccctatgcactctcccatacgttgataactcaaagcaccacaacatttcaggatcgcagaacgtggaattaaaggcgcatctgtgtgttgagtgctttcagcatacgcaggcccaaaagcctttggtctatggctttgtttaggacagctgctgattgtgaacaaacaacttatttgcttctggttgatgactgcttttagttcattctgaacagcaattgaactagtaagctaatgcataagttgcctgtttggcatagattctacttagctgtgccaaactgggtcatattgtaatacccaaaagtgtaaactatgaaaatagagttgatctccatattttg

SEQ ID NO: 202558 - DNA, 3744 bp, Zea Mays
cacttgccgctacctagcatcgcatcccctccacccaagctcgatcgatgaccaataaaagaagcttgagatcggctcctgcatggccggttgcgtgtcgctgggggaaatagaatagaaagaggctagatttgaggtcgctgcgttctcaccaccctctccacttctgaattgaagaacctacgatccgttccacaaccgggcagcggtttgttccgtgctgcaaattagatcgagaggccatcttcttcatctcagagtttcgccgtcggcagtgtgatcccggactgtgcatgagctagctgaaaagggaaggggattccagagatgccgttgttcgaacgggatcgctaccagaggctggacggcgtgggcgcccggaggccgccgccgccgccgtcgtcgttctgctcgtcggcaaccgtcgtcgtcttcgtggcgctctgcctcgtcgccgcgtggatgatggcgtcgtccaacaacatcgccgtcaccgtaacgccagagaacaactcgggggccaaggaccaggacgggtccgtcgacgttggcggcgacacgcggcaggcgagcgacgaggtggcggacactggcagcggcacgcagtcgacggaggtgagtggggacgcaggcaagaaagatgatcgtagcggtggcgacgcttcgcagacgaaggaggacgctgatggggacaccgacaacaaagatggtggcgacgcttcgcagacgaaggaaggcgctgatggcgacaccggcaacaacaaggacgacggcgctggcgccacgcagacggccgaacctgtcactactgtcggcaacgacgtcaaccagagcgacgtcacggggagaacggatgcgacagccaacggcactaccagaggcacggacgcagaggactccggagagccagacagcggcaccgttgccgagggcgacacaccggccaggaaccagactttctccgacgagaacggcaagacggagggcggcgaggtggcgaagccggaggaccccgacaaaaaagtcgagcagagcgccgagcagacggcgatcgatggcaacactaccacaagcggacaggatcaggacgagaacaacaccgacaagaacaccaacgaaaccggcggccaggctgacaagagggaggaggaggcgtccactgacgacaagagcaccggcggccaggctgacaacactactgtacaagaggcatccaccactgacgataacagcaccggcggccaggctaacaatagcaccaaggagacaccgacagagtcaaaagagaccgttggcggtgacgacggcacggcccagagccagacgagcttcgacgacatgaatggcagtacgaacgactcgcagcccatgaaagaagacgggaaggtcgccgagaatagctccgatgaaactgccagcggcggcaaggtggaaagcacagacgacgacgcgacaaccggcgcggcgtcaaacaacgcaacttccggaggccagaacgtcgcggccgagaccatggcatttgcagccgcggatgatggcgccaacggcaacatcactgaaaacagctacgcaacgaacagcagcgccacgactgaagggaagataccgacggttggagaaggagacgcggcagagaaagccgacctgctgccgagcgggcaggcggagctgctgaacgagacggcgtcggcggtggcggagaacggcgcgttcccgacccaggcggcggaatcgagcgaggagaaggaggcgctcgcaggcaagaacaagaagaagaaccagaagaaaaagaagcagaagagcaaggaccagggcgccgcctctggcgagacggcggaggggaaggagacgtacgcccacacctggaagctctgcaacgcgagcaccggcgcggactacatcccgtgcctggacaacgaggcggccatcaagaagctcaagagcaccaagcactacgagcaccgggagcggcactgccccgccgacgcgccggcgtgcctcgtaccgctcccggagggctaccggcagccgatcccgtggccatacagccgcgacaagatctggtaccacaacgtgccgcacactatgctggcgtccttcaaggggcaccagaactgggtgaaggtctccggcgagcacctgacgttccccggcggcggcacgcagttcaagcacggcgcgctgcactacatcgaggtgatcgaggaggcgctcccggaggtggcgtggggccgccgcagccgcgtggtgctcgacgtcggctgcggcgtcgccagcttcggcggcttcctgttcgacaaggacgcgctgaccatgtcgttcgcgcccaaggacgagcacgaggcgcaggtgcagttcgcgctggagcgcggcatcccggccgtctccgccgtgatgggtaccaagcggctccccttccccggcaacgccttcgacgtcgtccactgcgcccggtgccgggtgccgtggcacatcgagggcggcacgctgctgctcgaggtgaaccgcctcctccggcccggcggcctcttcgtgtggtcggcgacgcccgtgtaccagaaggtgccggaggacgtcgagatctggcacgcgatggcggcgctcaccaagtccatgtgctgggagatagtgaagaagacgagcgacacggtggacgagaccgccatggtggtgttcaagaagccgacgagcaacgagtgctacgacgcgaggacgcgcgcggagccgccgctctgcggggcctccgacgaccaggacgcggcgtggaacgtcaccctgcggccgtgtatgcaccgggtgcccaccgacgcgtccgcccgcggctcgcggtggccgacgcagtggccccagcggctggcgacgacgccctactggctgagcgccgaccagacgggcgtctacggcaagcccgcgcccgccgacttcgccgcggaccaggagcactggaggaaggtagtcgacaactcgtaccgcgacggcatgggcatcgactggaagaacgtccggaacgtcatggacatgagagccgtctacggagggtttgcggcggcgttgtcggacatgaaggtgtgggtgatgaacgtggtgaccgtggactcgccggacacgctgccagtcatctacgagcgcgggctgttcgggatgtaccatgactggtgcgagtccttcagcacttacccgaggtcgtacgacctcgtccacgccaaccacctcttctccaagctgaagagtaggtgcaagctgctgccggtgatcgccgaggtggaccgagtcctgaggccggaggggaagctcatcgtccgcgacgacatggcgacggtcaaggaggtccagagcattgcgagatcgttgcactgggaggtgaggatgaccgtgtccaagcaggggcaggggctgctctgcgtcaggaagactatgtggcggcccacgcaagtcgaggcgctgagctagtgatcgcagaacgtggaattaaaggcgcatctgtgtgttgagtgctttcagcatacgcaggcccaaaagcctttggtctatggctttgtttaggacagctgctgattgtgaacaaacaacttatttgcttctggttgatgactgcttttagttcattctgaacagcaattgaactagtaagctaatgcataagttgcctgtttggcatagattctacttagctgtgccaaactgggtcatattgtaatacccaaaagtgtaaactatgaaaatagagttgatctccatattttg

SEQ ID NO: 202559 - DNA, 3697 bp, Zea Mays
tccacttctgaattgaagaacctacgatccgttccacaaccgggcagcggtttgttccgtgctgcaaattagatcgagaggccatcttcttcatctcagagtttcgccgtcggttggttcccggagccgcgccatttctcgacccaattttgtttcaggcagtgtgatcccggactgtgcatgagctagctgaaaagggaaggggattccagagatgccgttgttcgaacgggatcgctaccagaggctggacggcgtgggcgcccggaggccgccgccgccgccgtcgtcgttctgctcgtcggcaaccgtcgtcgtcttcgtggcgctctgcctcgtcgccgcgtggatgatggcgtcgtccaacaacatcgccgtcaccgtaacgccagagaacaactcgggggccaaggaccaggacgggtccgtcgacgttggcggcgacacgcggcaggcgagcgacgaggtggcggacactggcagcggcacgcagtcgacggaggtgagtggggacgcaggcaagaaagatgatcgtagcggtggcgacgcttcgcagacgaaggaggacgctgatggggacaccgacaacaaagatggtggcgacgcttcgcagacgaaggaaggcgctgatggcgacaccggcaacaacaaggacgacggcgctggcgccacgcagacggccgaacctgtcactactgtcggcaacgacgtcaaccagagcgacgtcacggggagaacggatgcgacagccaacggcactaccagaggcacggacgcagaggactccggagagccagacagcggcaccgttgccgagggcgacacaccggccaggaaccagactttctccgacgagaacggcaagacggagggcggcgaggtggcgaagccggaggaccccgacaaaaaagtcgagcagagcgccgagcagacggcgatcgatggcaacactaccacaagcggacaggatcaggacgagaacaacaccgacaagaacaccaacgaaaccggcggccaggctgacaagagggaggaggaggcgtccactgacgacaagagcaccggcggccaggctgacaacactactgtacaagaggcatccaccactgacgataacagcaccggcggccaggctaacaatagcaccaaggagacaccgacagagtcaaaagagaccgttggcggtgacgacggcacggcccagagccagacgagcttcgacgacatgaatggcagtacgaacgactcgcagcccatgaaagaagacgggaaggtcgccgagaatagctccgatgaaactgccagcggcggcaaggtggaaagcacagacgacgacgcgacaaccggcgcggcgtcaaacaacgcaacttccggaggccagaacgtcgcggccgagaccatggcatttgcagccgcggatgatggcgccaacggcaacatcactgaaaacagctacgcaacgaacagcagcgccacgactgaagggaagataccgacggttggagaaggagacgcggcagagaaagccgacctgctgccgagcgggcaggcggagctgctgaacgagacggcgtcggcggtggcggagaacggcgcgttcccgacccaggcggcggaatcgagcgaggagaaggaggcgctcgcaggcaagaacaagaagaagaaccagaagaaaaagaagcagaagagcaaggaccagggcgccgcctctggcgagacggcggaggggaaggagacgtacgcccacacctggaagctctgcaacgcgagcaccggcgcggactacatcccgtgcctggacaacgaggcggccatcaagaagctcaagagcaccaagcactacgagcaccgggagcggcactgccccgccgacgcgccggcgtgcctcgtaccgctcccggagggctaccggcagccgatcccgtggccatacagccgcgacaagatctggtaccacaacgtgccgcacactatgctggcgtccttcaaggggcaccagaactgggtgaaggtctccggcgagcacctgacgttccccggcggcggcacgcagttcaagcacggcgcgctgcactacatcgaggtgatcgaggaggcgctcccggaggtggcgtggggccgccgcagccgcgtggtgctcgacgtcggctgcggcgtcgccagcttcggcggcttcctgttcgacaaggacgcgctgaccatgtcgttcgcgcccaaggacgagcacgaggcgcaggtgcagttcgcgctggagcgcggcatcccggccgtctccgccgtgatgggtaccaagcggctccccttccccggcaacgccttcgacgtcgtccactgcgcccggtgccgggtgccgtggcacatcgagggcggcacgctgctgctcgaggtgaaccgcctcctccggcccggcggcctcttcgtgtggtcggcgacgcccgtgtaccagaaggtgccggaggacgtcgagatctggcacggcctggagcaatttgcattggttgatttggtactatatcccctgatcccgttcctgtttgaagcagcgatggcggcgctcaccaagtccatgtgctgggagatagtgaagaagacgagcgacacggtggacgagaccgccatggtggtgttcaagaagccgacgagcaacgagtgctacgacgcgaggacgcgcgcggagccgccgctctgcggggcctccgacgaccaggacgcggcgtggaacgtcaccctgcggccgtgtatgcaccgggtgcccaccgacgcgtccgcccgcggctcgcggtggccgacgcagtggccccagcggctggcgacgacgccctactggctgagcgccgaccagacgggcgtctacggcaagcccgcgcccgccgacttcgccgcggaccaggagcactggaggaaggtagtcgacaactcgtaccgcgacggcatgggcatcgactggaagaacgtccggaacgtcatggacatgagagccgtctacggagggtttgcggcggcgttgtcggacatgaaggtgtgggtgatgaacgtggtgaccgtggactcgccggacacgctgccagtcatctacgagcgcgggctgttcgggatgtaccatgactggtgcgagtccttcagcacttacccgaggtcgtacgacctcgtccacgccaaccacctcttctccaagctgaagagtaggtgcaagctgctgccggtgatcgccgaggtggaccgagtcctgaggccggaggggaagctcatcgtccgcgacgacatggcgacggtcaaggaggtccagagcattgcgagatcgttgcactgggaggtgaggatgaccgtgtccaagcaggggcaggggctgctctgcgtcaggaagactatgtggcggcccacgcaagtcgaggcgctgagctagtgatcgcagaacgtggaattaaaggcgcatctgtgtgttgagtgctttcagcatacgcaggcccaaaagcctttggtctatggctttgtttaggacagctgctgattgtgaacaaacaacttatttgcttctggttgatgactgcttttagttcattctgaacagcaattgaactagtaagctaatgcataagttgcctgtttggcatagattctacttagctgtgccaaactgggtcatattgtaatacccaaaagtgtaaactatgaaaatagagttgatctccatattttg

SEQ ID NO: 202560 - DNA, 3501 bp, Zea Mays
gtttcattgacgacgttgcagtgctcaggcagtgtgatcccggactgtgcatgagctagctgaaaagggaaggggattccagagatgccgttgttcgaacgggatcgctaccagaggctggacggcgtgggcgcccggaggccgccgccgccgccgtcgtcgttctgctcgtcggcaaccgtcgtcgtcttcgtggcgctctgcctcgtcgccgcgtggatgatggcgtcgtccaacaacatcgccgtcaccgtaacgccagagaacaactcgggggccaaggaccaggacgggtccgtcgacgttggcggcgacacgcggcaggcgagcgacgaggtggcggacactggcagcggcacgcagtcgacggaggtgagtggggacgcaggcaagaaagatgatcgtagcggtggcgacgcttcgcagacgaaggaggacgctgatggggacaccgacaacaaagatggtggcgacgcttcgcagacgaaggaaggcgctgatggcgacaccggcaacaacaaggacgacggcgctggcgccacgcagacggccgaacctgtcactactgtcggcaacgacgtcaaccagagcgacgtcacggggagaacggatgcgacagccaacggcactaccagaggcacggacgcagaggactccggagagccagacagcggcaccgttgccgagggcgacacaccggccaggaaccagactttctccgacgagaacggcaagacggagggcggcgaggtggcgaagccggaggaccccgacaaaaaagtcgagcagagcgccgagcagacggcgatcgatggcaacactaccacaagcggacaggatcaggacgagaacaacaccgacaagaacaccaacgaaaccggcggccaggctgacaagagggaggaggaggcgtccactgacgacaagagcaccggcggccaggctgacaacactactgtacaagaggcatccaccactgacgataacagcaccggcggccaggctaacaatagcaccaaggagacaccgacagagtcaaaagagaccgttggcggtgacgacggcacggcccagagccagacgagcttcgacgacatgaatggcagtacgaacgactcgcagcccatgaaagaagacgggaaggtcgccgagaatagctccgatgaaactgccagcggcggcaaggtggaaagcacagacgacgacgcgacaaccggcgcggcgtcaaacaacgcaacttccggaggccagaacgtcgcggccgagaccatggcatttgcagccgcggatgatggcgccaacggcaacatcactgaaaacagctacgcaacgaacagcagcgccacgactgaagggaagataccgacggttggagaaggagacgcggcagagaaagccgacctgctgccgagcgggcaggcggagctgctgaacgagacggcgtcggcggtggcggagaacggcgcgttcccgacccaggcggcggaatcgagcgaggagaaggaggcgctcgcaggcaagaacaagaagaagaaccagaagaaaaagaagcagaagagcaaggaccagggcgccgcctctggcgagacggcggaggggaaggagacgtacgcccacacctggaagctctgcaacgcgagcaccggcgcggactacatcccgtgcctggacaacgaggcggccatcaagaagctcaagagcaccaagcactacgagcaccgggagcggcactgccccgccgacgcgccggcgtgcctcgtaccgctcccggagggctaccggcagccgatcccgtggccatacagccgcgacaagatctggtaccacaacgtgccgcacactatgctggcgtccttcaaggggcaccagaactgggtgaaggtctccggcgagcacctgacgttccccggcggcggcacgcagttcaagcacggcgcgctgcactacatcgaggtgatcgaggaggcgctcccggaggtggcgtggggccgccgcagccgcgtggtgctcgacgtcggctgcggcgtcgccagcttcggcggcttcctgttcgacaaggacgcgctgaccatgtcgttcgcgcccaaggacgagcacgaggcgcaggtgcagttcgcgctggagcgcggcatcccggccgtctccgccgtgatgggtaccaagcggctccccttccccggcaacgccttcgacgtcgtccactgcgcccggtgccgggtgccgtggcacatcgagggcggcacgctgctgctcgaggtgaaccgcctcctccggcccggcggcctcttcgtgtggtcggcgacgcccgtgtaccagaaggtgccggaggacgtcgagatctggcacgcgatggcggcgctcaccaagtccatgtgctgggagatagtgaagaagacgagcgacacggtggacgagaccgccatggtggtgttcaagaagccgacgagcaacgagtgctacgacgcgaggacgcgcgcggagccgccgctctgcggggcctccgacgaccaggacgcggcgtggaacgtcaccctgcggccgtgtatgcaccgggtgcccaccgacgcgtccgcccgcggctcgcggtggccgacgcagtggccccagcggctggcgacgacgccctactggctgagcgccgaccagacgggcgtctacggcaagcccgcgcccgccgacttcgccgcggaccaggagcactggaggaaggtagtcgacaactcgtaccgcgacggcatgggcatcgactggaagaacgtccggaacgtcatggacatgagagccgtctacggagggtttgcggcggcgttgtcggacatgaaggtgtgggtgatgaacgtggtgaccgtggactcgccggacacgctgccagtcatctacgagcgcgggctgttcgggatgtaccatgactggtgcgagtccttcagcacttacccgaggtcgtacgacctcgtccacgccaaccacctcttctccaagctgaagagtaggtgcaagctgctgccggtgatcgccgaggtggaccgagtcctgaggccggaggggaagctcatcgtccgcgacgacatggcgacggtcaaggaggtccagagcattgcgagatcgttgcactgggaggtgaggatgaccgtgtccaagcaggggcaggggctgctctgcgtcaggaagactatgtggcggcccacgcaagtcgaggcgctgagctagtgatcgcagaacgtggaattaaaggcgcatctgtgtgttgagtgctttcagcatacgcaggcccaaaagcctttggtctatggctttgtttaggacagctgctgattgtgaacaaacaacttatttgcttctggttgatgactgcttttagttcattctgaacagcaattgaactagtaagctaatgcataagttgcctgtttggcatagattctacttagctgtgccaaactgggtcatattgtaatacccaaaagtgtaaactatgaaaatagagttgatctccatattttg

SEQ ID NO: 202561 - DNA, 938 bp, Zea Mays
atgtttggctgctcttaaccgactgccatcgatctcacggcgtctccggcgaggggttcctggcgcgcgacatcacgttccgcaacacggcgggcgcgggcaaggggcaggcggtggcgctgcgcgtgaacgcggacctggccgcgctgtaccgctgcggcgtggaggggcaccaggacgcgctgtacgcgcactcgttccggcagttctaccgcgagtgcgccgtgtcgggcaccgtcgacgtggtcttcggcgacgcggcggccgtgctgcagggctgcgcgctcctggccagggcgcccgtgcccggccagtccgtcgtgctcacggcgcacggccgcgccgaccccaacgaggacacgggcatcgcgctgcaccactgcaccgtctccgcctccgccgccgaccccgcgcccgccggcacgcgcacgttcctgggccggccgtggggcgcgtacgcgcgcgccgtcgtgatggactcctacctgggccagatcgtggaccgggagggatgggccgagtggcccggcgccgagcccggccgcgcggacaccgtgtacttcggcgagtacgggaacgacgggccgggggccgacacgggaggccgcgtgggctgggctggggtgcggcagatggagtacgacgaggcggcacagttcgccgtcgagaacttcatctacggcgacgagtggctcggcgccacctccttcccctacgatgacgacgtctgattcggcgcaaaccttgctctgcaaatctcaagaatacaaaggccgcacaagtgaccgtgtaaagctatgcatacccatcatcagccgtcagtgagtttggcttgtgttttagtatattcaagttggaattgttaagaggggtctcacatctctatataaggaatctgtacaccccctcataatacagagatcagaaagaggccagag

SEQ ID NO: 202562 - DNA, 1769 bp, Zea Mays
ggcgaactgccgttcctcaaaccacgcaggtacgacgaccgcagaccgaggtctagccggagatctgaatggacttcacttcaggcttcttggcgtcctccttcggcacagtgactgtaagcacgccgttctccatggcggccgtgatctgctccgtcttagcgttctcgggcagtcggaacctgcgcaggaacctcccgctgctccgctccacgcggtgccagccccggtacgtcggccttgaacacgtgcgcctctggagtctccttccagtcgatccgcgcgccagcgaaggccgcggtctccgagctggtccgcgggaacgaggggaagagactgctgctgctgccggagccgaaggggaagccctcaaaggggtcccagaggtcgagggagaagggatcgaacacgttgctgcggcggatcagcgacatggtcaggttcggttctagtcttcttgtcaacgagaatctaatcgaagatttggggaagaggtttgagtgaattgattgagcttcggatcgctgcttggtgcttgctgtctccctcaattcctagaaggggtctttttatagagggaaagcgagagagatgaagtggaggagaaagcagtttctggagagttctcacgtgttcgcggatagacccggatagacacgacgccgctgtattggagcgtggagaatgctagagagagctatccagtggcagtccctcttttagatcgtagtactgggctgggtttctagtaattttgttcatggaccaagacctgggcttatgctggaaaaataattcagctcaacatcaaacgaggcccattcctcagacctctctgtctcgtcttcctagttcggacttcggattaagacgacccaccgagcacctcgatacggcggagtcgtgggaagccagggaggtgaggacgacgtggcgaagtcgtgaggacaaattccaccgctgtggcagccatgtcagtgcaggagtacctggggaagcacctgctctcgcgcaagagcgaggaggccctgaatacggcggtccgcgccaaggcccctaacccggcgcttttcatcgtcggccacatgaggcgggaggcgcccaccgtgatcacgagggtgcgggcgcgccagatccttgacgggcgtagcgcaccggccgttgaggtcgagttgcacaccaacaaggccgtgcaccgagcatctacggctagcgtgggcgcgctcgagggcgccgccgccgacgcggccggggcctccgagaggcggaagttcctcgccaggggggtcgcctacgcggtgcgggtgatcaacgacaaggtgtcggaggcactcgttgggatggatccgcagcagcagacgcagatcgaccaggccatcatgcacttgacagggcgcgccacaaggttccactctacaagcatatagcggatcttgttggcaaaagcgctacaactcttcgtgtccctgcaattacagtcattaatggtggaagagcacacgaggacacaaggatttagagtggttcgggccgccggagcgtaataccctactccactgtgtgttgtattgagtttgtgaacttgagagcttgtatgaacttgtgagtctgagggtctgagtgaacctgccttgtaacgtcgtgtgtcttcccttttatagctcaagggaggcacatacaaggatgctgagccccgacatgtgggctcaggaacataacagaaggaatatattataggagtaactaacgcctgttcctggcaccctgat

SEQ ID NO: 202563 - DNA, 1642 bp, Zea Mays
cgtctcgggcttcaccgccgcaacacacgtactcccccaatctactagtgtctctccaccaaatttttggtctcggatacaaccaagatgtcttcatctttgcacgacttaacaccaaggcatctttaatgattccacgaggccagctggcgacaacaactaccagcattttatcctggaggcggcgtcaccgtcgccgatccctcctctcaactggcaacaatgggtgcacaggatgcaactgccctgagtgttcagcagggccgagcgaggacagctgctgaaaacctcgtccacgtccctgccgcccaggtttcacttccaggtgccctagccctagggaactttgagcaagagctcggagaagacgcgctgctgccgccggtgctgagccaggagcagcaggacgccgtgaagagatacaaccatctgatgggggtccacgtggcgtacttccgcgtgtgcatcgaccctacggtggccagttccaggcggctcctccagcaggcaatccaggatctcaagaaccactgtgctggcgatgctctggtggcgcattattacgtgaacaacaggaacaacaacgacccagcagatcagccagacactactacggccattcggcagcaagcaattgctcgctctgctgatgcctcctctcggcagcatcatggcgcctgcagaggattcaacgaccatcatggcggcggcgttgttccttccgttcaccgggaggaggaggaagctctggcggctccggtggtggcgatgagcatgagccccgccttgcggctcgtggacatcaagggcaaagtcgcagctttctgtgccgatcgcaacgggagccgcttcgtgcagcaggcgcttgaggcggcagcgccggaggagatcgccatggtttacaaggagatcatgccctgcgtgcgcacgcttgccgtcgacatgtttggaaaccatgccatccagaagattcttgagcatgggccgaggtcctgcaagcgaggggtcatcagtaatctgatcggccatttgttgcccctaagccttgacaagtacagctgccgggtggtacagaagtctttcgacgtaggggagcacgaccagaaggtggcgatggccaaggagctcggcagcaaagtgctgaggtgtgtccgcgaccagttcgcgaaccacgtcgtccagaagtgcgtcgagtgcctgccgtccaaggacatccactccatcctccgaagcttctacggccgggccaaggcgctgtccacccatcccttcggctgccacgtcatccagaaagtgctggcccgctgcaaagaccacgagatctaccacgcgctgacggcggagatcatggagaacgtgaacaagctggcggcggacaggttcggcaactacgtggtgcagcagctggtggagcacggaggcggcgccatgcggtccgcgatggtcaggaggttcgccggccgcgtcgtcggcatgagctaccacaagttcgcctccaacgtggtggagaagtgcctggcgttcgggagccaggaggaccgccggctcatcgccgacgagatcgtcgccggcggcggcggcggccagcagcagcacttggaccatctcgtgtgtattgtttgtgaatgtgttctgtgtacgt

SEQ ID NO: 202564 - DNA, 2053 bp, Zea Mays
agggagctgggctagtctggtgctccggttgccaaatctacgacgaccgagacgttatcgggaacgtgaagcccaggacggacggggcgggcaggagcggccacatctcatctcatccttccaccgcggccggcagcacatcacgggcctgccgtgccgccaccgtggcgttttattgtctgttcgaaaccaccactgcctgcgccttcttctggagaaaggcaggcggaggcggacaggccacccccgcacctcattccacaattatttgcgcccgtcccatggtttatattcattattattattaaaatcacgctttctgtagttggatttcgttttctccttttgtttaattattttgtaattacagtaatctctcgtgactggtgtaacagtcagtcggctttaaaaggacacgagcgcttaaacccccaccccatatccgcatccgctgcctccgcctctcgagtctcgtccacccgtcatcctcctagctcctctactcgccagtcgccatgggtaattcctcgctcccggattcagcgtcgggtttctctctctctctctacaattatcactacctgctgctccctcatgcaccgtgctcaaatctgaccaaagtgggttctgctgactgttttttgtgtttttttggggtctctcgatcttctctggatgcaggcaagattaagatcggaatcaacggcttcggaaggatcggcaggctcgtggccagggtcgccctccagagcgaggatgtcgagctcgtcgccgtcaacgaccccttcatcaccacggactacatgacctacatgttcaagtacgacaccgtccacggccactggaagcacagcgacatcacactcaaggactccaagacccttctcttcggtgacaagccggtcaccgtctttggcatcaggaaccctgaggaaatcccgtggggtgaggctggcgctgagtatgtcgtggagtccaccggcgtcttcactgacaaggacaaggctgctgcacatctcaagggtggtgccaagaaggttgttatctctgccccaagcaaagacgcacccatgtttgttgttggtgtcaatgaggacaagtacacctcggatgttaacattgtttccaatgctagctgcaccacaaactgccttgctccccttgctaaggtcattcatgacaacttcggcattgttgagggtttgatgacaactgttcatgccatcactgaaaactgttgacggaccctcagccaaggactggagaggtggcagggctgccagctttaacatcattcctagcagcaccggtgctgccaaggctgttggtaaagttcttcctgatctgaatggcaagctcactggtatgtccttccgtgttcctactgtggatgtctcggttgttgacctcaccgtcagaatcgagaagggggcctcctatgaggatatcaagaaagctattaaggctgcttccgagggtccactcaagggtatcatgggttatgcggaggaggatctggtttctaccgacttccttggtgacagcaggtcgagcatcttcgacgccaaggccgggatcgctctgaacgaccacttcgtcaagctcgtctcgtggtacgacaacgagtggggctacagcaaccgcgtcgtcgacctgatccgccacatgttcaagacccagtagaggggttttttccccctgcttctcatggatggttgctgcttgtgtatgccgagaataaatgtggatggcgcgtgcctctgggtcgccaggttcatgctgagtctggacatgttttgcacttttgcttcccttcctgctaccatctgtgacagaaccgctcgctaatatgggacctgagattagctttttgctgcttgtggtgaggttgcagttttgttctgtgtttctgtgttgttagcaatcctatgattcaggtgttcgaatgaagaagataggctgctgcagaggaattgggtgttagctctttcttacccagttggaactgtaaatagtaattaatgaagaaagtagatgtcgcgtacctggtagc

SEQ ID NO: 202565 - DNA, 3574 bp, Zea Mays
ggcgcatccgctacgcgcacacgagctgtgcggtactgctcgctcatgcagccactgccacgctaccaccgcttcctttcctcttcggctgctccgcctcgcctcccagttcacagcccctcccaggctccgaatcggcggccacttctcattcctcacttccgtcctcgcgcaccaccccctccatccgttccggatggtgccttcgaaatcccgtccggcgccctagcgtagctcgggctcggccaggctccgggcccgccgcgccgttccgcagtccagctccacctccagaatggtacggttagtaaattgaggttggtggtgggttggtggccatactaggggaaggtacgtgtttgttctttatagatggtgacttggtttcaacctgagggttttgcccttgatgataggttgtcatagaattagtgggatatatgatggtttaatcacagtgactaaaatctggattctaaattgctaatagtagaaacagtagctatctagtgccggtagtgtttgggggtgtcttttgggctatgctgatgtggtgggttggagttgatattgtggttgttttgtatggcacattgttcaaatactgccaatatgagctactttttatgtttcatttttcctcgaggtaggttagtagatgtctggaatggatattgccaactaaatgtttttcctgtttcttaatgaaataaatgttttcctgttccagggatatttttgaattgttactaacagactaattttatcttctagatcttttcttgagtttaaggaagatgcttgcctttatttagaaggccctttttggtacgtcagcagtgttctttcctataggagtaaatgccattccgtagcatcgtgcgtgatgtaagggatggtttcgggagcttgtctaggaggggatttgaggtcaggtttctgagtcatcgcagagggaaatctcatggtgctgtccatgagctgcacgacccagtgcttgtggtacagagtagctgctgggctagcttgcctcctgaattacttcgagatgtgattgagaggttggagaccagtgaggatacatggccttctaggaaacatgtagttgcttgtgcagctgtctgcagaacatggagagagatgtgtagagagattgtcaagagcccagagttttctggaaaaatcacttttcctgtttccttgaagcaggtaatcatgcagctatgttataccttattatccatatatactgattccgttaccgttgtcaatactccatgtacagtattggtatgccaatcatatttggataatctaataagctcatgctgttcctcttctgtctacagcctgggcctcgagatggaactattcagtgttttattaagagggatacatctacccaaatctacagtctgtaccttagttttagctctgccgtgcctgtcgaaaatggcaaattccttctatccgcaaaaaggaactgccgtgcaacatatacagaatatataatatcaataaattctggtgatacatctaggtgtacaagtaacaacacatacattgggaaattaaggtcaaatttccttggcacaaaatttgtaatatacgatactcatccgccatacaatggaactagtcaaacagtggcagggaaaacaagtcagagattctactccaagaagggatcaaccaaggtttcttgcaggtggtacagtattgcacaaatctcatacgagctgaatgtcttgggaactcgaggcccaaggcggatgaactgtgtaatgcactccatcccagcttcatgccttgaggctggtggcagtgtcccttgccagccggacagcattgcagcccactctgttggcggatcattcagcagtgtgtccttgtcaaagtcatcgactatggaccactctatgcatttcaccagttcccggctctctgatgccataacaggagatggcattgtgaacagaggccaggcattgaatgatgctgacgatgaagagtgcaaggacatgcctttgatcctccgcaacaaggccccaaggtggcacgagcagcttcagtgctggtgcctcaacttccggggccgggtgactgtcgcctcggtcaagaacttccagctagtcgcggcgacacagcctgccgccggagccctgaccccatcacaggcagccccgcagccagctccgcctcctccgccggaccaagagaaggtcatactgcagtttgggaaggtcggcaaggacatcttcaccatggactactgctacccgctgtcagccttccaggccttcgccatctgcctgagcagcttcgacaccaagttggcctgcgaataaatcctacctacaattctggtacctaccaaataatcaaaaacactgattgtcgtggtgttcgtccaagaaccgagtttagctgagacgccattgggcaccatgtgctggtgccttgttaactcagaaacgcgtgggggctgaatctgtttcagcagcttccttgtgataatctgtagctgctgcttcgctgctgttgtatcctatgctttcatttctttccggttccgctgtagcttcttaccccccggtgacattagttcggtacccgtatctggatatttttttagccttcttcgttggattgttcaccggtgatggcatgtattaacagagatagttacatacagatgtaatgaattcaggtctggataattttgctttcggttgctattggaaaaggatgtgatggctgctgtcatcttcagcagggctacgactgctgtcactttttttttccctagtggactgctgatgtttcttttgctgtcaccttcagcagggtcatcagggaggtgactgatgaggtgtttatttgtttgttttgcttcaaagcgaggcctttagcacggacttttcgcgacgagtaaataaagctacacagataattgcaggcggagagagtaaccaaaatcttggggcgcaggtcgggagaaagatccgaaaggccaatgcaaatgcgatacagacgcacgctagttgctaatgctagctaccctcctcggtgctccccttgctcctgtggcgtgcgggaaaaaggcaacttaacaccagcatcgtccgaggcagcagcaacggacgactccacaagatcaaggtatctcaccgatagccaacagctgctgacatttttaatggaaccaacctctccacacctccagcatgggacaccaaatacttcactcggagatttatcaactgcgatgaagcaaacatctacaggtcttccaggctgcaagaattcgaaacaacacagcgcatgtactagctaatcaagcttatcactacacatctatgtacactcagcatacgagggcttcttgctccaatcaggctcatgtaaacagctgtcccttggcctcgtttggttgcaccgggatcagagagggctgaggggattaaatcatttccttaattttgaataggaaatgatttcatcccctataatcaccttcaatccctgccaaaccgaataaaccataagattttgtttggatactctcgtattt

SEQ ID NO: 202566 - DNA, 777 bp, Zea Mays
tgacgcccgcgtgaaaccagcgtctcgtgcatcctacggccaccggctttccccattttgtccttaactcaaacgcgcaagccaccccctcttcgcttccgttcctgtcctctcctctgtccctctacggtgcttctgctcgccggcccaaaatcgcctcatcgaccacgcccccttccaggctcccgtctccatgggtctcctctcaaacaggattgggagggagagcctcaaggcgggggatcatatctactcctggagggcggcgtgggtctacgcgcatcacggaatatatgtgggcgatgataaggtgatccatttcacaagaggaagaggacaggaggtcggaacaggaactgtcgtcgatattattcttgtgagttccaccccaaaacgaagcaacacgccttgcccggtgtgcaccgacgaaaccagcgacagcagcacagagacgaacggcgtggtatcctcctgcctcagctgcttcctagctgggggtgctctctaccgtttcgagtacgcagtcaacccggcgctcttcctcgccaaagcgcgaggagggacgtgcacgctcgctccctctgaccctgacgacacggtggctcgccgcgccagatacctgctgagcaacggtttcaggtgctacaacctgttcaagagcaactgcgaggacttcgcgatatactgcaagactggccttcttgtcgctgagcagggcgttgtcgggcagagcgggcaggctatctccatcatcgcagtgaggtcacgagaatctga

SEQ ID NO: 202567 - DNA, 2753 bp, Zea Mays
atgtgcctgttcctgtgcctgtgcgtgcgcctcctgcgtgtggcaatagcagcgggcagcggcagttggtcaccgtggtcgtggagtctgcagtgggctggaccctccctgccgcagttccgctgttggaccctccttgcccggctactgctgtaccctccaacaaggcaaaaagaagaacgaagctcacccaccctgcccatcggcctcatcacttccctcaaatccaccgatccccttccagaggttagggcctctgcgcccgatttcgtcccgcctcgccgatccacccgccgcaggtttggtacggatgggagccggcggcgcggggatcaggaatgtttcggtgcgtgggaggtgagagccgccggtgggcactgagggcctagggtttggttgaagagggagcaacgaaatggggggcttttgctccaaggggtcggcggtggacaagtcacccagcgacactacgctcggccccggccgggaggttgaccgccatgaccgtctagtggtgaaggaggagaagaaagctgtggtgggggaggctgctgccaagaggatgcaagaagagcaacatcaacagcagcagcagcagcagcagccagcagcgccaccactgcctgtatcggtgtcgcaaacggcagtgcctggagctaccgcggataacactgcagcaccatgggatggggtgccaccactggcacggttgccatctcagaagtcggggatgggtgtggcgaataaggtttcggaagtaagctcaattctgggtagagctagtactgctggccttggaaaagcagtggaagtgcttgacacacttggcagtagcatgacaaatttgaatataagtagttttggatcaggcactgcaacaaaggggaacaaaatatctattttagcatttgaggttgccaataccatagtcaaaggttgcagtctaatgcgcgccctttcaaaagatagcataaaacatttaaaagaaacagtgcttcactctgaaggtgttcagaatcttatatccaaagatatggatgagttactcaagattgctgctgctgacaaaagggaagagttgaaagtgttctctacagaagttgttcgctttggaaatcgttgcaaggatcctcagtggcacaacttggaccgctactttgataagttgacatcagaacagactcctcaacatcaactgaaagaagaggcagaatcagtaatgcaggaattagtgacttctgttcagtttacagctgaactataccatgaaatgcatgccctggatagatttcaacaagattatcagcgtaaacagcatgaagaggatggttctagtgttgtgcaaagaggtgataacatgcacatactaaagcaggaagtgaaaagccaaagcaagcatgttaaaagtttgaggaaaaagtctctgtggtctaagaatttggaagaggtcatgggaaagcttgtggacattgtgcacttcttacatttggagatccataatgtatttgggcgttcagacagtgaagaatcacaggaacctaccaaacgacgtaatagattgggtccagcaggtcttgcactgcattatgcaaatatcatcagtcagattgatactcttgtttctcgttcaagctctgttcctccaaatacaagggatgcattataccaaagtttgccaccaaccataaagtcatctctccgttctaagctacactcctttggagttaaggaagagcttactgtttctcaaatcaaggctgaaatggagaagaccctgcggtggcttgtccctattgcaagtaacaccaccaaggctcaccatggtttcggttgggttggagagtgggcaaatactgggtcagatgtgaactgcaagccaaatgggcagatagacctgatccgaattgagacactgtaccacgctgacaaggagaagactgaagcatatatcctcgagcttgttatttggcttcatcatcttatcagcctatccaaaactgcaaatggtgaaaggtctccaatcaagtctcctgttcggtctcctacacaaagaggggcctcaatcacattatctccaaacaaaaacagcagcaattcatcacctcttctgacgcaagaagatcaagatatgctaagggatgtcaagtacaggaaattcatccctggtataagcaaaagccaggagtttgacactaaggaaaggcataataagcaaagcaggttaagcaaaagtaatagccattcaccaagcagtggcaaccggaaagagacgctatcaatcaggaggctgcttcctgtgatcgactttgagatcgacaggataaaagcccttgatatgatcgacagagttgacgatctgagagtacaatgatgaacctagattaagcaatggcaaagtctgaaaaatgcaccctcaatctatgatcctgaaaatcaagattgcttgaaagatacaagtaatcagctgagctgaattggcatgctgtcagcacttctgcagcaatgtccctgcttgaggtgaacaggcatcatggtgccagtttgaaggcaccacgagggttagagatggtggcagcatgttctggccaactttgtatgatatatggcagggttaataggaaagtgaaattttattgtaaaaagggatttgttgtgttacttagctcatgtacaaggaatacaagttttgagagggcggagggggatcaaagatctgactgtgtttcttgctgtttttgttagttctatcaaat

SEQ ID NO: 202568 - DNA, 842 bp, Zea Mays
cacagctagacgactggtgctccgtgcggtgccggtgcgggtgcgtgattcccttcctgattcttctctgtctccggtccggtggtccgctgctctgcgccttgtatggtcactggctcactcctcactgcctcactggtgcagtagtgcccctgctggctgcttggacatctataattttattctgttttcattttcctcccattctcgtcctccttctaacctgtccggttgcctgactttctctggtgctcggctggtccttgcttgctgttgctggtcgatctgcgcctctggtgctccggcttcgaaagccgttgaggtagccggagccgactgtacgttgtagcttatggaccttgacgcggcagcggaagcagaggaggaggagcgcagactcgaggactttaatgaggctgaggatgctaggttcttcattggtctcgtggtcggcccggttgtcatgagagatcctcacatggcagcagatggcttcacctacgaagctgacgctcttagatactggctcgacagcgggcatgcaacatctccagtaacaaacagaagtctttcgaatcgtgataccatccccaatcacgcactgcgttcggccatccaagaatacctccggcagaacgagctgcaagagccattttcacagtggcaggaggattttggagttgtcaattgataatcctagagtcaaggttatattcaacagcttacttatcttcataatcatatttaggacgtgtttgttttcttctagattatataagttggattatgatggaatgttaggaggatataatattattttgtgactacaaataagttaaaat

SEQ ID NO: 202569 - DNA, 556 bp, Zea Mays
tcggagctcagcagggagaaacgccctgatcttgagctcgacgtgtggagggtggttcagcctatgaaaaaggaagctccttcgccgttgtcgcaatcttttcggtccatctccgatggaagcggtagagctgctgccacgccatcctacttcctctgtccgatctctcaggttgtcatgagagatcctcacatggcagcagatggcttcacctacgaagctgacgctcttagatactggctcgacagcgggcatgcaacatctccagtaacaaacagaagtctttcgaatcgtgataccatccccaatcacgcactgcgttcggccatccaagaatacctccggcagaacgagctgcaagagccattttcacagtggcaggaggattttggagttgtcaattgataatcctagagtcaaggttatattcaacagcttacttatcttcataatcatatttaggacgtgtttgttttcttctagattatataagttggattatgatggaatgttaggaggatataatattattttgtgactacaaataagttaaaat

SEQ ID NO: 202570 - DNA, 973 bp, Zea Mays
gtgcgaccttgccagttctgcgcgcggttgggtatgaatgagataattgacaagtacaacacgcattctaaaaacctggggaaaacagaacagccttcgctggacttgaacttagagcatagcaaatatgcaaatttgaatgagcaacttgcggaagcaagccttcgactcaggcagatgagaggtgaagagcttgagggattgaatgttgaagaactccagcaattggagaagaacctggaatctggtctgcatagggtgcttcaaacaaagagtacgcagctggcagaggagaacatgcaactgaggaatcaagtatcccagatacccccagctggcaagcaagcagttgctgatactgaaaatgttattgctgaagaagggcaatcctctgaatcagtgatgactgcgttgcactctgggagttcacaggataatgatgatggttcggatgtatctctaaagttagggctgccttgcgttgcatggaagtaaacaggaaatgaggctccttgtcgattctgggtgtggatgtgggtggagctgcggcctcagcggataggcacttgtgtatggttttatggacgaccggcccccgactacgtactgcaataatcttgcattggaagcgagatcggttaacctgatttgtcatccttgtggcttcatgatgcgatgttccgcttgtaccgtttgctagcatgttaactgaatttttagaatcgcatatactttttgttcttatatatcactgtcgtactgctcgtaagatgtatctactttattctatccaatgttgtaacctatcacctgccaacttccctactgttttggcgcgccgcaagctgtgctcaagcatgcttcatgttatattcggaagttgtggtctgctctctgcatacatcctgaatgggcaccgttcaattttcagcaccgcatctttctctgaactttattctgagaaaaaataaca

SEQ ID NO: 202571 - DNA, 1058 bp, Zea Mays
gtctctcccagttatgcctttagcttgaaatatcaagtgatggtggaactcgatcttcacgggccatggatgatgacctccgtgaaatgaggttaagcctgttgaccgaaattgagaggaggaagcaagcagaagaaacacttgagatatggcagaaggaatggaagaagctgagtcaccacctatcacatgttgccttatcacttccatctccaagtatagctgaggatactgatgattcaagcgtcgatcctggtgctgagttgtgccagcaaataactgtttcacaacttgtagctgctgctatttcccaggattttgctcgtgctgaagttgcttcagagatggaagccgtgattgccacaaagaacttcgagattgcaaggctgtcggatagggtccagtactatgaagctgcaaacagggaaatgtcccaaagaaaccaagaagctatcgagacgtcaaggcaacaacgcaaggagcgtaagaagcgacagaagtggttctggggttcagttgggcttgcagtcacccttggtgccacggccattgcctggtcttatctaccttcatcgcagccccgagctagtgcagattcaaatagtaccgtcagtgactagagctaggatgaagatactccctccgtttctttttatttgtcgctggatagtgtaaaattgcactatccagcgacaaataaaaagaaacggagggagtatctcatttcagaagcctaacaaacctctaactatactcctagaggagaaaaaaaaaacgttgtataagttctcttttggtgatcgtccatgatcgctacaatcttcatttgctgctttgtatgtaaaaatgttgggtgggccatctccgtcaggattggctccattccaatcaccgtaaatctctgcatagatgattcatggttgagcaaataatacaaagggatgtggatatggttagtaatccatgcccaccgaccccactcgaggagttgattttgccaaccacagttttgttttgcttatcttttttgcagtccgtttagatccttgaaattaaat

SEQ ID NO: 202572 - DNA, 1873 bp, Zea Mays
gtcgtccttcggcgtcggtgccgggtccacgctgatgccagcgaggtgcagccgtctttgattcccctcctgtagctgcatcctcatgccgaccatcacgcactacgtgctggatcccttcctcgagacagggtcgcctgcgcaggccgagaaagccacgcccaagccgccgccctcgcctccagacaaggccacacctgtaccggtggctcctattagggcacagacgtcgccggcatcactctatgccacgcctgagagcaccaccttgcccgactcaccttcctcgttccccgggacctggtcgccgtacattatcaaccataagaggcggggggcctcccttgccaagaccgttcctcagggtgacgttggaagtgagggcagccagccaaagctcccagtgatactgcctgctctgcctaaagggggtgaacccactgcagtggaggagcctgagtttgcgtttcagcaatcagggaatgatcaagctgaaggtgacagtggtgtggacgaggcccccatcaatgggaaaaatgaaatgctgctgaagggcaagggacctgtgacagccaaaaatgagcacgagcagcctgagtttgagtttcaccgtggaaatcttgaagcactagtgaggcctgttaatgttggaaggcctttgattggcggagcacccaaaaatgatgagagtgacaccttccttgaacttcaggattccatgagtgtggctagcaatactgaaactgatgatgctggcacccaagagtggtggtggaaaccgagttcccctcttgggatctctgttggcacaccctgtgctgaattctatgatgcatttgaagaaatatcaagtgatggtggaactcgatcttcacgggccatggatgatgacctccgtgaaatgaggttaagcctgttgaccgaaattgagaggaggaagcaagcagaagaaacacttgagatatggcagaaggaatggaagaagctgagtcaccacctatcacatgttgccttatcacttccatctccaagtatagctgaggatactgatgattcaagcgtcgatcctggtgctgagttgtgccagcaaataactgtttcacaacttgtagctgctgctatttcccaggattttgctcgtgctgaagttgcttcagagatggaagccgtgattgccacaaagaacttcgagattgcaaggctgtcggatagggtccagtactatgaagctgcaaacagggaaatgtcccaaagaaaccaagaagctatcgagacgtcaaggcaacaacgcaaggagcgtaagaagcgacagaagtggttctggggttcagttgggcttgcagtcacccttggtgccacggccattgcctggtcttatctaccttcatcgcagccccgagctagtgcagattcaaatagtaccgtcagtgactagagctaggatgaagatactccctccgtttctttttatttgtcgctggatagtgtaaaattgcactatccagcgacaaataaaaagaaacggagggagtatctcatttcagaagcctaacaaacctctaactatactcctagaggagaaaaaaaaaacgttgtataagttctcttttggtgatcgtccatgatcgctacaatcttcatttgctgctttgtatgtaaaaatgttgggtgggccatctccgtcaggattggctccattccaatcaccgtaaatctctgcatagatgattcatggttgagcaaataatacaaagggatgtggatatggttagtaatccatgcccaccgaccccactcgaggagttgattttgccaaccacagttttgttttgcttatcttttttgcagtccgtttagatccttgaaattaaat

SEQ ID NO: 202573 - DNA, 1519 bp, Zea Mays
cgccgcagctgctaccggttccgaccccagcaacctcgacgccgcagctcagacggcggcggcgaaccctaaccctagctcctccgccgccgcctcctcctcggcgccctccgtcccgcccgccctcgcgccgaagaagaccgcgcaggaggaggcgctgctctccgaggagcgtcgcatcgacgagctcgacctcccacggcacgaggtggtgcggcgcctccgcgtgctgcgcgagcccgtcacgctgttcggggaggacgacgacgcccgcctcgcgcgcttcaagctcgtgctcaagtccggcgtcatcgacgacattgacgacatcgacatgaccgagggacagaccaacgacttcctccgcgacatgatcgagatgcgtaagcggcagaaggccgggagggacacctacgccaagggcaagagcaagcgtgtaggtgggggtgatggtggcgacgggggtgctgctggagacagtgcagatgatggggatggacacctacgccaagggcaagagcaagcgtgtaggtgggggtgatggtggcgacgggggtgccgctggagacagtgcagatgatggggatgccaaggggagcggcgatgatgctgacgcagacaaggactccaagaggatgaggaccaagtttgaggagctttgcaatgaagacaagattttggtgttcttcaagaagctgcttaatgagtggaaccaggaattggatgagatgactgagctagagaagcggacagcaaaggggaagtccatggttgcaacattcaagcagtgtgcacggtatctcagcccgctgtttgagttctgcagaaagaaggttcttcctgatgacatccgtcgagcattgcttgttattgtcgagtgttgcatgaagcgagattatttagcagcaatggaccaatatatcaagctggcaatcgggaatgcaccatggcccattggagttacaatggttggcatccacgagcgttctgcccgagaaaagatctacacaaacagcgtcgcccacatcatgaatgacgagaccactcgcaagtatcttcagtcaatcaagaggctcatgacgctttcccagcggcgttaccctgcactgccctcaaaatcagtggagttcaacagcctggcaaatgggagtgacctgcaggcgcttctatcggaagagaatggttcgggtaaagcttccgaggaaaggctccggttgatgccagcattgaaagagtgatgccttcgcagactagattggattacaagtagagcttgagatgcttgtgtaatatatacaatcaatcctgcctgtttttttttcttttcctgtttgtgctgaagagaaaagcaacagagttatgtatgctaattaaatcgctttaccgctacatctggtcaggcaaagtttttattaatatatctgccaattccggagaaccattttttactatttatcatcaagcagcagtcatgcttactgtattaatcaggtttggtgctatcctagttgtgtcagta

SEQ ID NO: 202574 - DNA, 1535 bp, Zea Mays
ctccagaagcgccgcgacgagcaccgccagctcctcgccaaggccggcacgtcggcgccctccgcgaattccgccgcagctgctaccggttccgaccccagcaacctcgacgccgcagctcagacggcggcggcgaaccctaaccctagctcctccgccgccgcctcctcctcggcgccctccgtcccgcccgccctcgcgccgaagaagaccgcgcaggaggaggcgctgctctccgaggagcgtcgcatcgacgagctcgacctcccacggcacgaggtggtgcggcgcctccgcgtgctgcgcgagcccgtcacgctgttcggggaggacgacgacgcccgcctcgcgcgcttcaagctcgtgctcaagtccggcgtcatcgacgacattgacgacatcgacatgaccgagggacagaccaacgacttcctccgcgacatgaccgagggacagaccaacgacttcctccgcgacatgatcgagatgcgcaagcggcagaagtccgggagggacacctacgccaagggcaagagcaagcgtgtaggtgggggtgatggtggcgacgggggtgccgctggagacagtgcagatgatggggatgccaaggggagcggcgatgatgctgacgcagacaaggactccaagaggatgaggaccaagtttgaggagctttgcaatgaagacaagattttggtgttcttcaagaagctgcttaatgagtggaaccaggaattggatgagatgactgagctagagaagcggacagcaaaggggaagtccatggttgcaacattcaagcagtgtgcacggtatctcagcccgctgtttgagttctgcagaaagaaggttcttcctgatgacatccgtcgagcattgcttgttattgtcgagtgttgcatgaagcgagattatttagcagcaatggaccaatatatcaagctggcaatcgggaatgcaccatggcccattggagttacaatggttggcatccacgagcgttctgcccgagaaaagatctacacaaacagcgtcgcccacatcatgaatgacgagaccactcgcaagtatcttcagtcaatcaagaggctcatgacgctttcccagcggcgttaccctgcactgccctcaaaatcagtggagttcaacagcctggcaaatgggagtgacctgcaggcgcttctatcggaagagaatggttcgggtaaagcttccgaggaaaggctccggttgatgccagcattgaaagagtgatgccttcgcagactagattggattacaagtagagcttgagatgcttgtgtaatatatacaatcaatcctgcctgtttttttttcttttcctgtttgtgctgaagagaaaagcaacagagttatgtatgctaattaaatcgctttaccgctacatctggtcaggcaaagtttttattaatatatctgccaattccggagaaccattttttactatttatcatcaagcagcagtcatgcttactgtattaatcaggtttggtgctatcctagttgtgtcagta

SEQ ID NO: 202575 - DNA, 2561 bp, Zea Mays
ccatgaaaggccgctttgtcaaattgttcctaccatttttaagaaaaaagatcaatggaggcagctttgtcattctccaaggacagcccaccaatttcgataatttgtgctgcaaagattgtgggtctacccctaaccatcaatcatagcctcgctgctggctcggcacccaccctacagtttgcttctggagaatcactccatggtgtcaacccaatcatcctctacattgctagaggtgcatcaattgcctccttatctggaaagaatgatattgagtttgggcatgttgttgaatggcttgaatatgcccccaccttcctttcaggctctgaatttgaaaatgcatgcttatttgttgatggattcttggcctcccggacctttctggttggtcatggcctgacaattgctgacattgcagtttggtcaaatcttgctggaattggtcagcggtgggagagtctaaggaaatcaaagaaataccaaaatcttgttcgctggttcaacagcatagattcagaatacaaagaggcactgaacgaagttgtggctgcatttgttgggaaacgaggtattggaaaatctcctgcacctagccttaaggagaaggtacatgactcaaaggacccatcagctccagaagttgatctccctggtgcaaaagttgggaaagtctgcgttcgttttgccccagagcctagtggttacctccatattgggcatgcaaaggctgcactattgaacaaatactttgctgaaagatatcaagggcgcttaatagttcgatttgatgacacaaacccttcaaaagaaagcaatgagtttgttgagaatcttttgaaagatattgagacgttggggatcaaatatgatgctgtcacatacacatctgattatttcccaaagctaatggaaatggctgagagtttgataaagcagggtaaagcatatattgatgacacaccaaaggagcaaatgaggaaagagaggatggacggtattgagtcaaggtgcagaaataataccgtggaggaaaatctctcattatggaaagagatggttaatggaactgaaaggggcatgcagtgctgtgtacggggtaaacttgacatgcaggatcctaacaagtcactcagggatcctgtttactaccgctgtaatactgatccacaccatcgtgttggttcgaagtacaaggtctatccaacatatgactttgcgtgcccatttgtcgatgcattggagggggtaacccatgctcttcgttccagtgaatatcatgacagaaatgcacaatattatcgaattcttcaagacatggggttgaggagagtggaaatttatgaattcagccgattgaatatggtttacactcttctaagcaagcgaaagcttctttggtttgtacaaaacaagaaggtcgaagattggacagacccacgttttcccactgtccaaggcatagtacgtcggggcttgaaggttgatgcattgatacagtttatactccaacagggtgcttcaaaaaatctgaatctcatggaatgggataaactctggacaatcaacaagaagataattgatccagtgtgcgcaaggcatactgctgtgctaaaagaccagcgtgtcatctttactcttacaaatggtccagaggagccatttgttcgaattttaccaagacataagaaatttgagggtgctggaaagaaggctacaacctttgccaacagaatttggctcgattatgctgatgcggcagctattagcaagggtgaggaagtaacccttatggattgggggaatgctattgttaaagagatcaaggtggagagtggagtaattactgaactagttggagaactgcatcttgaggggtctgtgaaaacaacaaaattgaagatcacatggctagcagatatagaggagctagttcccctttcattggttgaatttgattacctcatcagcaagaaaaagctagaggaagacgaggacttcctcgacaatctcaacccttgcactcgacgggaaatcccagcccttggagatgcgaacatgaggaacatcaagcgtggagaggtcatacagctcgagaggaaaggctactataggtgtgatgccccttttatcagatcgtccaaaccggtggtcctgtttgcgatcccagatggcaggcagcaggcctcgcttagctaggcatggtgaccaccttttgggcacatggaattcctgagttggcgatgagtattgttgcattgtacactttaatattgtactgtgattaggctttactcgcggtggatgtctttcaccgctagatggccagaggcatatcctgccaaccaagcagagcagccattttgattttggtctatgatacttttacctgcgcttgaatattcctatacttctctagcagggccttcgttattttgccgttagattatttttactgcgtcggctgctattttcttttgcccaggtattaatcaatcatggacgggcatggtatgtagctgtgatgagtaaatgcatgtggggaccctaaggttggg

SEQ ID NO: 202576 - DNA, 2235 bp, Zea Mays
cggccatccgggcaagtcacaactcactagtcaccagtaactttaccaatccgcgccggtggtaaccctgccttcggcggcggctagccggtatccagtgtgcgcactccctctatctccctcttggcgacgactgggcggccgtcgctgctgccctacgccgtcttcgggctcttcgttgtcgacgagcgccacaaggttcctaccatttttaagaaaaaagatcaatggaggcagctttgtcattctccaaggacagcccaccaatttcgataatttgtgctgcaaagattgtgggtctacccctaaccatcaatcatagcctcgctgctggctcggcacccaccctacagtttgcttctggagaatcactccatggtgtcaacccaatcatcctctacattgctagaggtgcatcaattgcctccttatctggaaagaatgatattgagtttgggcatgttgttgaatggcttgaatatgcccccaccttcctttcaggctctgaatttgaaaatgcatgcttatttgttgatggattcttggcctcccggacctttctggttggtcatggcctgacaattgctgacattgcagtttggtcaaatcttgctggaattggtcagcggtgggagagtctaaggaaatcaaagaaataccaaaatcttgttcgctggttcaacagcatagattcagaatacaaagaggcactgaacgaagttgtggctgcatttgttgggaaacgaggtattggaaaatctcctgcacctagccttaaggagaaggtacatgactcaaaggacccatcagctccagaagttgatctccctggtgcaaaagttgggaaagtctgcgttcgttttgccccagagcctagtggttacctccatattgggcatgcaaaggctgcactattgaacaaatactttgctgaaagatatcaagggcgcttaatagttcgatttgatgacacaaacccttcaaaagaaagcaatgagtttgttgagaatcttttgaaagatattgagacgttggggatcaaatatgatgctgtcacatacacatctgattatttcccaaagctaatggaaatggctgagagtttgataaagcagggtaaagcatatattgatgacacaccaaaggagcaaatgaggaaagagaggatggacggtattgagtcaaggtgcagaaataataccgtggaggaaaatctctcattatggaaagagatggttaatggaactgaaaggggcatgcagtgctgtgtacggggtaaacttgacatgcaggatcctaacaagtcactcagggatcctgtttactaccgctgtaatactgatccacaccatcgtgttggttcgaagtacaaggtctatccaacatatgactttgcgtgcccatttgtcgatgcattggagggggtaacccatgctcttcgttccagtgaatatcatgacagaaatgcacaatattatcgaattcttcaagacatggggttgaggagagtggaaatttatgaattcagccgattgaatatggtttacactcttctaagcaagcgaaagcttctttggtttgtacaaaacaagaaggtcgaagattggacagacccacgttttcccactgtccaaggcatagtacgtcggggcttgaaggttgatgcattgatacagtttatactccaacagggtgcttcaaaaaatctgaatctcatggaatgggataaactctggacaatcaacaagaagataattgatccagtgtgcgcaaggcatactgctgtgctaaaagaccagcgtgtcatctttactcttacaaatggtccagaggagccatttgttcgaattttaccaagacataagaaatttgagggtgctggaaagaaggctacaacctttgccaacagaatttggctcgattatgctgatgcggcagctattagcaagggtgaggaagtaacccttatggattgggggaatgctattgttaaagagatcaaggtggagagtggagtaattactgaactagttggagaactgcatcttgaggggtctgtgaaaacaacaaaattgaagatcacatggctagcagatatagaggagctagttcccctttcattggttgaatttgattacctcatcagcaagaaaaagaagactatgctgcactgaatcaaattgcatgctgatttctacggcattttatcttctagatatgcagcaaaactgcagt

SEQ ID NO: 202577 - DNA, 2018 bp, Zea Mays
gttcaggctccacacttgacagggcacagggcagggcgccaggagacggggagaatctttcgccctgaaaaaagagcaaagtgtcagccctttccccccggttcctagttttggtactactacaggctcccgctgcatcatccccaacgaaccagcagagctcgcaagcaacaaaagagaaggacgaagcaggcgcagccgccacacggacacgcagcagagcatcgccgcagcggtccagaggcatgggggccgccgccgccgcaaagcacgccgtgagtccctcgccccgcgtacggcgtacgtgtacgtaacgtaacctcgtgagagccagccaaccgtctctggccgccgcaccgtgacgttttcactgcgaggaattggctgaattctcttgtgtactccaagtttggttccgttttggttgagttctccagcgctctgttcttgaagatggaaacggcaacacactgacaggaacttttctggtttctcttacttgcagttgcttttctggtttctcttacttgcagttgcaggttgtcgcggcgggaggagatgctgggcaatcgagcttcagcgccaactcaccccccaccaccggcgccgggttcgtcgccctcgacgtcggtgagctctcgtctctggccggcgacgccggccctccgggcacgcccatcgcgccgccccggacacccagggtggtgaggtcgctgtcgaggaagggcgacaggaagccggccgacgccgacgccaacgccaccgccggtggcggtagagagcggccgcagctgttcgtacacgtggctgccggcgacctcggggacgcgcccggcagcgcccggctggtcgtccacacgccgctggccggcacgcccggaagcaagtcccggcggttcggaaggcgggcggcgccgtggctcgatccccgcagggtggtcttcctcttcgccacgctccccaaggacacgttcgtttcgttgcggcagaacgatggcgatggcgatggccatgctcgcagtggcagggttgcagagcgcaggacggactgcccgcgtcgcaggttttgtcggccccagcctccgtcgggttgccgttgcagagctagctcgggggctctggcctctcggccgtcgtcgtcgccttcgcaacagcgacagcagtgataaataaggacggagaccgacgagcgaccgccgtggcgagcacgacgctgccgtgccgagtgcggcgccttagtgtttctcggtccatgtctcccgtcccgtccagcacatagtttcttgttattggaaaagtctgttcggatttctgaatccaagtccagaatttgatgtcttcagctagctgaaactctagtgtggcttacgcacgcccgttcctgatttctgcaggtccagcgtgggaacactgatcctcctctacttcacgctatccatgagcagggcggactccagtagcggcggcggcggcggcagcggcggcagcgacgcccggtgaaacgccagccgtctagagcgagggggcgtttggcctgatctgagaatttccagatctgcaaagatttacaagaacaccgtggtccaagcatatagaagaaaaggctgtggtgctgcgggcctatctcatggatgaatatagagcgagccaacgacagcgaagaagtcgagccggatgtggatttgatggagaagtttgtgatggtagacatcgagccaattgtatatttgggactctaaacatagtgtttcgcaatattgtcatccaaaagatttacttcacaaaaaagtgactacaaatatgttctaattgattatactaccatttactatataatcttctttttattacttctttccctatattttgtacctaaggaaaccaaattatcttgtgtgtacgttctgtctccacgacgccatggatgaccggccaccgtcttgcccacagccaccctgtaccccgtccaggccctcaggctcaccgagataattggatttttgccactcacattgttg

SEQ ID NO: 202578 - DNA, 1324 bp, Zea Mays
gttcaggctccacacttgacagggcacagggcagggcgccaggagacggggagaatctttcgccctgaaaaaagagcaaagtgtcagccctttccccccggttcctagttttggtactactacaggctcccgctgcatcatccccaacgaaccagcagagctcgcaagcaacaaaagagaaggacgaagcaggcgcagccgccacacggacacgcagcagagcatcgccgcagcggtccagaggcatgggggccgccgccgccgcaaagcacgccttgcaggttgtcgcggcgggaggagatgctgggcaatcgagcttcagcgccaactcaccccccaccaccggcgccgggttcgtcgccctcgacgtcggtgagctctcgtctctggccggcgacgccggccctccgggcacgcccatcgcgccgccccggacacccagggtggtgaggtcgctgtcgaggaagggcgacaggaagccggccgacgccgacgccaacgccaccgccggtggcggtagagagcggccgcagctgttcgtacacgtggctgccggcgacctcggggacgcgcccggcagcgcccggctggtcgtccacacgccgctggccggcacgcccggaagcaagtcccggcggttcggaaggcgggcggcgccgtggctcgatccccgcagggtggtcttcctcttcgccacgctgtccagcgtgggaacactgatcctcctctacttcacgctatccatgagcagggcggactccagtagcggcggcggcggcggcagcggcggcagcgacgcccggtgaaacgccagccgtctagagcgagggggcgtttggcctgatctgagaatttccagatctgcaaagatttacaagaacaccgtggtccaagcatatagaagaaaaggctgtggtgctgcgggcctatctcatggatgaatatagagcgagccaacgacagcgaagaagtcgagccggatgtggatttgatggagaagtttgtgatggtagacatcgagccaattgtatatttgggactctaaacatagtgtttcgcaatattgtcatccaaaagatttacttcacaaaaaagtgactacaaatatgttctaattgattatactaccatttactatataatcttctttttattacttctttccctatattttgtacctaaggaaaccaaattatcttgtgtgtacgttctgtctccacgacgccatggatgaccggccaccgtcttgcccacagccaccctgtaccccgtccaggccctcaggctcaccgagataattggatttttgccactcacattgttg

SEQ ID NO: 202579 - DNA, 2688 bp, Zea Mays
gttcaggctccacacttgacagggcacagggcagggcgccaggagacggggagaatctttcgccctgaaaaaagagcaaagtgtcagccctttccccccggttcctagttttggtactactacaggctcccgctgcatcatccccaacgaaccagcagagctcgcaagcaacaaaagagaaggacgaagcaggcgcagccgccacacggacacgcagcagagcatcgccgcagcggtccagaggcatgggggccgccgccgccgcaaagcacgccttgcaggttgtcgcggcgggaggagatgctgggcaatcgagcttcagcgccaactcaccccccaccaccggcgccgggttcgtcgccctcgacgtcggtgagctctcgtctctggccggcgacgccggccctccgggcacgcccatcgcgccgccccggacacccagggtggtgaggtcgctgtcgaggaagggcgacaggaagccggccgacgccgacgccaacgccaccgccggtacgtcagtccaaacgattagtggcggtagagagcggccgcagctgttcgtacacgtggctgccggcgacctcggggacgcgcccggcagcgcccggctggtcgtccacacgccgctggccggcacgcccggaagcaagtcccggcggttcggaaggcgggcggcgccgtggctcgatccccgcagggtggtcttcctcttcgccacgctgtaaggaaactgtccccttcggttgtcagtccttacgatttctaagtttagaattaaaaaaaattagaaaagaaagaaaacatatactatgacatatatcacctcaacatggtaaaagtggcattacgtaatggctgttaacttgtcataatttgcctaatttttgtgcttaagtttaaacttatttctttaattaaaatgactaaccttaaataaagtgtggcacacttagccacaaattaaacagcatgtacgtcttacagttattgcccgtgctggtagcttaggctaatcaccatgaggtttcatgaggtgttttatgtattaattagccttccacgtcagctatttagatgacatgttacatcatttaagaaggaagagttttatgaagtttcatagggatgaaaccatgttaacccattttcaatgtcttggaaactatgtgaaacctccactgagagtgttttgtttcatcttcatatatttgagtaaatcctattggttatttatatgcagcatttaagaagtatgttgacatatgaaatagtgagatgaaactctttattaagagagagtgtttcatttatccataaagttgatgtggtatttttggaaacagagacataacatcctcactgtgacttgccttagtgtgtggcaaaagtggcagttgtgattaatactcctacatgaagtacccagacgcttaggctagcggccctagcgcagttaagcgagcctgccctgaacaagctacggagtgacagtgaacgccagtaaattctccagtgtaccatcttcagtgagtcagtagcgcgtacagagtacacaaccaaacccaccaacaaatgggttccatcaattctatgcgatggatctcttatcaaaatgcactgttccgcagccccaaggacacgttcgtttcgttgcggcagaacgatggcgatggcgatggccatgctcgcagtggcagggttgcagagcgcaggacggactgcccgcgtcgcaggttttgtcggccccagcctccgtcgggttgccgttgcagagctagctcgggggctctggcctctcggccgtcgtcgtcgccttcgcaacagcgacagcagtgataaataaggacggagaccgacgagcgaccgccgtggcgagcacgacgctgccgtgccgagtgcggcgccttagtgtttctcggtccatgtctcccgtcccgtccagcacatagtttcttgttattggaaaagtctgttcggatttctgaatccaagtccagaatttgatgtcttcagctagctgaaactctagtgtggcttacgcacgcccgttcctgatttctgcaggtccagcgtgggaacactgatcctcctctacttcacgctatccatgagcagggcggactccagtagcggcggcggcggcggcagcggcggcagcgacgcccggtgaaacgccagccgtctagagcgagggggcgtttggcctgatctgagaatttccagatctgcaaagatttacaagaacaccgtggtccaagcatatagaagaaaaggctgtggtgctgcgggcctatctcatggatgaatatagagcgagccaacgacagcgaagaagtcgagccggatgtggatttgatggagaagtttgtgatggtagacatcgagccaattgtatatttgggactctaaacatagtgtttcgcaatattgtcatccaaaagatttacttcacaaaaaagtgactacaaatatgttctaattgattatactaccatttactatataatcttctttttattacttctttccctatattttgtacctaaggaaaccaaattatcttgtgtgtacgttctgtctccacgacgccatggatgaccggccaccgtcttgcccacagccaccctgtaccccgtccaggccctcaggctcaccgagataattggatttttgccactcacattgttg

SEQ ID NO: 202580 - DNA, 1355 bp, Zea Mays
gttgttcaggctccacacttgacagggcacagggcagggcgccaggagacggggagaatctttcgccctgaaaaaagagcaaagtgtcagccctttccccccggttcctagttttggtactactacaggctcccgctgcatcatccccaacgaaccagcagagctcgcaagcaacaaaagagaaggacgaagcaggcgcagccgccacacggacacgcagcagagcatcgccgcagcggtccagaggcatgggggccgccgccgccgcaaagcacgccttgcttttctggtttctcttacttgcagttgcaggttgtcgcggcgggaggagatgctgggcaatcgagcttcagcgccaactcaccccccaccaccggcgccgggttcgtcgccctcgacgtcggtgagctctcgtctctggccggcgacgccggccctccgggcacgcccatcgcgccgccccggacacccagggtggtgaggtcgctgtcgaggaagggcgacaggaagccggccgacgccgacgccaacgccaccgccggtggcggtagagagcggccgcagctgttcgtacacgtggctgccggcgacctcggggacgcgcccggcagcgcccggctggtcgtccacacgccgctggccggcacgcccggaagcaagtcccggcggttcggaaggcgggcggcgccgtggctcgatccccgcagggtggtcttcctcttcgccacgctgtccagcgtgggaacactgatcctcctctacttcacgctatccatgagcagggcggactccagtagcggcggcggcggcggcagcggcggcagcgacgcccggtgaaacgccagccgtctagagcgagggggcgtttggcctgatctgagaatttccagatctgcaaagatttacaagaacaccgtggtccaagcatatagaagaaaaggctgtggtgctgcgggcctatctcatggatgaatatagagcgagccaacgacagcgaagaagtcgagccggatgtggatttgatggagaagtttgtgatggtagacatcgagccaattgtatatttgggactctaaacatagtgtttcgcaatattgtcatccaaaagatttacttcacaaaaaagtgactacaaatatgttctaattgattatactaccatttactatataatcttctttttattacttctttccctatattttgtacctaaggaaaccaaattatcttgtgtgtacgttctgtctccacgacgccatggatgaccggccaccgtcttgcccacagccaccctgtaccccgtccaggccctcaggctcaccgagataattggatttttgccactcacattgttg

SEQ ID NO: 202581 - DNA, 1562 bp, Zea Mays
ccaacatgttgttcaggctccacacttgacagggcacagggcagggcgccaggagacggggagaatctttcgccctgaaaaaagagcaaagtgtcagccctttccccccggttcctagttttggtactactacaggctcccgctgcatcatccccaacgaaccagcagagctcgcaagcaacaaaagagaaggacgaagcaggcgcagccgccacacggacacgcagcagagcatcgccgcagcggtccagaggcatgggggccgccgccgccgcaaagcacgccgtgagtccctcgccccgcgtacggcgtacgtgtacgtaacgtaacctcgtgagagccagccaaccgtctctggccgccgcaccgtgacgttttcactgcgaggaattggctgaattctcttgtgtactccaagtttggttccgttttggttgagttctccagcgctctgttcttgaagatggaaacggcaacacactgacaggaacttttctggtttctcttacttgcagttgcttttctggtttctcttacttgcagttgcaggttgtcgcggcgggaggagatgctgggcaatcgagcttcagcgccaactcaccccccaccaccggcgccgggttcgtcgccctcgacgtcggtgagctctcgtctctggccggcgacgccggccctccgggcacgcccatcgcgccgccccggacacccagggtggtgaggtcgctgtcgaggaagggcgacaggaagccggccgacgccgacgccaacgccaccgccggtacgtcagtccaaacgattagtggcggtagagagcggccgcagctgttcgtacacgtggctgccggcgacctcggggacgcgcccggcagcgcccggctggtcgtccacacgccgctggccggcacgcccggaagcaagtcccggcggttcggaaggcgggcggcgccgtggctcgatccccgcagggtggtcttcctcttcgccacgctggcggactccagtagcggcggcggcggcggcagcggcggcagcgacgcccggtgaaacgccagccgtctagagcgagggggcgtttggcctgatctgagaatttccagatctgcaaagatttacaagaacaccgtggtccaagcatatagaagaaaaggctgtggtgctgcgggcctatctcatggatgaatatagagcgagccaacgacagcgaagaagtcgagccggatgtggatttgatggagaagtttgtgatggtagacatcgagccaattgtatatttgggactctaaacatagtgtttcgcaatattgtcatccaaaagatttacttcacaaaaaagtgactacaaatatgttctaattgattatactaccatttactatataatcttctttttattacttctttccctatattttgtacctaaggaaaccaaattatcttgtgtgtacgttctgtctccacgacgccatggatgaccggccaccgtcttgcccacagccaccctgtaccccgtccaggccctcaggctcaccgagataattggatttttgccactcacattgttg

SEQ ID NO: 202582 - DNA, 870 bp, Zea Mays
aatatgaacaaatatgcatgcttcaaaggaatacatgggagaggttggagctaattttgaggtttatcgcaatgatgagatcactgtggaagaaattaagaagatttctcctagaggaatacttatttccccaggccctggcactcctcaagattcaggaatatccttgcaaacagttacagagcttgggccctcaataccgttgtttggggtttgcatgggtttacagtgcattggagaggcatttggagggaaggttgttcgatccccttacggcgttgtgcacggaaagggctcccttgttcattatgatgagaaacttgatggaactctgttttatgatattcctaacccattccaggctggaaggtatcacagccttgtaatcgagaaggatagtttcccgcatgataccctggaaattgttgcgtggacagatgatgggttgatcatggctgctcgccacaggatatacaaacatattcagggcgtgcagttccatccggagagcatcataactactgaagggaggctcatggtcaacaattttatcaagattattgaaggctacgaagcctcgaattgctctccgtgatttatctagttggaagcagcagcagccctgcgtggggcgggtgacaataagatgatgtaaaagcttgtaactacatagctcgaacatgtaaactcagatgtatatgttcggatgtcacaaactcacgacactcagagtccaactactgtacatggtcgcatgtggcgtgtcgatgtcaaatcaaatcattgaacttttagctcggtgaccgctatatttgtttttttacagtagttaccactatatttgttcatttggcatctaattccttgttc

SEQ ID NO: 202583 - DNA, 1210 bp, Zea Mays
ggcactgtcccccttccaccaaacgcgagaaacttgattccaggcagcaacccctcttccattccattcccgccgaccccgacgccgccctgtctcctcggctcctctctccgatccaatggcctacgccgcacgcctcgtagccaaggtccacctcgccgcgacgccgcaggccgagccgcgccacctctccagcttccgcgtaggagcactcagtcgatccacaaccgttcaacggcaaaagtttgttgctaaatctgctatctcggctgtggaaagtggtgatacatttgttggagtaaagcaaaatactagacctatcatagtcatagacaactatgatagcttcacatataatttatgccagtacatgggagaggttggagctaattttgaggtttatcgcaatgatgagatcactgtggaagaaattaagaagttggatttctcctagaggaatacttatttccccaggccctggcactcctcaagattcaggaatatccttgcaaacagttacagagcttgggccctcaataccgttgtttggggtttgcatgggtttacagtgcattggagaggcatttggagggaaggttgttcgatccccttacggcgttgtgcacggaaagggctcccttgttcattatgatgagaaacttgatggaactctgttttatgatattcctaacccattccaggctggaaggtatcacagccttgtaatcgagaaggatagtttcccgcatgataccctggaaattgttgcgtggacagatgatgggttgatcatggctgctcgccacaggatatacaaacatattcagggcgtgcagttccatccggagagcatcataactactgaagggaggctcatggtcaacaattttatcaagattattgaaggctacgaagcctcgaattgctctccgtgatttatctagttggaagcagcagcagccctgcgtggggcgggtgacaataagatgatgtaaaagcttgtaactacatagctcgaacatgtaaactcagatgtatatgttcggatgtcacaaactcacgacactcagagtccaactactgtacatggtcgcatgtggcgtgtcgatgtcaaatcaaatcattgaacttttagctcggtgaccgctatatttgtttttttacagtagttaccactatatttgttcatttggcatctaattccttgttc

SEQ ID NO: 202584 - DNA, 1327 bp, Zea Mays
taccttggtactgttgccacaatggacaaaagaagagctacacttattataaatgcattggagaagagaaaccataacttgactatatactgaacacccatcatcactatgatcatactggtggaaacttggaattgaaagaaaaatatggtgcaaaggtaaattgttctgagaaggataaggacataatacatggtattgacatcattcttaaggagggtgacacatggatgtttgctggccattcggttcttgtactagaaactcctaggcatacagcaggtcatggctgctattattttgctggttgtggagctatatcgacaggagcactcagtcgatccacaaccgttcaacggcaaaagtttgttgctaaatctgctatctcggctgtggaaagtggtgatacatttgttggagtaaagcaaaatactagacctatcatagtcatagacaactatgatagcttcacatataatttatgccagtacatgggagaggttggagctaattttgaggtttatcgcaatgatgagatcactgtggaagaaattaagaagatttctcctagaggaatacttatttccccaggccctggcactcctcaagattcaggaatatccttgcaaacagttacagagcttgggccctcaataccgttgtttggggtttgcatgggtttacagtgcattggagaggcatttggagggaaggttgttcgatccccttacggcgttgtgcacggaaagggctcccttgttcattatgatgagaaacttgatggaactctgttttatgatattcctaacccattccaggctggaaggtatcacagccttgtaatcgagaaggatagtttcccgcatgataccctggaaattgttgcgtggacagatgatgggttgatcatggctgctcgccacaggatatacaaacatattcagggcgtgcagttccatccggagagcatcataactactgaagggaggctcatggtcaacaattttatcaagattattgaaggctacgaagcctcgaattgctctccgtgatttatctagttggaagcagcagcagccctgcgtggggcgggtgacaataagatgatgtaaaagcttgtaactacatagctcgaacatgtaaactcagatgtatatgttcggatgtcacaaactcacgacactcagagtccaactactgtacatggtcgcatgtggcgtgtcgatgtcaaatcaaatcattgaacttttagctcggtgaccgctatatttgtttttttacagtagttaccactatatttgttcatttggcatctaattccttgttc

SEQ ID NO: 202585 - DNA, 1370 bp, Zea Mays
cctcacggccaaagcagatcagatgagatttttttggtcttgtgtggaggataaaagaagacactaccttggtactgttgccacaatggacaaaagaagagtagtgttgtgagaaaatcatcagtcctgttcacaatccaattcactatggctaaaatatcaaacttatgccccttgagagtatactccttctaacttctcaggctacacttattataaatgcattggagaagagaaaccataacttgactatatactgaacacccatcatcactatgatcatactggtggaaacttggaattgaaagaaaaatatggtgcaaaggtcatggctgctattattttgctggttgtggagctatatcgacaggagcactcagtcgatccacaaccgttcaacggcaaaagtttgttgctaaatctgctatctcggctgtggaaagtggtgatacatttgttggagtaaagcaaaatactagacctatcatagtcatagacaactatgatagcttcacatataatttatgccagtacatgggagaggttggagctaattttgaggtttatcgcaatgatgagatcactgtggaagaaattaagaagatttctcctagaggaatacttatttccccaggccctggcactcctcaagattcaggaatatccttgcaaacagttacagagcttgggccctcaataccgttgtttggggtttgcatgggtttacagtgcattggagaggcatttggagggaaggttgttcgatccccttacggcgttgtgcacggaaagggctcccttgttcattatgatgagaaacttgatggaactctgttttatgatattcctaacccattccaggctggaaggtatcacagccttgtaatcgagaaggatagtttcccgcatgataccctggaaattgttgcgtggacagatgatgggttgatcatggctgctcgccacaggatatacaaacatattcagggcgtgcagttccatccggagagcatcataactactgaagggaggctcatggtcaacaattttatcaagattattgaaggctacgaagcctcgaattgctctccgtgatttatctagttggaagcagcagcagccctgcgtggggcgggtgacaataagatgatgtaaaagcttgtaactacatagctcgaacatgtaaactcagatgtatatgttcggatgtcacaaactcacgacactcagagtccaactactgtacatggtcgcatgtggcgtgtcgatgtcaaatcaaatcattgaacttttagctcggtgaccgctatatttgtttttttacagtagttaccactatatttgttcatttggcatctaattccttgttc

SEQ ID NO: 202586 - DNA, 2571 bp, Zea Mays
gcaaaacgcaaaccagaccggagtaccggatttggacgggcggaggttggagaaaagttagccgccggtagcgagtaccccaccagtcagtgaaacatatgagcggctatgggtacctgacgccacgtccccgcaacttcacaccgaacagcagaggaagaagagagcaaagagagaagaagaggaagacgcggcgcgctcccctttccagtccccatccccggctggtatcgccgggagtaagacgggaccgtcgggacgaagccaccggcgcgacatggaggccaagccgtcttcagcggcacatggtgacgcgcccgcggtcgaggccccccgccgccgtggcagcggcggtaagcgcaagtcggccgggtcctcgttcacgccgtcgaagcggcaggccaaggagcggaacgctgccttccacgtgccccagcatcttcttcacagcgggccgctcacccgcgccgcgcgccactcgccgcacaagctcgcgggcactccgccggagtcggggccagcgtcatcgtcggccgcaactggagacggggtgagcggtgggcaggcggaggttgatgcgatccggcccgagacggaggagacgccggccccagagctgccgctggtggacgagatgttggaggcggtccgatcccgtggccctggcgtccatgtggtccctacctttgctggatggttttcatggaaagaaatccactcggttgagaagcagatcttgccttctttttttaatggaaaatctgtgaagcggacacctgaggtgtatttggcgattagaaattcaatcatgatgaaatttcatgccaatcctcaattgcagctggagtccaaagatctggctgagttgtcaatcggagagagcgatgctcgacaggaagtcttggaattcttggaccattggggcttgataaatttccaccctttcccaccagctggacatgaagagagtaagccagaggagagccaagacaactctaatgatgagaaagcttctttgatcgagcagctgtttaaatttgaatcagttcaatcatatatgacacctttactgaacaaagaagatgtgggagctccaccccctctgcctagcttgtttcctgaacctgtactcattgaaaatatggttgcagcagctgagccttctgttgagtaccactgcaactcctgttcagttgattgctcacggaagcgctaccattgtcgaacccaggcagattttgacctctgttgtgtttgctataatgaagggaagttcgatccaggcatggccaaaactgatttcatcctcatggattctgcagaagtttcaggtgctagtggtactagttggactgatgaagagacattacttcttttagaaggtttggaaatttttggtggaaaatgggctgagattgctgaacatgttgctactaagacaaaagcacaatgcatgttgcactttcttcaaatgcaaatcgaagaccgcttccatgatggtgacgatattaatcaaaacatcccagtaagtacagagcaagccacaactgagaaagccattgttgaaacacctgagaaaatggaagttggagataaagtggaaggaagagataatgcggatgagaaggcctcggagaaaacagagggaagctgtgaagaaacaaaaactgaagatgcaaatgttgtaaataaagatactcagaaatcaggtggcaaagattcaggtgcatctccaagcactgaagaggcaaagcaatcttctgatgatcaacctatagtaaaggaaaattctgtagatgtagatacttctggtgaaaaactatcaaatgttgctattgatatcctaaaatgtgcatttgaggctgctggtcacagcccagaatatgaaggttcatttgctgatgcaggaaatccagttatagcactagcagcgtatttagctggtcttgtggaagatggtaacgctaccacttcattccgtagttcactaaaatctatatctgaggtgcctcctgcactccaattagcaagtaggcactgttttattcttgaggatccaccaaatgaactcaaagacatttgtgttagtgtaagtaagaaaaatacagatgctgatcaaacaaaagatgaggatatgatttcaaattcaatcgccaatgagaaaaaagagatcaatgagaaagaagataagtctttatctgtggaaaagacaaataattcatccatgtcacaaaatgaccatcaagaatcaaacattaagagtgtctcacgtgatgattgctcctcagtggagccaaaaggcaataatgctaaggagtcaagtgattcaactggtattggggatatgagtgcaatcggcactacaaaagatgttgttgcaggcaattctaaacaagtgaacgactcacctagtgttgaggtggaggctcctgatgactcttctttaaaaagcaaggatgagctcaatgatactgaagatgcagtggcgacaccagctaccgtacaggaacagaaacacagccaaacattggaaaatggtgataaggcagcgcacccgagaagacttcccgg

SEQ ID NO: 202587 - DNA, 3060 bp, Zea Mays
agcagaggaagaagagagcaaagagagaagaagaggaagacgcggcgcgctcccctttccagtccccatccccggctggtatcgccgggagtaagacgggaccgtcgggacgaagccaccggcgcgacatggaggccaagccgtcttcagcggcacatggtgacgcgcccgcggtcgaggccccccgccgccgtggcagcggcggtaagcgcaagtcggccgggtcctcgttcacgccgtcgaagcggcaggccaaggagcggaacgctgccttccacgtgccccagcatcttcttcacagcgggccgctcacccgcgccgcgcgccactcgccgcacaagctcgcgggcactccgccggagtcggggccagcgtcatcgtcggccgcaactggagacggggtgagcggtgggcaggcggaggttgatgcgatccggcccgagacggaggagacgccggccccagagctgccgctggtggacgagatgttggaggcggtccgatcccgtggccctggcgtccatgtggtccctacctttgctggatggttttcatggaaagaaatccactcggttgagaagcagatcttgccttctttttttaatggaaaatctgtgaagcggacacctgaggtgtatttggcgattagaaattcaatcatgatgaaatttcatgccaatcctcaattgcagctggagtccaaagatctggctgagttgtcaatcggagagagcgatgctcgacaggaagtcttggaattcttggaccattggggcttgataaatttccaccctttcccaccagctggacatgaagagagtaagccagaggagagccaagacaactctaatgatgagaaagcttctttgatcgagcagctgtttaaatttgaatcagttcaatcatatatgacacctttactgaacaaagaagatgtgggagctccaccccctctgcctagcttgtttcctgaacctgtactcattgaaaatatggttgcagcagctgagccttctgttgagtaccactgcaactcctgttcagttgattgctcacggaagcgctaccattgtcgaacccaggcagattttgacctctgttgtgtttgctataatgaagggaagttcgatccaggcatggccaaaactgatttcatcctcatggattctgcagaagtttcaggtgctagtggtactagttggactgatgaagagacattacttcttttagaaggtttggaaatttttggtggaaaatgggctgagattgctgaacatgttgctactaagacaaaagcacaatgcatgttgcactttcttcaaatgcaaatcgaagaccgcttccatgatggtgacgatattaatcaaaacatcccagtaagtacagagcaagccacaactgagaaagccattgttgaaacacctgagaaaatggaagttggagataaagtggaaggaagagataatgcggatgagaaggcctcggagaaaacagagggaagctgtgaagaaacaaaaactgaagatgcaaatgttgtaaataaagatactcagaaatcaggtggcaaagattcaggtgcatctccaagcactgaagaggcaaagcaatcttctgatgatcaacctatagtaaaggaaaattctgtagatgtagatacttctggtgaaaaactatcaaatgttgctattgatatcctaaaatgtgcatttgaggctgctggtcacagcccagaatatgaaggttcatttgctgatgcaggaaatccagttatagcactagcagcgtatttagctggtcttgtggaagatggtaacgctaccacttcattccgtagttcactaaaatctatatctgaggtgcctcctgcactccaattagcaagtaggcactgttttattcttgaggatccaccaaatgaactcaaagacatttgtgttagtgtaagtaagaaaaatacagatgctgatcaaacaaaagatgaggatatgatttcaaattcaatcgccaatgagaaaaaagagatcaatgagaaagaagataagtctttatctgtggaaaagacaaataattcatccatgtcacaaaatgaccatcaagaatcaaacattaagagtgtctcacgtgatgattgctcctcagtggagccaaaaggcaataatgctaaggagtcaagtgattcaactggtattggggatatgagtgcaatcggcactacaaaagatgttgttgcaggcaattctaaacaagtgaacgactcacctagtgttgaggtggaggctcctgatgactcttctttaaaaagcaaggatgagctcaatgatactgaagatgcagtggcgacaccagctaccgtacaggaacagaaacacagccaaacattggaaaatggtgataagaacctaacaatattgaacgtgtagttgtccatgagaagggctctatagtgactgccaaccaaaatgattccataactaggctcaaacgagcagcagccactgctgtttcagcagctgctgtcaaagctaagtttctcggtgatcaggaggaatatcatattcgaaggctgacagcacttatgattgaaaagctgttccagaaattagaagtgaagatgtcgttgttttcagagattgagcaggtggtccttcgaacaagagagtacaccgagaagaccagaaaaaaactcctaatggaacgaaatgcgattattgcagctcgtatgggtgcattgccgtctaggccaaaccagcctggtgtagccggcaacaggttaccacctggatatggcaaccctcctttgaggtctccaaacgcaatgccgcggccttccagctgaggaaaatccggattccggacacccagtggtctatactccattcatttagaagcatacggacctcaaaaacctcaaacctgccagtttgttgtagcattttttagaaagtacattgtacaattgcctgtataactgcttatatgaaaattcaccattttcacttaattttgatgcacttgcttctaccaaacctccgcaactgtttaaaccttccatcaacagca

SEQ ID NO: 202588 - DNA, 3043 bp, Zea Mays
gcaaagagagaagaagaggaagacgcggcgcgctcccctttccagtccccatccccggctggtatcgccgggagtaagacgggaccgtcgggacgaagccaccggcgcgacatggaggccaagccgtcttcagcggcacatggtgacgcgcccgcggtcgaggccccccgccgccgtggcagcggcggtaagcgcaagtcggccgggtcctcgttcacgccgtcgaagcggcaggccaaggagcggaacgctgccttccacgtgccccagcatcttcttcacagcgggccgctcacccgcgccgcgcgccactcgccgcacaagctcgcgggcactccgccggagtcggggccagcgtcatcgtcggccgcaactggagacggggtgagcggtgggcaggcggaggttgatgcgatccggcccgagacggaggagacgccggccccagagctgccgctggtggacgagatgttggaggcggtccgatcccgtggccctggcgtccatgtggtccctacctttgctggatggttttcatggaaagaaatccactcggttgagaagcagatcttgccttctttttttaatggaaaatctgtgaagcggacacctgaggtgtatttggcgattagaaattcaatcatgatgaaatttcatgccaatcctcaattgcagctggagtccaaagatctggctgagttgtcaatcggagagagcgatgctcgacaggaagtcttggaattcttggaccattggggcttgataaatttccaccctttcccaccagctggacatgaagagagtaagccagaggagagccaagacaactctaatgatgagaaagcttctttgatcgagcagctgtttaaatttgaatcagttcaatcatatatgacacctttactgaacaaagaagatgtgggagctccaccccctctgcctagcttgtttcctgaacctgtactcattgaaaatatggttgcagcagctgagccttctgttgagtaccactgcaactcctgttcagttgattgctcacggaagcgctaccattgtcgaacccagattttgacctctgttgtgtttgctataatgaagggaagttcgatccaggcatggccaaaactgatttcatcctcatggattctgcagaagtttcaggtgctagtggtactagttggactgatgaagagacattacttcttttagaaggtttggaaatttttggtggaaaatgggctgagattgctgaacatgttgctactaagacaaaagcacaatgcatgttgcactttcttcaaatgcaaatcgaagaccgcttccatgatggtgacgatattaatcaaaacatcccagtaagtacagagcaagccacaactgagaaagccattgttgaaacacctgagaaaatggaagttggagataaagtggaaggaagagataatgcggatgagaaggcctcggagaaaacagagggaagctgtgaagaaacaaaaactgaagatgcaaatgttgtaaataaagatactcagaaatcaggtggcaaagattcaggtgcatctccaagcactgaagaggcaaagcaatcttctgatgatcaacctatagtaaaggaaaattctgtagatgtagatacttctggtgaaaaactatcaaatgttgctattgatatcctaaaatgtgcatttgaggctgctggtcacagcccagaatatgaaggttcatttgctgatgcaggaaatccagttatagcactagcagcgtatttagctggtcttgtggaagatggtaacgctaccacttcattccgtagttcactaaaatctatatctgaggtgcctcctgcactccaattagcaagtaggcactgttttattcttgaggatccaccaaatgaactcaaagacatttgtgttagtgtaagtaagaaaaatacagatgctgatcaaacaaaagatgaggatatgatttcaaattcaatcgccaatgagaaaaaagagatcaatgagaaagaagataagtctttatctgtggaaaagacaaataattcatccatgtcacaaaatgaccatcaagaatcaaacattaagagtgtctcacgtgatgattgctcctcagtggagccaaaaggcaataatgctaaggagtcaagtgattcaactggtattggggatatgagtgcaatcggcactacaaaagatgttgttgcaggcaattctaaacaagtgaacgactcacctagtgttgaggtggaggctcctgatgactcttctttaaaaagcaaggatgagctcaatgatactgaagatgcagtggcgacaccagctaccgtacaggaacagaaacacagccaaacattggaaaatggtgataaggcagaacctaacaatattgaacgtgtagttgtccatgagaagggctctatagtgactgccaaccaaaatgattccataactaggctcaaacgagcagcagccactgctgtttcagcagctgctgtcaaagctaagtttctcggtgatcaggaggaatatcatattcgaaggctgacagcacttatgattgaaaagctgttccagaaattagaagtgaagatgtcgttgttttcagagattgagcaggtggtccttcgaacaagagagtacaccgagaagaccagaaaaaaactcctaatggaacgaaatgcgattattgcagctcgtatgggtgcattgccgtctaggccaaaccagcctggtgtagccggcaacaggttaccacctggatatggcaaccctcctttgaggtctccaaacgcaatgccgcggccttccagctgaggaaaatccggattccggacacccagtggtctatactccattcatttagaagcatacggacctcaaaaacctcaaacctgccagtttgttgtagcattttttagaaagtacattgtacaattgcctgtataactgcttatatgaaaattcaccattttcacttaattttgatgcacttgcttctaccaaacctccgcaactgtttaaaccttccatcaacagca

SEQ ID NO: 202589 - DNA, 3044 bp, Zea Mays
gcaaagagagaagaagaggaagacgcggcgcgctcccctttccagtccccatccccggctggtatcgccgggagtaagacgggaccgtcgggacgaagccaccggcgcgacatggaggccaagccgtcttcagcggcacatggtgacgcgcccgcggtcgaggccccccgccgccgtggcagcggcggtaagcgcaagtcggccgggtcctcgttcacgccgtcgaagcggcaggccaaggagcggaacgctgccttccacgtgccccagcatcttcttcacagcgggccgctcacccgcgccgcgcgccactcgccgcacaagctcgcgggcactccgccggagtcggggccagcgtcatcgtcggccgcaactggagacggggtgagcggtgggcaggcggaggttgatgcgatccggcccgagacggaggagacgccggccccagagctgccgctggtggacgagatgttggaggcggtccgatcccgtggccctggcgtccatgtggtccctacctttgctggatggttttcatggaaagaaatccactcggttgagaagcagatcttgccttctttttttaatggaaaatctgtgaagcggacacctgaggtgtatttggcgattagaaattcaatcatgatgaaatttcatgccaatcctcaattgcagctggagtccaaagatctggctgagttgtcaatcggagagagcgatgctcgacaggaagtcttggaattcttggaccattggggcttgataaatttccaccctttcccaccagctggacatgaagagagtaagccagaggagagccaagacaactctaatgatgagaaagcttctttgatcgagcagctgtttaaatttgaatcagttcaatcatatatgacacctttactgaacaaagaagatgtgggagctccaccccctctgcctagcttgtttcctgaacctgtactcattgaaaatatggttgcagcagctgagccttctgttgagtaccactgcaactcctgttcagttgattgctcacggaagcgctaccattgtcgaacccaggcagattttgacctctgttgtgtttgctataatgaagggaagttcgatccaggcatggccaaaactgatttcatcctcatggattctgcagaagtttcaggtgctagtggtactagttggactgatgaagagacattacttcttttagaaggtttggaaatttttggtggaaaatgggctgagattgctgaacatgttgctactaagacaaaagcacaatgcatgttgcactttcttcaaatgcaaatcgaagaccgcttccatgatggtgacgatattaatcaaaacatcccagtaagtacagagcaagccacaactgagaaagccattgttgaaacacctgagaaaatggaagttggagataaagtggaaggaagagataatgcggatgagaaggcctcggagaaaacagagggaagctgtgaagaaacaaaaactgaagatgcaaatgttgtaaataaagatactcagaaatcaggtggcaaagattcaggtgcatctccaagcactgaagaggcaaagcaatcttctgatgatcaacctatagtaaaggaaaattctgtagatgtagatacttctggtgaaaaactatcaaatgttgctattgatatcctaaaatgtgcatttgaggctgctggtcacagcccagaatatgaaggttcatttgctgatgcaggaaatccagttatagcactagcagcgtatttagctggtcttgtggaagatggtaacgctaccacttcattccgtagttcactaaaatctatatctgaggtgcctcctgcactccaattagcaagtaggcactgttttattcttgaggatccaccaaatgaactcaaagacatttgtgttagtgtaagtaagaaaaatacagatgctgatcaaacaaaagatgaggatatgatttcaaattcaatcgccaatgagaaaaaagagatcaatgagaaagaagataagtctttatctgtggaaaagacaaataattcatccatgtcacaaaatgaccatcaagaatcaaacattaagagtgtctcacgtgatgattgctcctcagtggagccaaaaggcaataatgctaaggagtcaagtgattcaactggtattggggatatgagtgcaatcggcactacaaaagatgttgttgcaggcaattctaaacaagtgaacgactcacctagtgttgaggtggaggctcctgatgactcttctttaaaaagcaaggatgagctcaatgatactgaagatgcagtggcgacaccagctaccgtacaggaacagaaacacagccaaacattggaaaatggtgataaggaacctaacaatattgaacgtgtagttgtccatgagaagggctctatagtgactgccaaccaaaatgattccataactaggctcaaacgagcagcagccactgctgtttcagcagctgctgtcaaagctaagtttctcggtgatcaggaggaatatcatattcgaaggctgacagcacttatgattgaaaagctgttccagaaattagaagtgaagatgtcgttgttttcagagattgagcaggtggtccttcgaacaagagagtacaccgagaagaccagaaaaaaactcctaatggaacgaaatgcgattattgcagctcgtatgggtgcattgccgtctaggccaaaccagcctggtgtagccggcaacaggttaccacctggatatggcaaccctcctttgaggtctccaaacgcaatgccgcggccttccagctgaggaaaatccggattccggacacccagtggtctatactccattcatttagaagcatacggacctcaaaaacctcaaacctgccagtttgttgtagcattttttagaaagtacattgtacaattgcctgtataactgcttatatgaaaattcaccattttcacttaattttgatgcacttgcttctaccaaacctccgcaactgtttaaaccttccatcaacagca

SEQ ID NO: 202590 - DNA, 3019 bp, Zea Mays
gcaaagagagaagaagaggaagacgcggcgcgctcccctttccagtccccatccccggctggtatcgccgggagtaagacgggaccgtcgggacgaagccaccggcgcgacatggaggccaagccgtcttcagcggcacatggtgacgcgcccgcggtcgaggccccccgccgccgtggcagcggcggtaagcgcaagtcggccgggtcctcgttcacgccgtcgaagcggcaggccaaggagcggaacgctgccttccacgtgccccagcatcttcttcacagcgggccgctcacccgcgccgcgcgccactcgccgcacaagctcgcgggcactccgccggagtcggggccagcgtcatcgtcggccgcaactggagacggggtgagcggtgggcaggcggaggttgatgcgatccggcccgagacggaggagacgccggccccagagctgccgctggtggacgagatgttggaggcggtccgatcccgtggccctggcgtccatgtggtccctacctttgctggatggttttcatggaaagaaatccactcggttgagaagcagatcttgccttctttttttaatggaaaatctgtgaagcggacacctgaggtgtatttggcgattagaaattcaatcatgatgaaatttcatgccaatcctcaattgcagctggagtccaaagatctggctgagttgtcaatcggagagagcgatgctcgacaggaagtcttggaattcttggaccattggggcttgataaatttccaccctttcccaccagctggacatgaagagagtaagccagaggagagccaagacaactctaatgatgagaaagcttctttgatcgagcagctgtttaaatttgaatcagttcaatcatatatgacacctttactgaacaaagaagatgtgggagctccaccccctctgcctagcttgtttcctgaacctgtactcattgaaaatatggttgcagcagctgagccttctgttgagtaccactgcaactcctgttcagttgattgctcacggaagcgctaccattgtcgaacccaggcagattttgacctctgttgtgtttgctataatgaagggaagttcgatccaggcatggccaaaactgatttcatcctcatggattctgcagaagtttcaggtgctagtggtactagttggactgatgaagagacattacttcttttagaaggtttggaaatttttggtggaaaatgggctgagattgctgaacatgttgctactaagacaaaagcacaatgcatgttgcactttcttcaaatgcaaatcgaagaccgcttccatgatggtgacgatattaatcaaaacatcccagtaagtacagagcaagccacaactgagaaagccattgttgaaacacctgagaaaatggaagttggagataaagtggaaggaagagataatgcggatgagaaggcctcggagaaaacagagggaagctgtgaagaaacaaaaactgaagatgcaaatgttgtaaataaagatactcagaaatcaggtggcaaagattcaggtgcatctccaagcactgaagaggcaaagcaatcttctgatgatcaacctatagtaaaggaaaattctgtagatgtagatacttctggtgaaaaactatcaaatgttgctattgatatcctaaaatgtgcatttgaggctgctggtcacagcccagaatatgaaggttcatttgctgatgcaggaaatccagttatagcactacgtatttagctggtcttgtggaagatggtaacgctaccacttcattccgtagttcactaaaatctatatctgaggtgcctcctgcactccaattagcaagtaggcactgttttattcttgaggatccaccaaatgaactcaaagacatttgtgttagtgtaagtaagaaaaatacagatgctgatcaaacaaaagatgaggatatgatttcaaattcaatcgccaatgagaaaaaagagatcaatgagaaagaagataagtctttatctgtggaaaagacaaataattcatccatgtcacaaaatgaccatcaagaatcaaacattaagagtgtctcacgtgatgattgctcctcagtggagccaaaaggcaataatgctaaggagtcaagtgattcaactggtattggggatatgagtgcaatcggcactacaaaagatgttgttgcaggcaattctaaacaagtgaacgactcacctagtgttgaggtggaggctcctgatgactcttctttaaaaagcaaggatgagctcaatgatactgaagatgcagtggcgacaccagctaccgtacaggaacagaaacacagccaaacattggaaaatggtgataaggcagttgtccatgagaagggctctatagtgactgccaaccaaaatgattccataactaggctcaaacgagcagcagccactgctgtttcagcagctgctgtcaaagctaagtttctcggtgatcaggaggaatatcatattcgaaggctgacagcacttatgattgaaaagctgttccagaaattagaagtgaagatgtcgttgttttcagagattgagcaggtggtccttcgaacaagagagtacaccgagaagaccagaaaaaaactcctaatggaacgaaatgcgattattgcagctcgtatgggtgcattgccgtctaggccaaaccagcctggtgtagccggcaacaggttaccacctggatatggcaaccctcctttgaggtctccaaacgcaatgccgcggccttccagctgaggaaaatccggattccggacacccagtggtctatactccattcatttagaagcatacggacctcaaaaacctcaaacctgccagtttgttgtagcattttttagaaagtacattgtacaattgcctgtataactgcttatatgaaaattcaccattttcacttaattttgatgcacttgcttctaccaaacctccgcaactgtttaaaccttccatcaacagca

SEQ ID NO: 202591 - DNA, 1106 bp, Zea Mays
aactgaatgctgatatgttacctttactccttgagagcaacaaggagaagtggcaattactgcaaatttgagggattcaccatgcaagattgaactgtcatctctggttcctcctaatggaccgccaagagcaacttttttctttccaaatggtgaagtctcaattaaagagaagattttggatgagcgtgacagaattttgtcagtaaatggcctagtgaagtcacgtgttctgcatggagtttgcacagctgtgtacaatgataatgtaatgagcattaaataccgctacaaggatgatgaggtatcgtttatccccagcatctcattaccatccaattctctgtcatttgcattcaagcgccaattaacgcctttggacaagttgagctattggtacaattttgacacaaactactggggcgccatctacaaacacaaggctcacaagcatctcaagtggaaagctggctatgagtcagacaacaggcttggatgggcatcgctttgggttggagatgctggcggcagtacaaaggaggcgcctttgaaagccaaaattcacctcacgcttaaagtcccccaggacaatatacagaattcagttgtagtgttccatgttaagaaaagatgggatttttagtttctatttgtgagctcagatggtgttacgtcatgcgcacataagcaagcgtgtacagatggagagccaataagagatggatgcaaatttgtgatgtggtctgcaaaattgtttcatgcaaatgttagggagaaatcatgtaatgttagtcctcttttataggttccgtttggttcaaggtcttgttaagggaatgctaaagagctcaaccaaacaaaagtattggtaactactagaggtgtaatccgatcgaatacagacgaatatcactgaaattaaatttgttattcggatccagattcgaatacagctagctttgaatacgaatacaatatagatgttcttggatataaatacggatagcgttagtaacagatatcgtgtaagacaccattctacatatatcataattcttgtaattatttagcccctctttcgagtctaaacatttttaagaattatg

SEQ ID NO: 202592 - DNA, 3579 bp, Zea Mays
gttccttgcggcccgaagcggtcacaacacctcgcatgcctctacggctctacgcctcccgctacacacccacacccaccacggcccaccttccgccttgcgactccaaaaccctccctccttccccttccttgccccgccctagggttcgcgccgccgcgctgaccctgtcgtagccatggggtcctcgctcccgcccaaggaagccaacctcttcaaagtcatcgtcatcctacgagactaagcaatataagaaagggcttaaggctgcagattccatattaaaaaagtttccagagcatggtgaaacactatcaatgaaaggtttgacgctaaactgcatggaccgaaaatctgaagcgtacgagcttgttcgacgaggcctgaagaatgatctgaagagtcatgtctgttggcatgtttatggtttgctttatcggtcagatagagaatacagagaagctataaaatgttacagaaatgcattgaggattgatccagataacatagaaattcttcgtgacttgtcccttctccaggcacagatgagggacttgtctggctttgttgagactaggcaacaacttttgtcgttaaagccaaatcaccgcatgaactggattggttttgcggttgctcatcatttgaattctaattcttccaaggcagtagaagtattggaggcatacgagggaacactggaagatgattatcctccagagaatgagcgatatgaacacaatgaaatgctgctgtataagatatcattgtttgaagaatgtgggatgctagacagagcccttgaggaaatgcagaagaaggagagcaaaattgttgacaagctatcattcaaagaacaaatggcatccgtcttgttcaaacttggccgctttgatgaatctgagagcatatacagatccctgctttttatgaatcctgataactacaaatacttcattgctgtgcaaaagtgccttggcttatactctgataatggtcaatattctgctgctgatgttgagcgcttaagtgcattgtacaactcacttaaagagaagtatgcttggtcatctgctgtgaagcgtatccctcttgattttctggaaggtgagaagttccaggaggcagcagacaactatgtcagacctctattaacaaagggtgtgccctcactattttccgatttaagcccactgtatgaacatcctggcaaggcaaacatactggagcagttatttcttaaactagaagattcaattagggattctggatgctttcctggatgtccacagaaggagcctccttccacactgttgtggaccctgtttttgatttctcagcactacgacagaagagggcaatatgacattgctttgaataaaatcgatgaggctatctcacatacaccgactgtcatcgatctatattcagtaaagggaaagatattgcaacatgctggaaatttcacagcagcagccgcattagcagatgaagctaggtccatggatcttgctgatcgttatttaaacagcgagtgtgttatgcagatgcttcaggctgaccaggttggccttgccgagaagactgctgtcttgtttacaaaagatggtgatcaacacaataatcttcatgacatgcagtgcatgtggtatgagcttgcttctggggagagctattaccgtcaaggtgatcttggccgggccctaaaaaatttcttggcagttgaaaagcattacgctgatatgactgaagatcaatttgacttccattcatattgcttgcggaaaatgacacttcgagcatatgtttctatgctgaagtttcaggatcgtttgcatgctcatgaatacttccacaaggctgctgctggagctatcaggtgctatatgaaactacatgattctccaacaaaatcttctaaggaagagaatgatgagatatcaaaactgccacctgctcagaggaagaagttgaggcaaaagcagaagaaagcagaagcgcgtgctaaaagggaggctgaagagaaacaagaggatgaaacagcttcatctaacagttcaaaatctggcaagaaacaacatgcaagaccagttgatctggatccacatggtgaaaaattaatccagattgaagacccgcttgcagaagccacaaaatacttgaagcttctgcagaataactcgtcagactcattagagacccatatactttcatttgagctaagcatgagaaagcaaaaggttttacttgctttccaggcagttaaacagctcattaaattggatgaagataatccagacagtcaccgttgtttgataaagttcttccacaagataaacagtcttcctggacctgtgactgattctgagaagctaatttggaatgttctggaagctgaacgacctgacatgaggcaattacatggaaagtccctcgttgaagtaaacagaagtttccttgaaaaacacaatgcttccttgatgcaccgagcagctggtgctgaaatgatgtatctcttagagccaaataagaagatggaggcaattaatttaattgaagattcaacaaatattacatcatcagggcatagtttgcttggtcctgtaaaaacatggcaaattcaagattgtattgatgttcataaattgctggagacagtctttggtgatcagaatgttgcaaataggtggaaggcacggtgcgcggaatattttccgtactcgacgtactttgaaggcatcaagagcgctatttcaacctatgccattgaccatagtctcgagagcccaccagaaaatggaattgcttcaaaccctcatctgaaatcaaaagatggagaacaagggagtttgaatgggactctgcatattgtagatgatttgagcagcctaagcattcggtaatgcacgaacaagttgctgaatggtcacaactggaacacaacattttagaactggagccagtacccaattaaccaaagcgtacacgaacaaggggaacaaagtgctctggtgcaagtagttgtcggcacatcacatatgaagagtatattattgattgggagctgaggtgtccagtcaggttattgtcttggttccagcctgtacctttttgttgccattttgtagacagggaaagaaaaaaaatcttccgtctcaattacggtgaagttgtgacagcgtttgttgcctagcgatatcagggtgtgaccattcgtttgaaacagtgctccctctctttttggactacaaaattttggcacaaagcaggtgtacaaggttaaaccttttaaaactttcatctatttgtttcgggatagtttggtgtgtgggggggtttgtcttgatcctttgtgctactgcaacatttggtcctcgacattgtaaattagttaatcttaaacatagaaactgtattccagttgtcatgacaaataatgatcaatgttaaccctgggtgtttgatctattccatttgggatgcgttgaaaagcatgcattgtcggatttgaagataaaaatccataatgttacatttattaatcatacttgtatagtgacccatgttaccttgctctga

SEQ ID NO: 202593 - DNA, 655 bp, Zea Mays
atcatcgccagcagttgctgtattttgggggttcaagcgcggctgtgaaggagagcttgtcaatgctgtaaatgaggaacaaaggaatgaaagccttatgaggttgtcatgggcccttgtgcactccaggcagacagacgatgtaaaccgtggaatcagcatgcttcaagcttctttggataattctgccagtcctctgcagactagggaaaagctgtacttgttggctgttggattctacaggattggcgactactcaaaaagcaggcaacttgcagatcgttgtttggagattcaagcggattggcggcaggccatatcgctgaagaaggcaatagaagataaaattgccaaaggtgagacaacatggtctgattggaataggaattgcgacaactgcggtcggacttctggttggtggaattgcagctgctgttgccaggaagaagtgaggccaatatattggatcggcagctcattgaactaggggagctcctgtctctgtaattccaacttttctgttgttaccttggtgatattacagttgaattgccactctttatatgtacgaagtgatcgtatgataatgataacaccattgtgacattatagctttcatcgatctgtcgttttattctcgccaaatggaccgcag

SEQ ID NO: 202594 - DNA, 527 bp, Zea Mays
atgattaaggctggttatagggcatgcagctctcatcctcatgaaatccattctgcactaccacctttccatcaagtattggttcgctttcctggatttggagttgaggaagctgaatggatcgatgttcgtacatgtactttgcggcaacgctcagtgccatacaaggccacagaatgtgcagatgttcatatttgggaccctgttctttgttacaaggacatcgtttccttgaagaagttgcgccgtcgatacgtagaatatgactacaaacctcaaacttcgtatgagctgccaaaaggaacgaaaatagcttaagtacaccatcaatttattgaagtgttcaatataatacctttctagaagattttgtatgttctgtgttacagtatatatatgttggtggctcatgagtcatgagcattgctacataatgcaaactaatattaattgtgataatacacaatttggagatgataagttggtctttgaatttaaggtggttattgtcggtgtttagagtccga

SEQ ID NO: 202595 - DNA, 657 bp, Zea Mays
tagacgtcggagtgaccgaaagagctcttcccatcggcctcggatctcaacgccctaacgggcactgggtccaactgtcgctccctgtaggacatcggcgagggcgcgaggcgacggtggcgacatcaccggcggcggcgaccgggtactactacaaggcaacgtttgatagaggacaagaggaactactccaagaagcagtctcatcgagaccaccagccggaagcagcagcagcaacgacggaggcggtcaaggccgcgccagcaccgccagtagttgaagcgaaggcggagccgcagccggagacaagaagcaaaccggaggcaggaaagggcggcttgttctcctgcttcccctgctgctgataagcaagcaaaatgcagcggccagcatgatgtctctgtaaatagccacttgggcgttagggtgcgaggaaatgtgagggtaagtgtaagggcaaggggtttccgggtacaaagatggtgttggaggttcttgcaatgcaaggaagtatatatatgtatgtatgtcgaattcagaatggcttacttgcttcactggcggtgcaaacgatctttttatgtactatggagacactgaacaattccaagtcaatttcgacgcttctataatgaatgccatctacagttcagttc

SEQ ID NO: 202596 - DNA, 1304 bp, Zea Mays
cacaaatcgcctagacgtcggagtgaccgaaagagctcttcccatcggcctcggatctcaacgccctaacgggcactgggtccaactgtcgctccctgtaggacatcggcgagggcgcgaggcgacggtggcgacatcaccggcggcggcgaccgggtactactacaaggcaacgcagggagagagagagacaccccagccgtccgagagcggtcgggcggctgtgctggtggaccaaaaatagcgagcgaccgtgccatgcatgccgcgcgctgacgaggcgttcggcacggctccgctccgcctccgctccaccaaccgaggattaggcgtcgtcgccccgtgccacaggcgccgcgcccagatcggtgaccggcggctggtgcgcgcgcgcgcgcatggcgttgcccctgcagaacggcctccccggcagggcgccggccacgccaccgccgacgcagctcatggaacggctctcgtcgtcagacggcagcgccgaggcagaggcggatgctgacaggatcccggcggcggtgttcgagcgggacccgtccgagtccaacaaggactggagcatgatgtccacggagtcggtgttcggcctccaggtcgcgccgtccagcgacttcaccggcttcttcctggcgcacccggagctcatggacatcgccacgccgccgcgcagcagcgccgtcatcgacgccgacaacgatgccaaggccgcccctgccatcgtctcgccgcccttcgagagcatcccagagctccccgagagcgccatgaaggggaactactccttcgccttcccaaatttgatagaggacaagaggaactactccaagaagcagtctcatcgagaccaccagccggaagcagcagcagcaacgacggaggcggtcaaggccgcgccagcaccgccagtagttgaagcgaaggcggagccgcagccggagacaagaagcaaaccggaggcaggaaagggcggcttgttctcctgcttcccctgctgctgataagcaagcaaaatgcagcggccagcatgatgtctctgtaaatagccacttgggcgttagggtgcgaggaaatgtgagggtaagtgtaagggcaaggggtttccgggtacaaagatggtgttggaggttcttgcaatgcaaggaagtatatatatgtatgtatgtcgaattcagaatggcttacttgcttcactggcggtgcaaacgatctttttatgtactatggagacactgaacaattccaagtcaatttcgacgcttctataatgaatgccatctacagttcagttc

SEQ ID NO: 202597 - DNA, 1703 bp, Zea Mays
ctaaggaaaacgtgcacatatttgtacgtgttctccgctagtaccgttcctcttcctcgtgcagggccaaataaagagcaggtaaatggaaaacaggcagataggaacgtagaagagaacacgatccttttttacagcctagaagagaagaattgcatcactacgacgctattccatccctcttgcatcaatcgaccccccttcaattcgatccatcgatctgatgttctgcagtttcaagctaaggagcctcctcttcctttggcgagctctaacgctggcgttggtctcctttatctcccaattcctctggtgaaccatcgctgcgacggcttggatttggttctgggttcgcagtctgcctcttgtgatgcatcaccatcgccggtggagggccgacgacgatgggatcaagggattactatgagatcctcaacgtcgaccggagcgccatcgatgacgacctccgcagggcctaccggcggctggccatgcggtggcaccccgataagaaccccgccggcaaggcagaggccgagacccggttcaaggagatcaccgaggcgtacaaccgacgcagacaagagggcggtgtacgaccagtacggggaggagggcctccggggagatgtgccgcagcccggcggcggcggaggcaccgacgacatcttcgcggagttcttcgggagcacgccgttcacgtactgcagcacggccagcagcgggaggcagcccccaccgcccccgaagtgggacagcgggtttggcagggcgttccggcgcgcccagggtggtggtggtggtgccgcgtcgtcgagaatggcgccgccgccgccgcccgtggagagcaggctggcgtgcaccctggaagagctctgcatgggcggcaccaagaagatgaggatctcccggaacttggtcgatgccagcgggtaaccaaactgaaaatgcgtagcaccaataggaggtaggcaaatatgtacgtgtgtcatcttgagccattgagcgcaggaagacgaagacagagtccgagattttgtggatcgaggtgaagcccggttggaagaagggcaccaaaatcacgttcgccggtaagggcaaccagcagtggaaccagctccccgccgatctggtcttcgtggtcgacgagaagccccaccccgtgtaccggcgtgacggcaacgacctgttggccgaggtccgtgtgacgctcgcccaggcgctgggcggcacggtcgtcgtcctcaccgcgctcgacggccgcgagctcgccgtcgacgtgggcggcggcggcgaggacgaggacgatgaggacgacgcgcccgtggtgtgccccggctacgagctggtgctgcctggcgaaggcatgcccatcgcgcgcgagcccgggcgccgaggcaacttaaggatccggttcgacgtcgcgttcccggagcggctcacgcgccggcagcgggcagagatcaagcgcgcgctcgaggacagtaccggtgtctgctagcaagtagcaatacaggtgtgatgtgtccgctgtccgcttggcgatgacagtgtggcgttgtgctcctgctgctgcgtgcgcctcgaacccttgaatatgggaaacagattcgtggcctcgtgggtgttgacgtccattttataaacactacactggaatgaactatttggtggtgctctctacaaggtgcggatggtttgtg

SEQ ID NO: 202598 - DNA, 904 bp, Zea Mays
atttggttacctgcatccggatctgatctagtagttactagtgcaacctagtggtgtgttcgggaacgtttccgagggcgggcggcggcccccagtggcgaagatgatccgactaccgacgtacgcagcaggaggcgtccgttgccatcttcttctcctttgagtatatgatactagcaacatccacagtatcaacattcgtgaagtatatattctatgttagtgacatgctaatggaaggtcaatgggagaaaaaggcagtgtatacattttacttggttcgtgagctatatgtgacttttcgcaacttcagaattcgcattgcagattatgtgcgctacagaaagatcacttccaacatgaatgaacgctttccagatgctacatcagaagagctcgatgtgagtgatgctacatgtattatttgccgtgaggaaatggctacagcaaagaaactgctcgatgggcatctgttccatgtgcattgtctaagagaaacaggagaacaggctgaagaagaggttcctctacggcttctccatgggagcttcagctccacaggaaggattctctctactgggacggtgccgtgctgcttgccccaatgtgcaagtagtgtcgaaggagcacaagatgatgtgtgagcacaaagtggccagcaagaatggagtcatggaacatcggcaggaggggtgcgacagcggcaaccgatgtatcccttggacaatctggttttgacatgatgcaaatcaatgtgctgtacattgtattctgcacttgcacagattgtttggctaattacaggattatctcaatgttttggtttggatttaaagtacacttatgtatgaaatatttattggtactcatctatattatattaattatattattattaaatata

SEQ ID NO: 202599 - DNA, 997 bp, Zea Mays
caatctccaggcctaggaaaaacaaccccggaccgcgtgcgtttcgcttccgcccctgctgtttctgtttcttggcgttcaccccctctttctctcgtggcgacgacgacgaccgtcgccttcccctacgcgctaggtgccagggtccgtcgggtccttcgctggcgacgggcaactaccaggcaacctagtggtgtgttcgggaacgtttccgagggcgggcggcggcccccagtggcgaagatgatccgactaccgacgtacgcagcaggaggcgtccgttgccatcttcttctcctttgagtatatgatactagcaacatccacagtatcaacattcgtgaagtatatattctatgttagtgacatgctaatggaagaattcgcattgcagattatgtgcgctacagaaagatcacttccaacatgaatgaacgctttccagatgctacatcagaagagctcgatgtgagtgatgctacatgtattatttgccgtgaggaaatggctacagcaaagaaactgctcgatgggcatctgttccatgtgcattgtctaagagaaacaggagaacaggctgaagaagaggttcctctacggcttctccatgggagcttcagctccacaggaaggattctctctactgggacggtgccgtgctgcttgccccaatgtgcaagggttattgtatattaacaaccaacagtagtgtcgaaggagcacaagatgatgtgtgagcacaaagtggccagcaagaatggagtcatggaacatcggcaggaggggtgcgacagcggcaaccgatgtatcccttggacaatctggttttgacatgatgcaaatcaatgtgctgtacattgtattctgcacttgcacagattgtttggctaattacaggattatctcaatgttttggtttggatttaaagtacacttatgtatgaaatatttattggtactcatctatattatattaattatattattattaaatata

SEQ ID NO: 202600 - DNA, 812 bp, Zea Mays
cccaggcctaatccaatctccaggcctaggaaaaacaaccccggaccgcgtgcgtttcgcttccgcccctgctgtttctgtttcttggcgttcaccccctctttctctcgtggcgacgacgacgaccgtcgccttcccctacgcgctaggtgccagggtccgtcgggtccttcgctggcgacgggcaactaccaggcaacctagtggtgtgttcgggaacgtttccgagggcgggcggcggcccccagtggcgaagatgatccgactaccgacgtacgcagcaggaggcgtccgttgccatcttcttctcctttgagtatatgatactagcaacatccacagtatcaacattcgtgaagtatatattctatgttagtgacatgctaatggaaggtcaatgggagaaaaaggcagtgtatacattttacttggttcgtgagctatatgtgacttttcgcaacttcagaattcgcattgcagattatgtgcgctacagaaagatcacttccaacatgaatgaacgctttccagatgctacatcagaagagctcgatgtgagtgatgctacatgtattatttgccgtgaggaaatggctacagcaaagaaactgctcgatgggcatctgttccatgtgcattgtctaagagaaacaggagaacaggctgaagaagaggttcctctacggcttctccatgggagcttcagctccacaggaaggattctctctactgggacggtgccgtgctgcttgccccaatgtgcaaggccacattttgcaattaaccatgaagatctgacactgttatttcca

SEQ ID NO: 202601 - DNA, 2486 bp, Zea Mays
agcgaggagccgaggactgtcatttcgtctggacctagttctgaccgaacccaaccgttcccacttcccacaccgtctgcggtctgcctgaccgaaaccgaaccccccagcctacaccacccgctgtcctgatggcgacggaccccgcgccggtgccggcgatgcgctgctactcgctgccgccagtccgcctccccgcggaggacattctcttctgcgtcgacgttgacctcgaggcccgcgccgagatgaagtccgccgccgccgccgcagcgtcctcgggctccacctccaccgcttcgccgcagccgacgcagcccgcgggggccgggggtgccccggcggcggggccccggaccgtggtcaggcggatggacgcggtcaggcaggcgctgctgctgttcgtccacagcaagctcaccatgtgcccagagcaccgcttcgccttcgcctccctcggcgagacgttctccatggtaccacggttcccctcatctgatcccttaatttctcggcaacatctagtcggtcttcgcgttctttgctcttgtcgacgagaaatttaggggacgattattcctatttgtgcagaactgttactagatgactacctgctgtctcatacagacatacagtcatactaccaatcacgatttgttctgtgacgtggtaatgtttgagcgcccaattcgaggtatgatgaggggatctacgtgagggagttctgtttaggctggatttaagttaagcgtggagtgagatattcgcccccaaatttccccaatcatcgtgcattattgttctgtagtttgctctgagagttattggtaaatcaaggtgcttattgtattttagtgtgcgataatatattggttaatataatctgtcccctttcaattttaaggtgaagaagggcttcagcagtgatgctggtttcgcaatggaggcaatccattccttgtctgcttcagaaacaagatatgctatggctgatctgacccagctctttatgacagcttgccaggaagggaaaagagcagaatcgcaaggccggattctccgggtggtgctcatatactgccgttcctctacaaagccacagcatcagtggcccgtgaagccaaagaatttcaccctcgacataatctatctccacgacaagccaaatcctgacaactgcccacagaaggtatatgatgccttggtcgatgttcttgagcatgtcagccagtatgaggggtacattctcgagactggtcaagggcttgctcgcgtgctctttcgtcagatgtgcattcttgtatcccatcctttgcaacgttgcatgcaagatgaccttgatattcccaaacaagtcgctaagaaaatcgtggcagccgaacctgcacagaatgaagatgccgctccagtctccagccaacagtagggtcttctagttgaacggtatgcaaacatgaagttactcgcaagcggttggcattaccgttctactagatcagaatgcctgttctgtgtgatggagattccatcccagaatttgtgtactatgctttaactgtccaaggagtcatcctcttgcccccgtcccttgtttgcttgggtattcagcatgtagttgcacatgatacaaataactcaaatctttggcacttgaatttcatttgtttgcgaactttaagttgtgctgcaggtcgtatcatgttcagctcatctgagagaactctgctgaattttgtgttgtgctaggggaaccttctctgccgtgtaaccattaagccagagttatcttacatcatgaggcccctgtgattttcctagttgtttacatccagattgaggtcatgttagcaaagtaggaggatcattacaactccactttcagaactgaactgtagatggcattcattatagaagcgtcgaaattgacttggaattgttcagtgtctccatagtacataaaaagatcgtttgcaccgccagtgaagcaagtaagccattctgaattcgacatacatacatatatatacttccttgcattgcaagaacctccaacaccatctttgtacccggaaaccccttgcccttacacttaccctcacatttcctcgcaccctaacgcccaagtggctatttacagagacatcatgctggccgctgcattttgcttgcttatcagcagcaggggaagcaggagaacaagccgccctttcctgcctccggtttgcttcttgtctccggctgcggctccgccttcgcttcaactactggcggtgctggcgcggccttgaccgcctccgtcgttgctgctgctgcttccggctggtggtctcgatgagactgcttcttggagtagttcctcttgtcctctatcaaactgcgccatcagattttgttcatcagttggtccggtcgagaagattcagctttctaaaacaacaagaacgtgtcgcatggaacgaggtggcggtatgcgtagtactttggga

SEQ ID NO: 202602 - DNA, 1385 bp, Zea Mays
tgctgttcttcgatatcagaaattaggatatcgatttaggtatatggacaaggtgtctgaaggtactaagtgagatggataagaagaaagggaccgatggcaccgaaccaggaccagctccatctcgtgccgtcgacagatttggttttataaagccagaacaaggcaattcacctgatggaattccaaaaggcaagtctatacatgagcgtgaaagggaggaaagaaggataagaaaatggaggaagatgataggtgttggtggtaatgactggaagcattatgttagaaggaaccctcatgtggttaaaaggcgaataaggaaaggaattcctgattgtctcagaggacttgtttggcagttgatttcaggcagtcgggacctcttactaatgaacccaggggtttacgagacactggtgatatatgagacatcggcctctgaattggaaattattcgtgacatatcacgcacatttccatctcatatattctttcaacaaaggcatggtccaggccaaagatcattgtataacattttgaaagcatattctgtctatgacagggatgttggatatgtgcagggaatgggatttttagctgggctgctgcttctttatatgagtgaggaggatgcattctggttattagtcgcgttgctaaagggagctgtccatgcaccaatggaaggcttgtatcaggctggtttgccgcttgtgcagcaatatttgtctcagtttgagaaattagttattgagctcatgccaaaattgggacaacactttgttgaagaaatgataaacccaagcatgtatgcaagtcaatggtttatcacagttttctcatattccttcccatttcatctaactcttagagtttgggatgtgtttctttatgagggtattaaggttgtattccaagttggattggctctattgagactctgtcacgatgatttagtcaaattaccttttgagaaactgctctatgccttgagaaatttccctgaggaagcgacagatccagatgtattattgccgcttgccttttcatttaaggtatcgagtcgtctcgaggagcttcagaaggagtatcagaagcgacaggagggcaccagtgaaacttcaagcggcgagcggctacagcccctcgtatcgaagacgatgagcagggtcggtagccgtgttgtgtcgaacttaacgaccgctgacagaaaatgacagacacgttctcttgtttgtttgtaactcgcatgtacactgtacagaaagaacggccttataatccatccatctaacagtatttgttttgcgtttctgtcaccattgcatttgcttttataatcctggatcgcaggaacaaaaaaggaacgtatttgaattgac

SEQ ID NO: 202603 - DNA, 1698 bp, Zea Mays
gccgggtgctggcggcgcccgatccgaatgctgccgatggcttgtcgcgttctcgtcgggggcgtcgggtctcggggattctgtgttgtcatggtccttgtggattcctagggttggggtggttattcggctgtgggcgggaggcgccccttcgcttgcaaattttttggaatccatgcttgcagggaggagggctgaggagcgtagggccgagggggcatcgggtaggcaaattgagtagctatggattgtcaagaggattgcgcttgcgcgatcggactatcggagtatgctttgtttaacatgttcctttagctgatccttccggtcttggggaaggatatcgatttaggtatatggacaaggtgtctgaaggtactaagtgagatggataagaagaaagggaccgatggcaccgaaccaggaccagctccatctcgtgccgtcgacagatttggttttataaagccagaacaaggcaattcacctgatggaattccaaaaggcaagtctatacatgagcgtgaaagggaggaaagaaggataagaaaatggaggaagatgataggtgttggtggtaatgactggaagcattatgttagaaggaaccctcatgtggttaaaaggcgaataaggaaaggaattcctgattgtctcagaggacttgtttggcagttgatttcaggcagtcgggacctcttactaatgaacccaggggtttacgagacactggtgatatatgagacatcggcctctgaattggaaattattcgtgacatatcacgcacatttccatctcatatattctttcaacaaaggcatggtccaggccaaagatcattgtataacattttgaaagcatattctgtctatgacagggatgttggatatgtgcagggaatgggatttttagctgggctgctgcttctttatatgagtgaggaggatgcattctggttattagtcgcgttgctaaagggagctgtccatgcaccaatggaaggcttgtatcaggctggtttgccgcttgtgcagcaatatttgtctcagtttgagaaattagttattgagctcatgccaaaattgggacaacactttgttgaagaaatgataaacccaagcatgtatgcaagtcaatggtttatcacagttttctcatattccttcccatttcatctaactcttagagtttgggatgtgtttctttatgagggtattaaggttgtattccaagttggattggctctattgagactctgtcacgatgatttagtcaaattaccttttgagaaactgctctatgccttgagaaatttccctgaggaagcgacagatccagatgtattattgccgcttgccttttcatttaaggtatcgagtcgtctcgaggagcttcagaaggagtatcagaagcgacaggagggcaccagtgaaacttcaagcggcgagcggctacagcccctcgtatcgaagacgatgagcagggtcggtagccgtgttgtgtcgaacttaacgaccgctgacagaaaatgacagacacgttctcttgtttgtttgtaactcgcatgtacactgtacagaaagaacggccttataatccatccatctaacagtatttgttttgcgtttctgtcaccattgcatttgcttttataatcctggatcgcaggaacaaaaaaggaacgtatttgaattgac

SEQ ID NO: 202604 - DNA, 1968 bp, Zea Mays
cgggccacgtcacgtcacaagctcgcgaagcacggcacggccgcggacacgaccgggtcccttccgcgtccgggtcgcggtcgccgaagaaccctcgctcgagaccgaagaagacaaaatcgcatctcctcgcctcctcccctcctcccgagatccgggcaaagcgcgccgcgcgagaaccaggatatcgatttaggtatatggacaaggtgtctgaaggtactaagtgagatggataagaagaaagggaccgatggcaccgaaccaggaccagctccatctcgtgccgtcgacagatttggttttataaagccagaacaaggcaattcacctgatggaattccaaaaggcaagtctatacatgagcgtgaaaggtatgacctgccatacaagatatgtattatcggaatgcagtgggctgtatgatatattagggtcgttgtatcttgtttctaccgatttgatatgttagtcgattccaataggtggttgttaagaccatcctagattccattttcttctttctagcagctcttactacatttctacgcataagattggatcttagctttgccagcacttactggtggaatggttctaatacattagactgcttcactgataaacacacctttttattactaccttactcatgcctccgacaccatattaccattctttcccccgtatcagactatttacttgtgtaaatcagttattgtcttacttcaccttcctatttctctaaataaactaccttacaagtgcttttattctatttcttttttatgttgctatagggaggaaagaaggataagaaaatggaggaagatgataggtgttggtggtaatgactggaagcattatgttagaaggaaccctcatgtggttaaaaggcgaataaggaaaggaattcctgattgtctcagaggacttgtttggcagttgatttcaggcagtcgggacctcttactaatgaacccaggggtttacgagacactggtgatatatgagacatcggcctctgaattggaaattattcgtgacatatcacgcacatttccatctcatatattctttcaacaaaggcatggtccaggccaaagatcattgtataacattttgaaagcatattctgtctatgacagggatgttggatatgtgcagggaatgggatttttagctgggctgctgcttctttatatgagtgaggaggatgcattctggttattagtcgcgttgctaaagggagctgtccatgcaccaatggaaggcttgtatcaggctggtttgccgcttgtgcagcaatatttgtctcagtttgagaaattagttattgagctcatgccaaaattgggacaacactttgttgaagaaatgataaacccaagcatgtatgcaagtcaatggtttatcacagttttctcatattccttcccatttcatctaactcttagagtttgggatgtgtttctttatgagggtattaaggttgtattccaagttggattggctctattgagactctgtcacgatgatttagtcaaattaccttttgagaaactgctctatgccttgagaaatttccctgaggaagcgacagatccagatgtattattgccgcttgccttttcatttaaggtatcgagtcgtctcgaggagcttcagaaggagtatcagaagcgacaggagggcaccagtgaaacttcaagcggcgagcggctacagcccctcgtatcgaagacgatgagcagggtcggtagccgtgttgtgtcgaacttaacgaccgctgacagaaaatgacagacacgttctcttgtttgtttgtaactcgcatgtacactgtacagaaagaacggccttataatccatccatctaacagtatttgttttgcgtttctgtcaccattgcatttgcttttataatcctggatcgcaggaacaaaaaaggaacgtatttgaattgac

SEQ ID NO: 202605 - DNA, 2168 bp, Zea Mays
ctgaaacacatgttagttgcgttcactgcagacgaagcgagggaggcgcgtcatgccgtcatcccagcaggtcctcaaatcaaatgcatgcatgcacccgtcctgacggtaaccgaagtccaaaggatcaaaaggaaagtgagctgaggtcctcagatgcagccgtgtcttgccgtcccacaccccatacatgcactggttggtttcgcccctgcttgcacctccgcaccctttggatccccggcctcgatcgagacccccctctctttctctctctctcgattctagcctcaagcttgcatctcagactcagagagagcaggacgcacatgcatttccctctccacagcccccgatcacaggcgacgccgcgtagctcctccgggccggtagatgggcccatgttgcgcgcggttgatctacccgatcgcttcgaccgcgtcgcgccaccgacggacaatggcgccggcagcgaggaagcggcggtgaaggacacgggcccgaagccggtggtgccgctgctcaacgtgtccgccggcggccgcgtccacgagatccagacgttcgcgcactacgtcgccacgcaaatcggtttcgaggatctgaacgagtgcccgcacctgtgcgcgctgtcctacgattacctcaagaagacggagggctacgagcagaacctgctcgccttcttccacaacaagatgaacccggacgccctgctcgtgcagctcatcgaggagatggacaagtgcatcctcggctacttctccttccactggaaatatgcgacccacataatcacgcaggttctgacccacgagcagcctagaagaaagctcagaagaatggtaatggaggccactaggaagatgaggttcgagagggtgacgagagagctgaaggttaccaggctgttcaccactctggtggaggagctcaaggccatcggtgtgcactgccagcacgaccacaaccgggcgggcacggacgtgatggtcccggctgcgcacagcgaccgcagcccggtgctgctcctgatgggcggtggcatgggtgctggcaagagcaccgtgctcaagcaaatcatgaaggaggtgttctggactgaggcggcggcgaacgccgtggttgtggaggccgacgcgttcaaggagtcggacgtgatctaccaagccatcagctcgcggggccaccacaccgacatgctgcagactgccgagctggtgcaccagtcgtcgacggacgcggcggcgtcgctgctggtgacggcgctgaacgaggggcgggacgtgatcctggacggcaccctgtcgtgggagccgttcgtgcggcagaccatcgcgatggcgcggtccgtgcaccggcagcgctaccgcatgggggtcggctacaaggtcgcgcccgacggcacgaccacggagaagtactgggagcccgtggaggaggacggcgagcagcaggcaggaagggcaggcaggacgaggaagccgtaccgcgtcgagctcgtcggcatcatctgcgacgcctacctcgccgtcgtcaggggcatcaggcgagctatcatatccgggagagccgtgcgggtgaactcgcagctcaagtcgcacaagcgcttcgccggcgcgttccgcaagtactgcgacctcgtggacaacgccaggctctacagcaccaataccatcgccggcgcaaagccagctactggtggacgtggacgagatcgggctgctggaccgggtgagccggatcaatgatgacgccaactgcgtgcacgagctgtacccggacgggcaccccacgggcggcgctggctctgtgtgggatgagctgatggcgtcgccggtgagggcttccatacagcgggagctcaaggaggccatcttcgacagcgaggcgtgcttcccctccccgtagtagccacacgccgacctgatttgctggactactagttgtgtaattaagctagttatataatctcttttggatgaacccaagttttgaaccggaataagctagctaagagttatatactgatcgcgaaccttaaataaacaatctttttaaaggcaggttttcgcctatttccatcgcacatatcacactcacctgggtacatttgtaccacacaaggctatttctatttggcaaagctctatagctttatgtataac

SEQ ID NO: 202606 - DNA, 306 bp, Zea Mays
ccgccgggcagggcggcagtataaactagtgatagccactagtggtagtggcgtctgggtctctatatatgtacgtctgccatcatcccatccctatccccccgatcactctttcactctactccaaccactccgcggaatcgtaccttacccagccttcttcctcgtcgccgggctcgccgccagccatgtcggcggcgttcaaggcgttcctgaatagcccagtgggccccaagacgacccacttctggggacccgtctccaactggggcatcatcctcgcgactatttttgttgcatgcgcag

SEQ ID NO: 202607 - DNA, 2127 bp, Zea Mays
ctccacagcagtttttcagtgtagtcttaactctgaaacatgtcctttgaagtgcagagtatacatgcgtaacagaactgagatgcaggcttttggttgaccctacatatttatttgtaattttttgtgtggataatgtcttatttatttggtgttctttatggaaatgggtctttgttgtaaagctttgcgaaacaaacttttgagctaatagttagtgtttgaatgcactagaaataatagttagttggttaaaaattgttagtggaattatctagctaacaattaactacccaactattaaccaatttaccaaaaatagctaatagttgaattattagctatgatgtttggatgtctcaactaattttagccactaaatattagctctagtgcattcaaacacccccttagacatacagtaaggattaaggaattaccacaagccaggtttgtatgatgaatgctgacatctttggagttctgcaggtgtattccgtcagtgttgagactgttctcaggggaggatatagtcaagtcatggaccatcactccttgacagttgtcaaacttaagatgacactgtgagctgttgacaatagtgataccagccactacaacgttgaaactaccataaaacctcaatgcctgcatcaggtttaatctgtggcattctttcaaactccacatcgtactgcaggaaagcatccaaagtccaccattgttgccctctgccatttataatgccgttcccttgaataaccattccatttagtttggtgaactcgagccactggagcaagcctgaaccccaggatttagcactggttggagctaggattgttccttccagctgcaaataaggcccagagaacgagattggcccaactaggaactctagttctggtggtacgagaactgtacatgccccctttttgcaggcagcagcccacgctccttcaaaagcctgtatgcaaatgcacgtacaattattagctctagatttctgaaaagacaatccctggaatctagcatcacaaaaaataactgagagtccagacccctaagcagggtaatcagctgttgcactcttgtcttatatctttttggtcgctgtgccaaaacaagaatcagtttgtgaccccccaccccacccccaccacacacgaaggatttgaaaaaaacgaagttaatttacttgagatattaaaaaatctataggattgatagagctttcagataatgagacaacgcatactggaaaatatcgttaagtatggcttatttcttgttaacctggtacaaaacttccatgaactttctatttcgctttgctgtaagaacaaaaaaatatggtgttattggtgcatgcagtgtgctgttgcaaaagaaagaaagttgtgctctgttaatgtcatagagagggagttcgctattctcttatctgtaaagcctgagaatcacaatattacaattgggtttgtttgttttctctgtacacagaaacgtcttgtaagagctgtggaaagggttctgcattatgtgtattctgacttgcttggtgtactttgttctcttccatggcttaaaaaataaaaaataaacttggccaggctggtgtgtctatgccgctatatgccacaatcatgtgagacggaaagaacaagacaaagcagggaacagatcgaaacaaatgcaaataagactgcagaaacgtatggtgcccgtgacaacttttcgggctttctactgcaaatcatgtgagaaagtgagagtaaaactggtatggtcataggcaccttcaaacgctcactatcataagctgtggtggttctggcaaatgaattcatggtgcattccagtttctaagaattctggagagagagagagagagaaaaatacgcatggccaattggaatctcaagatgtcattgggacgacaggtcccctggatggatgtgattgacatcactgagttctcatgcaagtcatgtaaagatcagtttgaaacagagcatgtgaagcccaaacccacaaaagggattgcaatttgagatttctggctcaaagaatgcatgatgcttgacgattttataatggagttttgtttgaagcagagcatttgca

SEQ ID NO: 202608 - DNA, 913 bp, Zea Mays
caggtggtagtggggtacttgcactggtctgagttgcacaccggtaagagagattcctgaacaaggtgtattccgtcagtgttgagactgttctcaggggaggatatagtcaagtcatggaccatcactccttgacagttgtcaaacttaagatgacactgtgagctgttgacaatagtgataccagccactacaacgttgaaactaccataaaacctcaatgcctgcatcaggtttaatctgtggcattctttcaaactccacatcgtactgcaggaaagcatccaaaaaacgtcttgtaagagctgtggaaagggttctgcattatgtgtattctgacttgcttggtgtactttgttctcttccatggcttaaaaaataaaaaataaacttggccaggctggtgtgtctatgccgctatatgccacaatcatgtgagacggaaagaacaagacaaagcagggaacagatcgaaacaaatgcaaataagactgcagaaacgtatggtgcccgtgacaacttttcgggctttctactgcaaatcatgtgagaaagtgagagtaaaactggtatggtcataggcaccttcaaacgctcactatcataagctgtggtggttctggcaaatgaattcatggtgcattccagtttctaagaattctggagagagagagagagagaaaaatacgcatggccaattggaatctcaagatgtcattgggacgacaggtcccctggatggatgtgattgacatcactgagttctcatgcaagtcatgtaaagatcagtttgaaacagagcatgtgaagcccaaacccacaaaagggattgcaatttgagatttctggctcaaagaatgcatgatgcttgacgattttataatggagttttgtttgaagcagagcatttgca

SEQ ID NO: 202609 - DNA, 2033 bp, Zea Mays
caaaagcttgccagcagaatgggttattcaggtggtagtggggtacttgcactggtctgagttgcacaccggtaagagagattcctgaacaaggtgtattccgtcagtgttgagactgttctcaggggaggatatagtcaagtcatggaccatcactccttgacagttgtcaaacttaagatgacactgtgagctgttgacaatagtgataccagccactacaacgttgaaactaccataaaacctcaatgcctgcatcaggtttaatctgtggcattctttcaaactccacatcgtactgcaggaaagcatccaaagtaagcacttaacatgactatcttttattttgagtacttaataaaaaattatacacttgctggccagctctcaccgtgtcatcatcatcctcgtcttctgtgtctgagtaggtccaccattgttgccctctgccatttataatgccgttcccttgaataaccattccatttagtttggtgaactcgagccactggagcaagcctgaaccccaggatttagcactggttggagctaggattgttccttccagctgcaaagtgagtacaacattaaacagcattactcaacgaacttattcttccattggtgtgcatctcaaattagataaaatacaatcccatcctgccttttgttgctcaattcaagctatgttgagaaaacccttttaagtatcttatcatttgggataaagaacatgcttacctgaaagacaatattcgatttgcagtaaggcccagagaacgagattggcccaactaggaactctagttctggtggtacgagaactgtacatgccccctttttgcaggcagcagcccacgctccttcaaaagcctgtatgcaaatgcacgtacaattattagctctagatttctgaaaagacaatccctggaatctagcatcacaaaaaataactgagagtccagacccctaagcagggtaatcagctgttgcactcttgtcttatatctttttggtcgctgtgccaaaacaagaatcagtttgtgaccccccaccccacccccaccacacacgaaggatttgaaaaaaacgaagttaatttacttgagatattaaaaaatctataggattgatagagctttcagataatgagacaacgcatactggaaaatatcgttaagtatggcttatttcttgttaacctggtacaaaacttccatgaactttctatttcgctttgctgtaagaacaaaaaaatatggtgttattggtgcatgcagtgtgctgttgcaaaagaaagaaagttgtgctctgttaatgtcatagagagggagttcgctattctcttatctgtaaagcctgagaatcacaatattacaattgggtttgtttgttttctctgtacacagaaacgtcttgtaagagctgtggaaagggttctgcattatgtgtattctgacttgcttggtgtactttgttctcttccatggcttaaaaaataaaaaataaacttggccaggctggtgtgtctatgccgctatatgccacaatcatgtgagacggaaagaacaagacaaagcagggaacagatcgaaacaaatgcaaataagactgcagaaacgtatggtgcccgtgacaacttttcgggctttctactgcaaatcatgtgagaaagtgagagtaaaactggtatggtcataggcaccttcaaacgctcactatcataagctgtggtggttctggcaaatgaattcatggtgcattccagtttctaagaattctggagagagagagagagagaaaaatacgcatggccaattggaatctcaagatgtcattgggacgacaggtcccctggatggatgtgattgacatcactgagttctcatgcaagtcatgtaaagatcagtttgaaacagagcatgtgaagcccaaacccacaaaagggattgcaatttgagatttctggctcaaagaatgcatgatgcttgacgattttataatggagttttgtttgaagcagagcatttgca

SEQ ID NO: 202610 - DNA, 3719 bp, Zea Mays
gctctgcatgagaacaggagacagcgtctctcttgtgcttgccccgtggccggcgctagctccgatccttcgccccggttcggcctctcccggcgcctcgggtcatgcccacgagaccacgagctacgcgccgcagacggcagggttccggagccaatgtatgctgctgaggcggcaggactctagcagctctcctatctcataccctattccaaacaacactctgtaaaaagtgtaatgtgacgcccgacgcgcctggatgccgaatcgcctggatcgagacgagtctgggatgagcacggcggcgcctcctcctggccagcggtgagcgtccgtgctgtgaggaagacgtcggcaacatgatgaaggcatgacgctcaacaggagactcaaagataagtctggtttgtgttggtattatttcatttcctctcctcttctgatagtgttttatacgctcctaatctgggcctaagtaccagatctattacaaagctgttaaccctaatctgggccagcccacaatcaccatgtaaaatcgctaagaattcaaaccaatccaagtacacaaatgaaacaaagctcattactactatttcctactgatgcacaccctgatccatgacatgtaatgacaggccaagggcctgcttgaatgcgctgcacctattagcgcctggcgcggtagcaattagttaattactagccacacattgcttccatttgctcctccgtggctgctgattgcagaagcacacttttgcagttccatgcggactgtccttgttgtcatatcatatcccaattgacgatctaatattacatagaacgccgttatgaaccctagagaacttcagcttttgtgtagcgggactgcaaacaacatatgttttgccaccgctaccaattccttatgctttacattcgatccctaactctgcgcatgcaactttgtaacttacagtcacacgatggcaaaacagcatcatctgcatccatgcatgggtcgttcgtcgtcgtcactgcctctcctgctggttccactcgagtattgccgaacgaagggccctgttcggcacgagaaggctgcgctcgaggtcgagattcgtcatgggtgatgtgctatgcccgctgtcaagccagcccctaatagcttcaccctcataagtgaatccatccgctgcaacagatactggctgccccatcatttggtggacaactggaatcagagttctgcgtctgcgatctgcctgagtcaacatgtatcaccagcattttcatatagagagcaaggaacgtggacatgagcaatggcaatccgggagctggaggcgtccctggccaagttgtgcagcgcccacagcaagttgctcttgccgtgcttgagttcttcggggacagcaacgaaaatcttgtcgtcgacagccaaaggcgggctctccgcggcctccctggtgttgctcaccgccgttcttaaggtgtgctggaaagaacgaaagattgcagtcacgcggcgcgcagcatggattgtaatgctgccctccaggacccggaattaaaatgcgaaagacccgaacgttacaaacgaaggcgaggttgtagcatcatttaaaaaaacccgctgtcggaagaaatcactttggtatcttcgtgaatcgggaccggatattcatggcatttggtagacttttctggctgcgaggtgaaattactggagacctgcatagacgaagtaccgtctgttgctcgttactgctctgccagtcgtcgtctaacacgattgtttcgatgcatcgatgtgaaaatgctcagcaaacagcatattctgaggctgcatttgctcgctgccgcttcctctgcagaaaccttttgacttcttaacaatcacgagattcttcgccgtgtgtgtcttttgttatcacggtctgcctgaaattcatcaaaaaacaagtggcatcaaaattgccctatgccacatttctcttgctagcccggccccgatcagaactgaagcccatgatggatgagggcccagtcccctgcatggaccacttcctcggcgtcgggactcgggactgcgacccggcaacagaagcacggaagcaggagacgaccaataggcaatagcaacgcgccggcggctcggcggcgtcgaacgattcgggcaatcgacaagcagccccaccaaaccaggaaactgcaaacctacccccggtcgccgactcgccgacctcgactctccgcccagactacaaatggagctctgcacctgcgcggcccgcagttctgcgcccccctcttctagctgccgcgcggcgccattcccgcgagttctctcccatcgcatttggagccgatcgggatactgcactgtctgctttaccccgtcaagccctgttgctaggagtcgattctctactctaatgacgactgcacacaacacagggaccccagatctagttgacttcaattgggatgatcttgggtttcaactgatcccaacggacttcatgtatttaatgagctgttcttcagatggggtgtttatgaatggtaaattagtgccatatgggtcaattgagctgaatccagcagccgccgtgctgaattatggtcagggattgcttgaaggtctacgatcacatagaaaagaggatggatcaatccttctttttcgtccacatgaaaatgcacggcggatggaaattggtgcagaccggttatgcatgcctgcaccaagtgtagagcaattcctagaagctgtgaaactaactgttctggcaaacaagcattgggtgcctccttttggtaaaggttctttgtatatcagaccgcagctaattggaagtggggctatgcttggtgtggcacctgccccacagtacacattcattgtgtttgtttgcccagttgggcattatttcaagggtggtctagctccaatcagcttgttaactgaggaagaataccaccgtgctgcacctggtggaactggtgatataaaaactattgggaactatgcttcggttgtcagtgctcagagaagatccaaggaaaaaggccattctgatgttttatacttagatccactccataataagtttgttgaggaagtttcttcttgtaatatattcatggtgaaggacaatattatttctactccactgttaacggggacaattcttcctggaatcacaaggagaagtgtgattgaaatttctcagaatcttggatttcaggttgaggagcgtcttatcacaatagatgaactgcttggggctgatgaagtcttttgtacaggaacagctgttgtattgtcacctgttgggagcatcacttaccgtggaagaagagtggagtatgggaagaaccaggaggccggagtcgtgtcccaacaactctatgccgcactcacagctatccagaaaggtctcacggaggacagcatgggatggacgttgcagctaacttagcagcttttttcacatgatcgagctctacaactcttatttccgttttctcgataagtctcacttctatcaacttgttcttctgttgaaacagagtactttaaaagggatccccaataatgactttccctgtgtattgctgatatgttggcactagatatttttggaaactctatttaaagcacagtgttttgcaccacaagcattatactacatccgttcataaaaaaataattagttatcatttat

SEQ ID NO: 202611 - DNA, 3261 bp, Zea Mays
tcgcagtgcatgttcacgtatctcatttgcttgaatctcggatgctcaactacaactttggctggtcgaatgcccatctacgactttggagccaagccaagctagcctgcccctagtccccttacccctgcggccctgcccctgcccccgctcccgattccgccgccgcatccgacccaacccgctgcgatcccctccgccgtggcgtcggcgactccctctcccgcgacgccctttcatcgctgcagttgatacgccacccgagcggttccttccctcctctcttcctccccttgtcgctctccgcatcgccgcaggccgtagggcgccaccgcgtcagaaggcgcgatccatggaccggtcgatcaacttccgcggcatcgccgggagcgccggcaacatcatgcagggaatggggaaattcgttttcggcaacgagggactcgactcaaaggaagatagctatgttgagagataccttgaccggataagcaatggcaccatacctgatgaccggagatctgccatgactgagctgcagtctctcgtggccgaaagtcgcttagcacagatgtcgtttggagcgatgggttttcctatcctcctcaatatttttaaagaagaccgcgaggatgtagagcttgtgagaggtgcactggagacctttgtgagcgcattgactcctattgagatgtcacaagggccaaagactgaggttcaaccagcatcagtgaattctgatctgctgtctcgagaaacggagaatatttctcttcttctgagcttattgtcagaggaagacttttatgtgagatactacacaatccaacttctaacagctctacttacaaactcgctgaaaaggttacaggaagcaattctattgattccccgtggtataacagttctaatggacatgcttatggatcgtgaggtcataaggaatgaagcactgttacttcttacttatttgactcgggatgcagaggaaattcaaaaaattgttgtatttgagggtgtgtttgagaagatatttagcattatcagagaggagggctattctgacggaggtgtagttgttcaggattgccttgaattgttaaataatttaattcgacacaacgcgtcaaatcagatgcttttgaaagagacaatgggctttgacccattgatatcaatactaaagattaggagaggcagtgcatttaattttacccaacagaagacagtaaatctcctcgctgctttaaatactgtggaattgcttttgatggtgggcccatccggtgaagcaggtaaagatgctaacaagaatgcaaatcaaactgcattggctcagaaaaacattctggaccatcttcttttgttgggtgttgagagtcagtgggcccctgtcgctctccgctgtatggcactgcgttgtattggcaatttggtgttaaggaatcctcagaatcttgattctcttgcaagaaagcaagttggagaagagcctcatgttcaacctgcactgaatgccatcttatctataatcttacggacatctatagcgcaggaatttgttgctgctgattatgtattcaagtgtttctgcgagagaaatcctaatggccaggcattattagcatcaactattgctccacatccaaaccaaggagatattcatgaacctgctagtgacatgccttttggaagtgtacttctgcaagctctggtttctagtgatgtcaatggagatatggaggcatgctgcagagcatctagcgttctttctcacattatcaaggacaacttgcaaagcaaggatcgtgtattgcaaattcagcttgagacatctacagcatccttggggcgtactgagccggtattgcatcgtattgttacatgtttgtccatcgcagcttcaatggagggagaaaatgaccaaaacaaccaactagaggaaccgtacattcaaccttttattcttcggctactcatcatatggcttgttgattgttcaaatgctgtcaactgccttttggaatcagcggtgcatctgaacttcataatagagcttgcttcgaataaacgttacgccgcttgtgtccgtggattggctgctgttgttctaggtgcttgcatcctgtacaatgctagccgtgagaagggtcgtgatgcctttgccgtggcagatgctataagtcaaaagattggcctcacaacatacttcttgaggtttgatgaactgaggaaaagcttggcacatccgttgtcagagcagcatcaccgcaaggagctttcccgatcaagtgcgaatagcatgtcagatttccaagagattgaagaggatgaaacaaataagggcgatcaacaccctgtgctttcagaaatatttgattcacagtttgttaatttacttactaagcttgaggctgatattagagaaaacataatggatatatttagtcggacaaaaactgcaacagcagtccttcctactgaattggagcagaagaacggggaggtcgatgaagagtatatcaagcgactaaagtcatttgtagaaaaacagtgcaatgagatgcaggacttgctggcacggaatgcaatgttagcagaagagttactgagaactggtggtggtacgaccacagatacttcacagaaaccgagcagtggccgagaaagggtccagattgaagctctcagacaagaactggagggggcaaaacgacagataggggcactcaaaagtgagaagtcccagattgaagctgaagctaacaaccaaagaaacctttcagtaaaactggagtctgatctcaagagcttgtcagaagcttacaacagcatagagcaggccaactaccgcttggatgccgaggagcaaacgaaggtcgagaagctgagcacaaggctggcagagctcggggaagatgtggatacccttctgcagggtattggcgatgacactgccattccggatgatgacgatgaagatgatgaagagtgattggtttatgtaacctgcaggtctgctggtgtaatctaccttcatgttgggtcatgatattgcgatggtaactggaaaatgtacagtggatgacaaatgcaccgttccaagtttaagttatttctagagaatgtgactaaatagcctcttgttaaatttgattgtctgaataactttttatattacctttgataaatagccccttgttgaatgggcctcagattcatcatcatatatactaaaaagaacgggtctgatctggtgtg

SEQ ID NO: 202612 - DNA, 3399 bp, Zea Mays
agccaagccaagctagcctgcccctagtccccttacccctgcggccctgcccctgcccccgctcccgattccgccgccgcatccgacccaacccgctgcgatcccctccgccgtggcgtcggcgactccctctcccgcgacgccctttcatcgctgcagttgatacgccacccgagcggttccttccctcctctcttcctccccttgtcgctctccgcatcgccgcaggccgtagggcgccaccgcgtcagaaggcgcgatccatggaccggtcgatcaacttccgcggcatcgccgggagcgccggcaacatcatgcagggaatggggaaattcgttttcggcaacgagggactcgactcaaaggaagatagctatgttgagagataccttgaccggataagcaatggcaccatacctgatgaccggagatctgccatgactgagctgcagtctctcgtggccgaaagtcgcttagcacagatgtcgtttggagcgatgggttttcctatcctcctcaatatttttaaagaagaccgcgaggatgtagagcttgtgagaggtgcactggagacctttgtgagcgcattgactcctattgagatgtcacaagggccaaagactgaggttcaaccagcatcagtgaattctgatctgctgtctcgagaaacggagaatatttctcttcttctgagcttattgtcagaggaagacttttatgtgagatactacacaatccaacttctaacagctctacttacaaactcgctgaaaaggttacaggaagcaattctattgattccccgtggtataacagttctaatggacatgcttatggatcgtgagttcttgttcatatatggccgtggcggttggcgtgccgccctcttcatcatcgggacagtgtaaatataagaaggacgatacatcagcacctaaaggaggtcataaggaatgaagcactgttacttcttacttatttgactcgggatgcagaggaaattcaaaaaattgttgtatttgagggtgtgtttgagaagatatttagcattatcagagaggagggctattctgacggaggtgtagttgttcaggattgccttgaattgttaaataatttaattcgacacaacgcgtcaaatcagatgcttttgaaagagacaatgggctttgacccattgatatcaatactaaagattaggagaggcagtgcatttaattttacccaacagaagacagtaaatctcctcgctgctttaaatactgtggaattgcttttgatggtgggcccatccggtgaagcaggtaaagatgctaacaagaatgcaaatcaaactgcattggctcagaaaaacattctggaccatcttcttttgttgggtgttgagagtcagtgggcccctgtcgctctccgctgtatggcactgcgttgtattggcaatttggtgttaaggaatcctcagaatcttgattctcttgcaagaaagcaagttggagaagagcctcatgttcaacctgcactgaatgccatcttatctataatcttacggacatctatagcgcaggaatttgttgctgctgattatgtattcaagtgtttctgcgagagaaatcctaatggccaggcattattagcatcaactattgctccacatccaaaccaaggagatattcatgaacctgctagtgacatgccttttggaagtgtacttctgcaagctctggtttctagtgatgtcaatggagatatggaggcatgctgcagagcatctagcgttctttctcacattatcaaggacaacttgcaaagcaaggatcgtgtattgcaaattcagcttgagacatctacagcatccttggggcgtactgagccggtattgcatcgtattgttacatgtttgtccatcgcagcttcaatggagggagaaaatgaccaaaacaaccaactagaggaaccgtacattcaaccttttattcttcggctactcatcatatggcttgttgattgttcaaatgctgtcaactgccttttggaatcagcggtgcatctgaacttcataatagagcttgcttcgaataaacgttacgccgcttgtgtccgtggattggctgctgttgttctaggtgcttgcatcctgtacaatgctagccgtgagaagggtcgtgatgcctttgccgtggcagatgctataagtcaaaagattggcctcacaacatacttcttgaggtttgatgaactgaggaaaagcttggcacatccgttgtcagagcagcatcaccgcaaggagctttcccgatcaagtgcgaatagcatgtcagatttccaagagattgaagaggatgaaacaaataagggcgatcaacaccctgtgctttcagaaatatttgattcacagtttgttaatttacttactaagcttgaggctgatattagagaaaacataatggatatatttagtcggacaaaaactgcaacagcagtccttcctactgaattggagcagaagaacggggaggtcgatgaagagtatatcaagcgactaaagtcatttgtagaaaaacagtgcaatgagatgcaggacttgctggcacggaatgcaatgttagcagaagagttactgagaactggtggtggtacgaccacagatacttcacagaaaccgagcagtggccgagaaagggtccagattgaagctctcagacaagaactggagggggcaaaacgacagataggggcactcaaaagtgagaagtcccagattgaagctgaagctaacaaccaaagaaacctttcagtaaaactggagtctgatctcaagagcttgtcagaagcttacaacagcatagagcaggccaactaccgcttggatgccgaggtaaaagccttgcggcagggaggcagcgtgccatatcctgacgtggaagcaataaaagcgcaagctaaggaagaggctgagaaggacagtgaggcagaactgaatgatctactcgtctgccttgggcaggagcaaacgaaggtcgagaagctgagcacaaggctggcagagctcggggaagatgtggatacccttctgcagggtattggcgatgacactgccattccggatgatgacgatgaagatgatgaagagtgattggtttatgtaacctgcaggtctgctggtgtaatctaccttcatgttgggtcatgatattgcgatggtaactggaaaatgtacagtggatgacaaatgcaccgttccaagtttaagttatttctagagaatgtgactaaatagcctcttgttaaatttgattgtctgaataactttttatattacctttgataaatagccccttgttgaatgggcctcagattcatcatcatatatactaaaaagaacgggtctgatctggtgtg

SEQ ID NO: 202613 - DNA, 3305 bp, Zea Mays
agccaagccaagctagcctgcccctagtccccttacccctgcggccctgcccctgcccccgctcccgattccgccgccgcatccgacccaacccgctgcgatcccctccgccgtggcgtcggcgactccctctcccgcgacgccctttcatcgctgcagttgatacgccacccgagcggttccttccctcctctcttcctccccttgtcgctctccgcatcgccgcaggccgtagggcgccaccgcgtcagaaggcgcgatccatggaccggtcgatcaacttccgcggcatcgccgggagcgccggcaacatcatgcagggaatggggaaattcgttttcggcaacgagggactcgactcaaaggaagatagctatgttgagagataccttgaccggataagcaatggcaccatacctgatgaccggagatctgccatgactgagctgcagtctctcgtggccgaaagtcgcttagcacagatgtcgtttggagcgatgggttttcctatcctcctcaatatttttaaagaagaccgcgaggatgtagagcttgtgagaggtgcactggagacctttgtgagcgcattgactcctattgagatgtcacaagggccaaagactgaggttcaaccagcatcagtgaattctgatctgctgtctcgagaaacggagaatatttctcttcttctgagcttattgtcagaggaagacttttatgtgagatactacacaatccaacttctaacagctctacttacaaactcgctgaaaaggttacaggaagcaattctattgattccccgtggtataacagttctaatggacatgcttatggatcgtgagggctgttatgaattggatccaggctcaactccacaggagcttcttcatgtagtttcaccatcaggcgatgctaagtcataaggaatgaagcactgttacttcttacttatttgactcgggatgcagaggaaattcaaaaaattgttgtatttgagggtgtgtttgagaagatatttagcattatcagagaggagggctattctgacggaggtgtagttgttcaggattgccttgaattgttaaataatttaattcgacacaacgcgtcaaatcagatgcttttgaaagagacaatgggctttgacccattgatatcaatactaaagattaggagaggcagtgcatttaattttacccaacagaaggtaaagatgctaacaagaatgcaaatcaaactgcattggctcagaaaaacattctggaccatcttcttttgttgggtgttgagagtcagtgggcccctgtcgctctccgctgtatggcactgcgttgtattggcaatttggtgttaaggaatcctcagaatcttgattctcttgcaagaaagcaagttggagaagagcctcatgttcaacctgcactgaatgccatcttatctataatcttacggacatctatagcgcaggaatttgttgctgctgattatgtattcaagtgtttctgcgagagaaatcctaatggccaggcattattagcatcaactattgctccacatccaaaccaaggagatattcatgaacctgctagtgacatgccttttggaagtgtacttctgcaagctctggtttctagtgatgtcaatggagatatggaggcatgctgcagagcatctagcgttctttctcacattatcaaggacaacttgcaaagcaaggatcgtgtattgcaaattcagcttgagacatctacagcatccttggggcgtactgagccggtattgcatcgtattgttacatgtttgtccatcgcagcttcaatggagggagaaaatgaccaaaacaaccaactagaggaaccgtacattcaaccttttattcttcggctactcatcatatggcttgttgattgttcaaatgctgtcaactgccttttggaatcagcggtgcatctgaacttcataatagagcttgcttcgaataaacgttacgccgcttgtgtccgtggattggctgctgttgttctaggtgcttgcatcctgtacaatgctagccgtgagaagggtcgtgatgcctttgccgtggcagatgctataagtcaaaagattggcctcacaacatacttcttgaggtttgatgaactgaggaaaagcttggcacatccgttgtcagagcagcatcaccgcaaggagctttcccgatcaagtgcgaatagcatgtcagatttccaagagattgaagaggatgaaacaaataagggcgatcaacaccctgtgctttcagaaatatttgattcacagtttgttaatttacttactaagcttgaggctgatattagagaaaacataatggatatatttagtcggacaaaaactgcaacagcagtccttcctactgaattggagcagaagaacggggaggtcgatgaagagtatatcaagcgactaaagtcatttgtagaaaaacagtgcaatgagatgcaggacttgctggcacggaatgcaatgttagcagaagagttactgagaactggtggtggtacgaccacagatacttcacagaaaccgagcagtggccgagaaagggtccagattgaagctctcagacaagaactggagggggcaaaacgacagataggggcactcaaaagtgagaagtcccagattgaagctgaagctaacaaccaaagaaacctttcagtaaaactggagtctgatctcaagagcttgtcagaagcttacaacagcatagagcaggccaactaccgcttggatgccgaggtaaaagccttgcggcagggaggcagcgtgccatatcctgacgtggaagcaataaaagcgcaagctaaggaagaggctgagaaggacagtgaggcagaactgaatgatctactcgtctgccttgggcaggagcaaacgaaggtcgagaagctgagcacaaggctggcagagctcggggaagatgtggatacccttctgcagggtattggcgatgacactgccattccggatgatgacgatgaagatgatgaagagtgattggtttatgtaacctgcaggtctgctggtgtaatctaccttcatgttgggtcatgatattgcgatggtaactggaaaatgtacagtggatgacaaatgcaccgttccaagtttaagttatttctagagaatgtgactaaatagcctcttgttaaatttgattgtctgaataactttttatattacctttgataaatagccccttgttgaatgggcctcagattcatcatcatatatactaaaaagaacgggtctgatctggtgtg

SEQ ID NO: 202614 - DNA, 3111 bp, Zea Mays
aagccaagctagcctgcccctagtccccttacccctgcggccctgcccctgcccccgctcccgattccgccgccgcatccgacccaacccgctgcgatcccctccgccgtggcgtcggcgactccctctcccgcgacgccctttcatcgctgcagttgatacgccacccgagcggttccttccctcctctcttcctccccttgtcgctctccgcatcgccgcaggccgtagggcgccaccgcgtcagaaggcgcgatccatggaccggtcgatcaacttccgcggcatcgccgggagcgccggcaacatcatgcagggaatggggaaattcgttttcggcaacgagggactcgactcaaaggaagatagctatgttgagagataccttgaccggataagcaatggcaccatacctgatgaccggagatctgccatgactgagctgcagtctctcgtggccgaaagtcgcttagcacagatgtcgtttggagcgatgggttttcctatcctcctcaatatttttaaagaagaccgcgaggatgtagagcttgtgagaggtgcactggagacctttgtgagcgcattgactcctattgagatgtcacaagggccaaagactgaggttcaaccagcatcagtgaattctgatctgctgtctcgagaaacggagaatatttctcttcttctgagcttattgtcagaggaagacttttatgtgagatactacacaatccaacttctaacagctctacttacaaactcgctgaaaaggttacaggaagcaattctattgattccccgtggtataacagttctaatggacatgcttatggatcgtgaggtcataaggaatgaagcactgttacttcttacttatttgactcgggatgcagaggaaattcaaaaaattgttgtatttgagggtgtgtttgagaagatatttagcattatcagagaggagggctattctgacggaggtgtagttgttcaggattgccttgaattgttaaataatttaattcgacacaacgcgtcaaatcagatgcttttgaaagagacaatgggctttgacccattgatatcaatactaaagattaggagaggcagtgcatttaattttacccaacagaagacagtaaatctcctcgctgctttaaatactgtggaattgcttttgatggtgggcccatccggtgaagcaggtaaagatgctaacaagaatgcaaatcaaactgcattggctcagaaaaacattctggaccatcttcttttgttgggtgttgagagtcagtgggcccctgtcgctctccgctgtatgagaaatcctaatggccaggcattattagcatcaactattgctccacatccaaaccaaggagatattcatgaacctgctagtgacatgccttttggaagtgtacttctgcaagctctggtttctagtgatgtcaatggagatatggaggcatgctgcagagcatctagcgttctttctcacattatcaaggacaacttgcaaagcaaggatcgtgtattgcaaattcagcttgagacatctacagcatccttggggcgtactgagccggtattgcatcgtattgttacatgtttgtccatcgcagcttcaatggagggagaaaatgaccaaaacaaccaactagaggaaccgtacattcaaccttttattcttcggctactcatcatatggcttgttgattgttcaaatgctgtcaactgccttttggaatcagcggtgcatctgaacttcataatagagcttgcttcgaataaacgttacgccgcttgtgtccgtggattggctgctgttgttctaggtgcttgcatcctgtacaatgctagccgtgagaagggtcgtgatgcctttgccgtggcagatgctataagtcaaaagattggcctcacaacatacttcttgaggtttgatgaactgaggaaaagcttggcacatccgttgtcagagcagcatcaccgcaaggagctttcccgatcaagtgcgaatagcatgtcagatttccaagagattgaagaggatgaaacaaataagggcgatcaacaccctgtgctttcagaaatatttgattcacagtttgttaatttacttactaagcttgaggctgatattagagaaaacataatggatatatttagtcggacaaaaactgcaacagcagtccttcctactgaattggagcagaagaacggggaggtcgatgaagagtatatcaagcgactaaagtcatttgtagaaaaacagtgcaatgagatgcaggacttgctggcacggaatgcaatgttagcagaagagttactgagaactggtggtggtacgaccacagatacttcacagaaaccgagcagtggccgagaaagggtccagattgaagctctcagacaagaactggagggggcaaaacgacagataggggcactcaaaagtgagaagtcccagattgaagctgaagctaacaaccaaagaaacctttcagtaaaactggagtctgatctcaagagcttgtcagaagcttacaacagcatagagcaggccaactaccgcttggatgccgaggtaaaagccttgcggcagggaggcagcgtgccatatcctgacgtggaagcaataaaagcgcaagctaaggaagaggctgagaaggacagtgaggcagaactgaatgatctactcgtctgccttgggcaggagcaaacgaaggtcgagaagctgagcacaaggctggcagagctcggggaagatgtggatacccttctgcagggtattggcgatgacactgccattccggatgatgacgatgaagatgatgaagagtgattggtttatgtaacctgcaggtctgctggtgtaatctaccttcatgttgggtcatgatattgcgatggtaactggaaaatgtacagtggatgacaaatgcaccgttccaagtttaagttatttctagagaatgtgactaaatagcctcttgttaaatttgattgtctgaataactttttatattacctttgataaatagccccttgttgaatgggcctcagattcatcatcatatatactaaaaagaacgggtctgatctggtgtg

SEQ ID NO: 202615 - DNA, 3302 bp, Zea Mays
gccaagctagcctgcccctagtccccttacccctgcggccctgcccctgcccccgctcccgattccgccgccgcatccgacccaacccgctgcgatcccctccgccgtggcgtcggcgactccctctcccgcgacgccctttcatcgctgcagttgatacgccacccgagcggttccttccctcctctcttcctccccttgtcgctctccgcatcgccgcaggccgtagggcgccaccgcgtcagaaggcgcgatccatggaccggtcgatcaacttccgcggcatcgccgggagcgccggcaacatcatgcagggaatggggaaattcgttttcggcaacgagggactcgactcaaaggaagatagctatgttgagagataccttgaccggataagcaatggcaccatacctgatgaccggagatctgccatgactgagctgcagtctctcgtggccgaaagtcgcttagcacagatgtcgtttggagcgatgggttttcctatcctcctcaatatttttaaagaagaccgcgaggatgtagagcttgtgagaggtgcactggagacctttgtgagcgcattgactcctattgagatgtcacaagggccaaagactgaggttcaaccagcatcagtgaattctgatctgctgtctcgagaaacggagaatatttctcttcttctgagcttattgtcagaggaagacttttatgtgagatactacacaatccaacttctaacagctctacttacaaactcgctgaaaaggtgcccagttacaggaagcaattctattgattccccgtggtataacagttctaatggacatgcttatggatcgtgaggtcataaggaatgaagcactgttacttcttacttatttgactcgggatgcagaggaaattcaaaaaattgttgtatttgagggtgtgtttgagaagatatttagcattatcagagaggagggctattctgacggaggtgtagttgttcaggattgccttgaattgttaaataatttaattcgacacaacgcgtcaaatcagatgcttttgaaagagacaatgggctttgacccattgatatcaatactaaagattaggagaggcagtgcatttaattttacccaacagaagacagtaaatctcctcgctgctttaaatactgtggaattgcttttgatggtgggcccatccggtgaagcaggtaaagatgctaacaagaatgcaaatcaaactgcattggctcagaaaaacattctggaccatcttcttttgttgggtgttgagagtcagtgggcccctgtcgctctccgctgtatggcactgcgttgtattggcaatttggtgttaaggaatcctcagaatcttgattctcttgcaagaaagcaagttggagaagagcctcatgttcaacctgcactgaatgccatcttatctataatcttacggacatctatagcgcaggaatttgttgctgctgattatgtattcaagtgtttctgcgagagaaatcctaatggccaggcattattagcatcaactattgctccacatccaaaccaaggagatattcatgaacctgctagtgacatgccttttggaagtgtacttctgcaagctctggtttctagtgatgtcaatggagatatggaggcatgctgcagagcatctagcgttctttctcacattatcaaggacaacttgcaaagcaaggatcgtgtattgcaaattcagcttgagacatctacagcatccttggggcgtactgagccggtattgcatcgtattgttacatgtttgtccatcgcagcttcaatggagggagaaaatgaccaaaacaaccaactagaggaaccgtacattcaaccttttattcttcggctactcatcatatggcttgttgattgttcaaatgctgtcaactgccttttggaatcagcggtgcatctgaacttcataatagagcttgcttcgaataaacgttacgccgcttgtgtccgtggattggctgctgttgttctaggtgcttgcatcctgtacaatgctagccgtgagaagggtcgtgatgcctttgccgtggcagatgctataagtcaaaagattggcctcacaacatacttcttgaggtttgatgaactgaggaaaagcttggcacatccgttgtcagagcagcatcaccgcaaggagctttcccgatcaagtgcgaatagcatgtcagatttccaagagattgaagaggatgaaacaaataagggcgatcaacaccctgtgctttcagaaatatttgattcacagtttgttaatttacttactaagcttgaggctgatattagagaaaacataatggatatatttagtcggacaaaaactgcaacagcagtccttcctactgaattggagcagaagaacggggaggtcgatgaagagtatatcaagcgactaaagtcatttgtagaaaaacagtgcaatgagatgcaggacttgctggcacggaatgcaatgttagcagaagagttactgagaactggtggtggtacgaccacagatacttcacagaaaccgagcagtggccgagaaagggtccagattgaagctctcagacaagaactggagggggcaaaacgacagataggggcactcaaaagtgagaagtcccagattgaagctgaagctaacaaccaaagaaacctttcagtaaaactggagtctgatctcaagagcttgtcagaagcttacaacagcatagagcaggccaactaccgcttggatgccgaggtaaaagccttgcggcagggaggcagcgtgccatatcctgacgtggaagcaataaaagcgcaagctaaggaagaggctgagaaggacagtgaggcagaactgaatgatctactcgtctgccttgggcaggagcaaacgaaggtcgagaagctgagcacaaggctggcagagctcggggaagatgtggatacccttctgcagggtattggcgatgacactgccattccggatgatgacgatgaagatgatgaagagtgattggtttatgtaacctgcaggtctgctggtgtaatctaccttcatgttgggtcatgatattgcgatggtaactggaaaatgtacagtggatgacaaatgcaccgttccaagtttaagttatttctagagaatgtgactaaatagcctcttgttaaatttgattgtctgaataactttttatattacctttgataaatagccccttgttgaatgggcctcagattcatcatcatatatactaaaaagaacgggtctgatctggtgtg

SEQ ID NO: 202616 - DNA, 3295 bp, Zea Mays
gccaagctagcctgcccctagtccccttacccctgcggccctgcccctgcccccgctcccgattccgccgccgcatccgacccaacccgctgcgatcccctccgccgtggcgtcggcgactccctctcccgcgacgccctttcatcgctgcagttgatacgccacccgagcggttccttccctcctctcttcctccccttgtcgctctccgcatcgccgcaggccgtagggcgccaccgcgtcagaaggcgcgatccatggaccggtcgatcaacttccgcggcatcgccgggagcgccggcaacatcatgcagggaatggggaaattcgttttcggcaacgagggactcgactcaaaggaagatagctatgttgagagataccttgaccggataagcaatggcaccatacctgatgaccggagatctgccatgactgagctgcagtctctcgtggccgaaagtcgcttagcacagatgtcgtttggagcgatgggttttcctatcctcctcaatatttttaaagaagaccgcgaggatgtagagcttgtgagaggtgcactggagacctttgtgagcgcattgactcctattgagatgtcacaagggccaaagactgaggttcaaccagcatcagtgaattctgatctgctgtctcgagaaacggagaatatttctcttcttctgagcttattgtcagaggaagacttttatgtgagatactacacaatccaacttctaacagctctacttacaaactcgctgaaaaggttacaggaagcaattctattgattccccgtggtataacagttctaatggacatgcttatggatcgtgaggtcataaggaatgaagcactgttacttcttacttatttgactcgggatgcagaggaaattcaaaaaattgttgtatttgagggtgtgtttgagaagatatttagcattatcagagaggagggctattctgacggaggtgtagttgttcagcatctcactcctagtcttaattctacttcctttgatgactggtgggaggaaatgcttttgaaagagacaatgggctttgacccattgatatcaatactaaagattaggagaggcagtgcatttaattttacccaacagaagacagtaaatctcctcgctgctttaaatactgtggaattgcttttgatggtgggcccatccggtgaagcaggtaaagatgctaacaagaatgcaaatcaaactgcattggctcagaaaaacattctggaccatcttcttttgttgggtgttgagagtcagtgggcccctgtcgctctccgctgtatggcactgcgttgtattggcaatttggtgttaaggaatcctcagaatcttgattctcttgcaagaaagcaagttggagaagagcctcatgttcaacctgcactgaatgccatcttatctataatcttacggacatctatagcgcaggaatttgttgctgctgattatgtattcaagtgtttctgcgagagaaatcctaatggccaggcattattagcatcaactattgctccacatccaaaccaaggagatattcatgaacctgctagtgacatgccttttggaagtgtacttctgcaagctctggtttctagtgatgtcaatggagatatggaggcatgctgcagagcatctagcgttctttctcacattatcaaggacaacttgcaaagcaaggatcgtgtattgcaaattcagcttgagacatctacagcatccttggggcgtactgagccggtattgcatcgtattgttacatgtttgtccatcgcagcttcaatggagggagaaaatgaccaaaacaaccaactagaggaaccgtacattcaaccttttattcttcggctactcatcatatggcttgttgattgttcaaatgctgtcaactgccttttggaatcagcggtgcatctgaacttcataatagagcttgcttcgaataaacgttacgccgcttgtgtccgtggattggctgctgttgttctaggtgcttgcatcctgtacaatgctagccgtgagaagggtcgtgatgcctttgccgtggcagatgctataagtcaaaagattggcctcacaacatacttcttgaggtttgatgaactgaggaaaagcttggcacatccgttgtcagagcagcatcaccgcaaggagctttcccgatcaagtgcgaatagcatgtcagatttccaagagattgaagaggatgaaacaaataagggcgatcaacaccctgtgctttcagaaatatttgattcacagtttgttaatttacttactaagcttgaggctgatattagagaaaacataatggatatatttagtcggacaaaaactgcaacagcagtccttcctactgaattggagcagaagaacggggaggtcgatgaagagtatatcaagcgactaaagtcatttgtagaaaaacagtgcaatgagatgcaggacttgctggcacggaatgcaatgttagcagaagagttactgagaactggtggtggtacgaccacagatacttcacagaaaccgagcagtggccgagaaagggtccagattgaagctctcagacaagaactggagggggcaaaacgacagataggggcactcaaaagtgagaagtcccagattgaagctgaagctaacaaccaaagaaacctttcagtaaaactggagtctgatctcaagagcttgtcagaagcttacaacagcatagagcaggccaactaccgcttggatgccgaggtaaaagccttgcggcagggaggcagcgtgccatatcctgacgtggaagcaataaaagcgcaagctaaggaagaggctgagaaggacagtgaggcagaactgaatgatctactcgtctgccttgggcaggagcaaacgaaggtcgagaagctgagcacaaggctggcagagctcggggaagatgtggatacccttctgcagggtattggcgatgacactgccattccggatgatgacgatgaagatgatgaagagtgattggtttatgtaacctgcaggtctgctggtgtaatctaccttcatgttgggtcatgatattgcgatggtaactggaaaatgtacagtggatgacaaatgcaccgttccaagtttaagttatttctagagaatgtgactaaatagcctcttgttaaatttgattgtctgaataactttttatattacctttgataaatagccccttgttgaatgggcctcagattcatcatcatatatactaaaaagaacgggtctgatctggtgtg

SEQ ID NO: 202617 - DNA, 791 bp, Zea Mays
tatgactcgttctcaagcaacaaaaaatatatatatactcagttcttgttcatatatggccgtggcggttggcgtgccgccctcttcatcatcgggacagtgtaaatataagaaggacgatacatcagcacctaaaggaggtcataaggaatgaagcactgttacttcttacttatttgactcgggatgcagaggaaattcaaaaaattgttgtatttgagggtgtgtttgagaagatatttagcattatcagagaggagggctattctgacggaggtgtagttgttcaggattgccttgaattgttaaataatttaattcgacacaacgcgtcaaatcagatgcttttgaaagagacaatgggctttgacccattgatatcaatactaaagattaggagaggcagtgcatttaattttacccaacagaagacagtaaatctcctcgctgctttaaatactgtggaattgcttttgatggtgggcccatccggtgaagcaggtaaagatgctaacaagaatgcaaatcaaactgcattggctcagaaaaacattctggaccatcttcttttgttgggtgttgagagtcagtgggcccctgtcgctctccgctgtatggcactgcgttgtattggcaatttggtgttaaggaatcctcagaatcttgattctcttgcaagaaagcaagttggagaagagcctcatgttcaacctgcactgaatgccatcttatctataatcttacggacatctatagcgcaggaatttgttgctgctgattatgtattcaag

SEQ ID NO: 202618 - DNA, 2589 bp, Zea Mays
cttcttcatgtagtttcaccatcaggcgatgctaattcttgttcatatatggccgtggcggttggcgtgccgccctcttcatcatcgggacagtgtaaatataagaaggacgatacatcagcacctaaaggaggtcataaggaatgaagcactgttacttcttacttatttgactcgggatgcagaggaaattcaaaaaattgttgtatttgagggtgtgtttgagaagatatttagcattatcagagaggagggctattctgacggaggtgtagttgttcaggattgccttgaattgttaaataatttaattcgacacaacgcgtcaaatcagatgcttttgaaagagacaatgggctttgacccattgatatcaatactaaagattaggagaggcagtgcatttaattttacccaacagaagacagtaaatctcctcgctgctttaaatactgtggaattgcttttgatggtgggcccatccggtgaagcaggtaaagatgctaacaagaatgcaaatcaaactgcattggctcagaaaaacattctggaccatcttcttttgttgggtgttgagagtcagtgggcccctgtcgctctccgctgtatggcactgcgttgtattggcaatttggtgttaaggaatcctcagaatcttgattctcttgcaagaaagcaagttggagaagagcctcatgttcaacctgcactgaatgccatcttatctataatcttacggacatctatagcgcaggaatttgttgctgctgattatgtattcaagtgtttctgcgagagaaatcctaatggccaggcattattagcatcaactattgctccacatccaaaccaaggagatattcatgaacctgctagtgacatgccttttggaagtgtacttctgcaagctctggtttctagtgatgtcaatggagatatggaggcatgctgcagagcatctagcgttctttctcacattatcaaggacaacttgcaaagcaaggatcgtgtattgcaaattcagcttgagacatctacagcatccttggggcgtactgagccggtattgcatcgtattgttacatgtttgtccatcgcagcttcaatggagggagaaaatgaccaaaacaaccaactagaggaaccgtacattcaaccttttattcttcggctactcatcatatggcttgttgattgttcaaatgctgtcaactgccttttggaatcagcggtgcatctgaacttcataatagagcttgcttcgaataaacgttacgccgcttgtgtccgtggattggctgctgttgttctaggtgcttgcatcctgtacaatgctagccgtgagaagggtcgtgatgcctttgccgtggcagatgctataagtcaaaagattggcctcacaacatacttcttgaggtttgatgaactgaggaaaagcttggcacatccgttgtcagagcagcatcaccgcaaggagctttcccgatcaagtgcgaatagcatgtcagatttccaagagattgaagaggatgaaacaaataagggcgatcaacaccctgtgctttcagaaatatttgattcacagtttgttaatttacttactaagcttgaggctgatattagagaaaacataatggatatatttagtcggacaaaaactgcaacagcagtccttcctactgaattggagcagaagaacggggaggtcgatgaagagtatatcaagcgactaaagtcatttgtagaaaaacagtgcaatgagatgcaggacttgctggcacggaatgcaatgttagcagaagagttactgagaactggtggtggtacgaccacagatacttcacagaaaccgagcagtggccgagaaagggtccagattgaagctctcagacaagaactggagggggcaaaacgacagataggggcactcaaaagtgagaagtcccagattgaagctgaagctaacaaccaaagaaacctttcagtaaaactggagtctgatctcaagagcttgtcagaagcttacaacagcatagagcaggccaactaccgcttggatgccgaggtaaaagccttgcggcagggaggcagcgtgccatatcctgacgtggaagcaataaaagcgcaagctaaggaagaggctgagaaggacagtgaggcagaactgaatgatctactcgtctgccttgggcaggagcaaacgaaggtcgagaagctgagcacaaggctggcagagctcggggaagatgtggatacccttctgcagggtattggcgatgacactgccattccggatgatgacgatgaagatgatgaagagtgattggtttatgtaacctgcaggtctgctggtgtaatctaccttcatgttgggtcatgatattgcgatggtaactggaaaatgtacagtggatgacaaatgcaccgttccaagtttaagttatttctagagaatgtgactaaatagcctcttgttaaatttgattgtctgaataactttttatattacctttgataaatagccccttgttgaatgggcctcagattcatcatcatatatactaaaaagaacgggtctgatctggtgtg

SEQ ID NO: 202619 - DNA, 2362 bp, Zea Mays
atcagcacctaaaggaggacatctaaatggatgatgcaacgctcaggcttcgcatagaatttaacttctctcttgatgcacagttaaatgcagtcataaggaatgaagcactgttacttcttacttatttgactcgggatgcagaggaaattcaaaaaattgttgtatttgagggtgtgtttgagaagatatttagcattatcagagaggagggctattctgacggaggtgtagttgttcagcatctcactcctagtcttaattctacttcctttgatgactggtgggaggaaatgcttttgaaagagacaatgggctttgacccattgatatcaatactaaagattaggagaggcagtgcatttaattttacccaacagaagacagtaaatctcctcgctgctttaaatactgtggaattgcttttgatggtgggcccatccggtgaagcaggtaaagatgctaacaagaatgcaaatcaaactgcattggctcagaaaaacattctggaccatcttcttttgttgggtgttgagagtcagtgggcccctgtcgctctccgctgtatgagaaatcctaatggccaggcattattagcatcaactattgctccacatccaaaccaaggagatattcatgaacctgctagtgacatgccttttggaagtgtacttctgcaagctctggtttctagtgatgtcaatggagatatggaggcatgctgcagagcatctagcgttctttctcacattatcaaggacaacttgcaaagcaaggatcgtgtattgcaaattcagcttgagacatctacagcatccttggggcgtactgagccggtattgcatcgtattgttacatgtttgtccatcgcagcttcaatggagggagaaaatgaccaaaacaaccaactagaggaaccgtacattcaaccttttattcttcggctactcatcatatggcttgttgattgttcaaatgctgtcaactgccttttggaatcagcggtgcatctgaacttcataatagagcttgcttcgaataaacgttacgccgcttgtgtccgtggattggctgctgttgttctaggtgcttgcatcctgtacaatgctagccgtgagaagggtcgtgatgcctttgccgtggcagatgctataagtcaaaagattggcctcacaacatacttcttgaggtttgatgaactgaggaaaagcttggcacatccgttgtcagagcagcatcaccgcaaggagctttcccgatcaagtgcgaatagcatgtcagatttccaagagattgaagaggatgaaacaaataagggcgatcaacaccctgtgctttcagaaatatttgattcacagtttgttaatttacttactaagcttgaggctgatattagagaaaacataatggatatatttagtcggacaaaaactgcaacagcagtccttcctactgaattggagcagaagaacggggaggtcgatgaagagtatatcaagcgactaaagtcatttgtagaaaaacagtgcaatgagatgcaggacttgctggcacggaatgcaatgttagcagaagagttactgagaactggtggtggtacgaccacagatacttcacagaaaccgagcagtggccgagaaagggtccagattgaagctctcagacaagaactggagggggcaaaacgacagataggggcactcaaaagtgagaagtcccagattgaagctgaagctaacaaccaaagaaacctttcagtaaaactggagtctgatctcaagagcttgtcagaagcttacaacagcatagagcaggccaactaccgcttggatgccgaggtaaaagccttgcggcagggaggcagcgtgccatatcctgacgtggaagcaataaaagcgcaagctaaggaagaggctgagaaggacagtgaggcagaactgaatgatctactcgtctgccttgggcaggagcaaacgaaggtcgagaagctgagcacaaggctggcagagctcggggaagatgtggatacccttctgcagggtattggcgatgacactgccattccggatgatgacgatgaagatgatgaagagtgattggtttatgtaacctgcaggtctgctggtgtaatctaccttcatgttgggtcatgatattgcgatggtaactggaaaatgtacagtggatgacaaatgcaccgttccaagtttaagttatttctagagaatgtgactaaatagcctcttgttaaatttgattgtctgaataactttttatattacctttgataaatagccccttgttgaatgggcctcagattcatcatcatatatactaaaaagaacgggtctgatctggtgtg

SEQ ID NO: 202620 - DNA, 2497 bp, Zea Mays
ctcaggcttcgcatagaatttaacttctctcttgatgcacagtcataaggaatgaagcactgttacttcttacttatttgactcgggatgcagaggaaattcaaaaaattgttgtatttgagggtgtgtttgagaagatatttagcattatcagagaggagggctattctgacggaggtgtagttgttcaggattgccttgaattgttaaataatttaattcgacacaacgcgtcaaatcagatgcttttgaaagagacaatgggctttgacccattgatatcaatactaaagattaggagaggcagtgcatttaattttacccaacagaagacagtaaatctcctcgctgctttaaatactgtggaattgcttttgatggtgggcccatccggtgaagcaggtaaagatgctaacaagaatgcaaatcaaactgcattggctcagaaaaacattctggaccatcttcttttgttgggtgttgagagtcagtgggcccctgtcgctctccgctgtatggcactgcgttgtattggcaatttggtgttaaggaatcctcagaatcttgattctcttgcaagaaagcaagttggagaagagcctcatgttcaacctgcactgaatgccatcttatctataatcttacggacatctatagcgcaggaatttgttgctgctgattatgtattcaagtgtttctgcgagagaaatcctaatggccaggcattattagcatcaactattgctccacatccaaaccaaggagatattcatgaacctgctagtgacatgccttttggaagtgtacttctgcaagctctggtttctagtgatgtcaatggagatatggaggcatgctgcagagcatctagcgttctttctcacattatcaaggacaacttgcaaagcaaggatcgtgtattgcaaattcagcttgagacatctacagcatccttggggcgtactgagccggtattgcatcgtattgttacatgtttgtccatcgcagcttcaatggagggagaaaatgaccaaaacaaccaactagaggaaccgtacattcaaccttttattcttcggctactcatcatatggcttgttgattgttcaaatgctgtcaactgccttttggaatcagcggtgcatctgaacttcataatagagcttgcttcgaataaacgttacgccgcttgtgtccgtggattggctgctgttgttctaggtgcttgcatcctgtacaatgctagccgtgagaagggtcgtgatgcctttgccgtggcagatgctataagtcaaaagattggcctcacaacatacttcttgaggtttgatgaactgaggaaaagcttggcacatccgttgtcagagcagcatcaccgcaaggagctttcccgatcaagtgcgaatagcatgtcagatttccaagagattgaagaggatgaaacaaataagggcgatcaacaccctgtgctttcagaaatatttgattcacagtttgttaatttacttactaagcttgaggctgatattagagaaaacataatggatatatttagtcggacaaaaactgcaacagcagtccttcctactgaattggagcagaagaacggggaggtcgatgaagagtatatcaagcgactaaagtcatttgtagaaaaacagtgcaatgagatgcaggacttgctggcacggaatgcaatgttagcagaagagttactgagaactggtggtggtacgaccacagatacttcacagaaaccgagcagtggccgagaaagggtccagattgaagctctcagacaagaactggagggggcaaaacgacagataggggcactcaaaagtgagaagtcccagattgaagctgaagctaacaaccaaagaaacctttcagtaaaactggagtctgatctcaagagcttgtcagaagcttacaacagcatagagcaggccaactaccgcttggatgccgaggtaaaagccttgcggcagggaggcagcgtgccatatcctgacgtggaagcaataaaagcgcaagctaaggaagaggctgagaaggacagtgaggcagaactgaatgatctactcgtctgccttgggcaggagcaaacgaaggtcgagaagctgagcacaaggctggcagagctcggggaagatgtggatacccttctgcagggtattggcgatgacactgccattccggatgatgacgatgaagatgatgaagagtgattggtttatgtaacctgcaggtctgctggtgtaatctaccttcatgttgggtcatgatattgcgatggtaactggaaaatgtacagtggatgacaaatgcaccgttccaagtttaagttatttctagagaatgtgactaaatagcctcttgttaaatttgattgtctgaataactttttatattacctttgataaatagccccttgttgaatgggcctcagattcatcatcatatatactaaaaagaacgggtctgatctggtgtg

SEQ ID NO: 202621 - DNA, 666 bp, Zea Mays
caaatgatgatttttgtcataaggaatgaagcactgttacttcttacttatttgactcgggatgcagaggaaattcaaaaaattgttgtatttgagggtgtgtttgagaagatatttagcattatcagagaggagggctattctgacggaggtgtagttgttcagcatctcactcctagtcttaattctacttcctttgatgactggtgggaggaaatgcttttgaaagagacaatgggctttgacccattgatatcaatactaaagattaggagaggcagtgcatttaattttacccaacagaagacagtaaatctcctcgctgctttaaatactgtggaattgcttttgatggtgggcccatccggtgaagcaggtaaagatgctaacaagaatgcaaatcaaactgcattggctcagaaaaacattctggaccatcttcttttgttgggtgttgagagtcagtgggcccctgtcgctctccgctgtatggcactgcgttgtattggcaatttggtgttaaggaatcctcagaatcttgattctcttgcaagaaagcaagttggagaagagcctcatgttcaacctgcactgaatgccatcttatctataatcttacggacatctatagcgcaggaatttgttgctgctgattatgtattcaag

SEQ ID NO: 202622 - DNA, 2463 bp, Zea Mays
gcgaggggcaggatctgatagcgaaagtattctgggcgagcgagtgctgtcggttgactgttgaaaacaaccagcgacctcgccatggatggaaggggatcgcgggggcaaccgattgaagccatggatgcggtagcggtcataaggaatgaagcactgttacttcttacttatttgactcgggatgcagaggaaattcaaaaaattgttgtatttgagggtgtgtttgagaagatatttagcattatcagagaggagggctattctgacggaggtgtagttgttcaggattgccttgaattgttaaataatttaattcgacacaacgcgtcaaatcagatgcttttgaaagagacaatgggctttgacccattgatatcaatactaaagattaggagaggcagtgcatttaattttacccaacagaagacagtaaatctcctcgctgctttaaatactgtggaattgcttttgatggtgggcccatccggtgaagcaggtaaagatgctaacaagaatgcaaatcaaactgcattggctcagaaaaacattctggaccatcttcttttgttgggtgttgagagtcagtgggcccctgtcgctctccgctgtatggcactgcgttgtattggcaatttggtgttaaggaatcctcagaatcttgattctcttgcaagaaagcaagttggagaagagcctcatgttcaacctgcactgaatgccatcttatctataatcttacggacatctatagcgcaggaatttgttgctgctgattatgtattcaagtgtttctgcgagagaaatcctaatggccaggcattattagcatcaactattgctccacatccaaaccaaggagatattcatgaacctgctagtgacatgccttttggaagtgtacttctgcaagctctggtttctagtgatgtcaatggagatatggaggcatgctgcagagcatctagcgttctttctcacattatcaaggacaacttgcaaagcaaggatcgtattgcaaattcagcttgagacatctacagcatccttggggcgtactgagccggtattgcatcgtattgttacatgtttgtccatcgcagcttcaatggagggagaaaatgaccaaaacaaccaactagaggaaccgtacattcaaccttttattcttcggctactcatcatatggcttgttgattgttcaaatgctgtcaactgccttttggaatcagcggtgcatctgaacttcataatagagcttgcttcgaataaacgttacgccgcttgtgtccgtggattggctgctgttgttctaggtgcttgcatcctgtacaatgctagccgtgagaagggtcgtgatgcctttgccgtggcagatgctataagtcaaaagattggcctcacaacatacttcttgaggtttgatgaactgaggaaaagcttggcacatccgttgtcagagcagcatcaccgcaaggagctttcccgatcaagtgcgaatagcatgtcagatttccaagagattgaagaggatgaaacaaataagggcgatcaacaccctgtgctttcagaaatatttgattcacagtttgttaatttacttactaagcttgaggctgatattagagaaaacataatggatatatttagtcggacaaaaactgcaacagcagtccttcctactgaattggagcagaagaacggggaggtcgatgaagagtatatcaagcgactaaagtcatttgtagaaaaacagtgcaatgagatgcaggacttgctggcacggaatgcaatgttagcagaagagttactgagaactggtggtggtacgaccacagatacttcacagaaaccgagcagtggccgagaaagggtccagattgaagctctcagacaagaactggagggggcaaaacgacagataggggcactcaaaagtgagaagtcccagattgaagctgaagctaacaaccaaagaaacctttcagtaaaactggagtctgatctcaagagcttgtcagaagcttacaacagcatagagcaggccaactaccgcttggatgccgaggagcaaacgaaggtcgagaagctgagcacaaggctggcagagctcggggaagatgtggatacccttctgcagggtattggcgatgacactgccattccggatgatgacgatgaagatgatgaagagtgattggtttatgtaacctgcaggtctgctggtgtaatctaccttcatgttgggtcatgatattgcgatggtaactggaaaatgtacagtggatgacaaatgcaccgttccaagtttaagttatttctagagaatgtgactaaatagcctcttgttaaatttgattgtctgaataactttttatattacctttgataaatagccccttgttgaatgggcctcagattcatcatcatatatactaaaaagaacgggtctgatctggtgtg

SEQ ID NO: 202623 - DNA, 2440 bp, Zea Mays
atggatggaaggggatcgcgggggcaaccgattgaagccatggatgcggtagcggtcataaggaatgaagcactgttacttcttacttatttgactcgggatgcagaggaaattcaaaaaattgttgtatttgagggtgtgtttgagaagatatttagcattatcagagaggagggctattctgacggaggtgtagttgttcaggattgccttgaattgttaaataatttaattcgacacaacgcgtcaaatcagatgcttttgaaagagacaatgggctttgacccattgatatcaatactaaagattaggagaggcagtgcatttaattttacccaacagaaggtaaagatgctaacaagaatgcaaatcaaactgcattggctcagaaaaacattctggaccatcttcttttgttgggtgttgagagtcagtgggcccctgtcgctctccgctgtatggcactgcgttgtattggcaatttggtgttaaggaatcctcagaatcttgattctcttgcaagaaagcaagttggagaagagcctcatgttcaacctgcactgaatgccatcttatctataatcttacggacatctatagcgcaggaatttgttgctgctgattatgtattcaagtgtttctgcgagagaaatcctaatggccaggcattattagcatcaactattgctccacatccaaaccaaggagatattcatgaacctgctagtgacatgccttttggaagtgtacttctgcaagctctggtttctagtgatgtcaatggagatatggaggcatgctgcagagcatctagcgttctttctcacattatcaaggacaacttgcaaagcaaggatcgtgtattgcaaattcagcttgagacatctacagcatccttggggcgtactgagccggtattgcatcgtattgttacatgtttgtccatcgcagcttcaatggagggagaaaatgaccaaaacaaccaactagaggaaccgtacattcaaccttttattcttcggctactcatcatatggcttgttgattgttcaaatgctgtcaactgccttttggaatcagcggtgcatctgaacttcataatagagcttgcttcgaataaacgttacgccgcttgtgtccgtggattggctgctgttgttctaggtgcttgcatcctgtacaatgctagccgtgagaagggtcgtgatgcctttgccgtggcagatgctataagtcaaaagattggcctcacaacatacttcttgaggtttgatgaactgaggaaaagcttggcacatccgttgtcagagcagcatcaccgcaaggagctttcccgatcaagtgcgaatagcatgtcagatttccaagagattgaagaggatgaaacaaataagggcgatcaacaccctgtgctttcagaaatatttgattcacagtttgttaatttacttactaagcttgaggctgatattagagaaaacataatggatatatttagtcggacaaaaactgcaacagcagtccttcctactgaattggagcagaagaacggggaggtcgatgaagagtatatcaagcgactaaagtcatttgtagaaaaacagtgcaatgagatgcaggacttgctggcacggaatgcaatgttagcagaagagttactgagaactggtggtggtacgaccacagatacttcacagaaaccgagcagtggccgagaaagggtccagattgaagctctcagacaagaactggagggggcaaaacgacagataggggcactcaaaagtgagaagtcccagattgaagctgaagctaacaaccaaagaaacctttcagtaaaactggagtctgatctcaagagcttgtcagaagcttacaacagcatagagcaggccaactaccgcttggatgccgaggtaaaagccttgcggcagggaggcagcgtgccatatcctgacgtggaagcaataaaagcgcaagctaaggaagaggctgagaaggacagtgaggcagaactgaatgatctactcgtctgccttgggcaggagcaaacgaaggtcgagaagctgagcacaaggctggcagagctcggggaagatgtggatacccttctgcagggtattggcgatgacactgccattccggatgatgacgatgaagatgatgaagagtgattggtttatgtaacctgcaggtctgctggtgtaatctaccttcatgttgggtcatgatattgcgatggtaactggaaaatgtacagtggatgacaaatgcaccgttccaagtttaagttatttctagagaatgtgactaaatagcctcttgttaaatttgattgtctgaataactttttatattacctttgataaatagccccttgttgaatgggcctcagattcatcatcatatatactaaaaagaacgggtctgatctggtgtg

SEQ ID NO: 202624 - DNA, 1304 bp, Zea Mays
cctgcgctgcttcctttgtcaggttcagtcgctcaccaatctgccgttcacacctctctcgctgcctttatttcctgttggcgacgctctcgccaggtcttcggcggcccgttcgtcggcgactagcgcctccgtttgccaggtcttcgtcgtccgttcgccgtcgactggtgcccagcaggtacatctggaagaatggtgatttaccttagcacaccaaaaaccgacaaggtatccgaagatggggaaaacgataaacttaaattcggactttcatctatgcaagggtggcgtgcaactatggaagacgctggaccacactctgactttactgggccaaattgtgggagtacagcatgtgtagcattagtgagaaataggcaactcgttgtggcaaatgctggtgactcccgctgcgtcatctcaaggaatggccaggcatacaatttgtcaagagaccataaaccagagcttgaggcagagagagaaaggatacaaagtgctgggggttacattaaaatggggcatgtaaatggaagtttaaacttgtcaagagctattggagacatggagcttaaacaaaacaagttcttgtcccctgataagcaaattttgaccgcaaaccctgacataaacattgtcgagctatgtgacgacgacgaattcattgttttagcatgtgatggcatttgggactgcatgtcaagccagcagttggttgatttcatccgtgaacatataaacacagaggaaagcctttctgcagtatgtgaaggagtgcttgatagatgcctggctccatcgaccatgggtggcgagggatgcgataacatgacgatgatcttggtgcagttcaagaagccatttgctcaggtaaaggatgccagtgatgcggaacaactaactggagatgcgggatgctctgagacccatggggccgaggagaatgactctgacaagcagatatagcgaagacaggactcttttggagtcttggtacatggcctgacgctgaacctgggtaaaacaggagtacgatgttgcaatgtacataccaaccatgcgctgagttggcgtgaaggatatattcattgttccactgttgtctttaaccaaacgtgctgttttcttccggttgtgatttttggtgacctgatcatctgacaatatctaattatacatttgggaggaaatgatgttacaatagttattgtgggtgtttgtttgggattataatttgttcagattatataatctaacttattttaaattaaactgttagttcaaaataagttagattatat

SEQ ID NO: 202625 - DNA, 1308 bp, Zea Mays
cctgcgctgcttcctttgtcaggttcagtcgctcaccaatctgccgttcacacctctctcgctgcctttatttcctgttggcgacgctctcgccaggtcttcggcggcccgttcgtcggcgactagcgcctccgtttgccaggtcttcgtcgtccgttcgccgtcgactggtgcccagcagccaggtacatctggaagaatggtgatttaccttagcacaccaaaaaccgacaaggtatccgaagatggggaaaacgataaacttaaattcggactttcatctatgcaagggtggcgtgcaactatggaagacgctcactcggctttgctagatcttgacaatgacactgcatcctttggtgtttttgatggacatggaggaaaagtagttgccaaattctgtgcaaaatatctacacatagaagttctccataccgaagcctatgctgctggtgacctgggtgctgctgtccacagagcttacttaagaatggatgaaatgatgcggggtcaaagaggatggcaggaactccaagcacttggagataagataaatcagttcactggcataacagaaggcttgatttggtcccctaaagcaagtgattcaaatgatagacatgatgattgggctttcgaggaggtcgagctatgtgacgacgacgaattcattgttttagcatgtgatggcatttgggactgcatgtcaagccagcagttggttgatttcatccgtgaacatataaacacagaggaaagcctttctgcagtatgtgaaggagtgcttgatagatgcctggctccatcgaccatgggtggcgagggatgcgataacatgacgatgatcttggtgcagttcaagaagccatttgctcaggtaaaggatgccagtgatgcggaacaactaactggagatgcgggatgctctgagacccatggggccgaggagaatgactctgacaagcagatatagcgaagacaggactcttttggagtcttggtacatggcctgacgctgaacctgggtaaaacaggagtacgatgttgcaatgtacataccaaccatgcgctgagttggcgtgaaggatatattcattgttccactgttgtctttaaccaaacgtgctgttttcttccggttgtgatttttggtgacctgatcatctgacaatatctaattatacatttgggaggaaatgatgttacaatagttattgtgggtgtttgtttgggattataatttgttcagattatataatctaacttattttaaattaaactgttagttcaaaataagttagattatat

SEQ ID NO: 202626 - DNA, 2192 bp, Zea Mays
cttcctcttccctcggctcttcgcgcctcgcctcgcctcgcctatatataacagtctcgcgccaatcccctcattcatcagacggactcacagctcgcagcacctgcaccacttgacaaccagccagctagctaaccaaccggcggagccaagaacaagcaagagacaacttgccccgtccaggcagcatgtgcaactccaacgtcaagtccgcgggcgtcgcccagatcgacggccgcccggtgctgcagccggcgggcaaccgcgtggcggcgccggacgccgcccgcccgctcaagaagtccctgcacaagtccttctccatgccgccttcctacgacaacaatgccaccgtgcccgcccgtcccgcccctgccgagaacacccgtgcggcgccggcgccgccttctctgctgcctcctacgacgccggccccggccccggccgccgcgagggcgaccaaggcggcgggcgccgtgcccgcggagaagcccaggtccaaggccaggaagcccggcgccgtgctgccggtggcgacgttcgcggcgccagaggcgttcgagccggcggggagcatcgccgcggcgcggcgggagcatgccgcgcaggcgcaggcgcagcgcaagtcgcggatcgcgcactacggccgcaccgcgtccttctcccgggtggagggccgagtcggcgccaccgccacggccgagccggccgtcccagcctcccccaccaccgggctcgacgagaagcgctgtagcttcatcacgccctactctgaccccttgtatgtggcgtaccacgacgaggagtggggagtgcccgtgcacgacgacgagttgctgttcgagatgctcacactgtctggcgtgcaagtcggggccgattggacttccatcctcaagaaaagacacgtctacagggaggcgttctccggcttcgacgtggatgcggtcgccaagtacaccgagaagcagatggcgtcgctgagcgccgactacgggctggatttgggcaccgtcagaggaaccgtcaacaacgcctgccggattcttgaggtaccgtcgtcaacttgattgacctcagtcctcagttgaagttggtagtgtttctgataagatactagtagttccagtaccacatctcgcaaccgaagcttaaccgaaagatgaagggaagcggtcaattaatgaagggaaggccttaggcctgtatgaaacgaaaccagtttagcaactgaaagcgaagtcttagctgaatccctgaaccctctccgtctgagccgcgttctgccctttattatttataaaggtgaccaccctggcgatgcgccgcggagcaagtgcgtcgtaaaagcagctgggcacagccaaaaagagtgagcccttgttaatgggcattttggggacggagcaggaaaagatgctggttgtacttgttcgtcacgcctttattagttttaagctttgcttcttcacattctcgcgaacgcaagatgatgtcccgcgcgtctccggcagaggagtaccgtgtgttgcgcaccactctgtcgcggacaaggttccattttccaaaacgggccactgtttagccggttccctctaaccaccaatcaggcagtgctcggtagctgctgccacaccacctaaactaatctatctatcggtcaagtagttactactattggtgcggagggacttttgctcgctggacaagtacgtgtgggcgttcgtgaacaacaagccgctgtcgccgagctacaagtacagccggaagatcccggtgaagacgtccaagtcggagtccatcagcaaggacatggtccggcgcggcttccgcttcgtcggccccactgtcatccactccttcatggaggcggtcgggctcaccaacgaccacctcgtctcgtgcccgcgccaccgcgtctgctccgccgccgcccgcgtaaataactgattctgctgacgaccaccaagcaaaacacaagagggaattatctaaggacaaccaagacgagagagagagagagaggtagcagtagtaatatacaaaagagagtgttggcggtttgcatgtgtgtatgatgacccagtgtgcttgtgtagattaattacggcctctgattagcgaatgaatgatcttgcttgctgtgaattgcatgcccctctggaccgctttaagggcatatgaagagacac

SEQ ID NO: 202627 - DNA, 1459 bp, Zea Mays
catccgcccactgccaaacggccccacaagctcagcgcggcggcctcgtcgctgcataaagcccctacctaactccaaatctcgccagcgccaggcctcgccgagccggtggaaacctcgtgatctccgccgcctcgagccctccgcgcgcctcttccagagcaccatccactcttcggtggcgaggccgcggctccccgagacgggcaatgcagagcgcggctgccatcgggctcctacggccatgtgccgcgcggccgctcgccgcctacactagcccacgccgcggcgccggcgcgtgcagcggcggcacccagccgctcatcacgccccgcggcatccgcctctccgcccgccccggtctcgtgccggcctcgccgctggaggagaaggagaaccggagatgcagggccagtatgcacgcggcggcgtcggccggagaggaagctgggggagggctcgccaagacgctgcagctgggggcgcttttcgggctctggtacctcttcaacatctacttcaacatctacaacaagcaggttctgaaggttttgccataccctataaacatcacaacggtgcagtttgctgttggaagtgccattgctttgttcatgtggatcactggtatccataaaaggccaaagatttcgggtgcccagcttttcgctatccttcctctagctattgtccataccatgggcaatcttttcacaaacatgagccttggaaaggttgcagtgtcatttacacatactataaaggccatggaacctttcttctcagttctcctttcagcaattttccttggggagttgcctacgccatgggttgtgttgtctcttcttccgattgttggtggtgtagctttggcatcccttactgaggcctcctttaactgggctggattttggagtgcaatggcttcaaatgtaaccttccagtcaaggaatgtgctaagcaagaaacttatggtgaagaaagaggaatctctcgacaacattaacctattctcgatcattacagtcatgtcattcttcctgttggccccagtaaccttacttacagaaggtgttaaagttagtccagcagtgttgcagtctgctggtttgaacttgaaacaggtatacacaaggtcattgattgctgcattctgcttccatgcataccaacaggtatcatacatgatcctcgccagggtatccccagtcacacattcagtgggcaattgcgtcaagcgtgtggtggtcattgtgacctctgttctgttcttcaggacccctgtttctcccatcaactctcttggtaccgggatcgctcttgctggagttttcctatactcgcaattgaagagacttaagcccaagcccaagactgcttgatcatatacatttattcgcacggaacataaattgcgaggttccaatggacttagagctctggcgatgtgcgacgtgaa

SEQ ID NO: 202628 - DNA, 2507 bp, Zea Mays
ctacttgctctgggtatggccgtatggcgcggagagggaacaggctacagagggagaggacaaccaaatcgggcaatcagctgggcatcctcgtgttgcgcctgcgagcaggtcatcgagggagtggcggttgcgtggagaacacataccaaccagccgcgaccgagaagggcggggcgaaggaaggacaacgtgtggctccgctccacgggacgacggcggcgtctcagggtccggacagatcttttttgcgcagcggcagggagaggagacggatggacatggatggctacgagtcagacggaaccaggagtagagttccatacaggctgtcgagatctcctcgtcacagcctactcccatgctatggtgatggagaaggatgtcgccgcaacactgatctcaccacggtcaggatggagaacgaccgttgtgctcagcgaagccaccactcctagagagacgagcagcgtatgtcgtcgtcgtccgacctcgagcagcaggtggccaccgccctccgccgtgtgacccccgtcgccgccgcgcctgctgtagaccgtggaggcgcgccggatctggcggcggcgattcagcgccgaatggcctcgcaacgcgccaggggtgccgacgcgttctacgcgaagttcgcgtcggcccggtcgctcgccgaccagaccttctcacgccgacgagtacagctgaagggactcaaggatcagctccgggacctccagtcgcagctcagggagtctcttacacttcagtcgtgcaaggaatggaaatacaggattgccacggagccgatgtcggaggccacagctacgaatgagcggctccgtagctgggttgcggatttcagggacaagaggaacaagggtgctgcaatcgtatttgagcaacttcaagctgtcgaatcacttgaggcaaacagtaatgaagatgcagagatggcggagaaggtaccaaaagctgttctctggtacaataagttccttggcttccgggtgatcggaggagaaagaggtgtgaagttcgtgttcgacaagattgacccacagcgtccggagaaggaatactcgtttcgcgtaagtccgagatcacaatgtgagttgaagctccttcaagtgtctggccatcaggccatgtgcctctgttatataattcgttttgttccctccattttccacatgcatatttttcttaaagttattgctctttcacatcagtcatcgatagtgatcctcatgtcaaggacattgatgaattggcgaaggatttggatttgaacgaacatctattcgagtttgtaagaatggccagagagaaattccagtctcccttcatgaacggtaaccagcaatttttgtattctttttacgataatgtgaccaagtatcatacttaattacttattataaacatcttctgcaaatataaacaatccgaatcttctttccctaaaatactggcaaggggcaataggtttaagcagagcagacttgcaagtaaacatgtgactttgcctcaaatacatcctttatatgtagatgcaggacaataggacatacaatgtatacactgtcaagtttcagttgaagacatacaatctatacactgtcaagtttcagttaaagaggctctatggtcttgttattatgtagttttggctgcgtggaagttccaaagcatatttttaatgttgtcgcaaaatgcaaataatatggtgcatgctttccaatctagaaaccagttctcattttttccttccttccggatatggagcgggcccttttatgaccaaagatttgtgtatggaagatgagattgtgttcttcttgttctcctctggaagctgtcggctaactcttgtcactgcgttcctcagagacacttcctgtaagcccagatgcctctgccgcaccactcccgtctcccatggtggtgtcagttaacagcagaagcggggaagctcacagtcaaacccaatctctaagcaagaacagtgcacggttacttcctgctaagagaggcgccacagccctgccaggagcttctcctggtgttttgcgtcgttccccacgtctcgagggaatgcggtgagctagttagtagccgtagcaggttccgacccctggatcttgaaccaagcgatcatcatcagctcatataaaccgtggtgattcagctgcccttgcttatgggtggtgcttttttctcccttctaatctaactggaacttatagaagtgtatggttggcaattggccgggtacagtgattaaccctaacctggcctgtaatatattgttatactctggtcattagatgatgagttcgtgagtcgtgtcctggtctgttgtatggtgtcaaatatatagcaggtgttgtttttgtgtgacacccggatttaagggtaaatccggacgtgaattaaatgtgtgctatgatcaagttttacacatatgatgatttatgatatagaaatcaatgtcacatctttattatata

SEQ ID NO: 202629 - DNA, 813 bp, Zea Mays
cttcacttcagtgactgtggcacagtaattactaagtgaaagaagaggcgacacttccatgtttggcataagtcgaatttgatgatgaaggcaaagtttgtggtgttacctcagaaggggagactgcaaaatgcaaaaaggttgtctgtgatccttcctacctacctgacaaggttaaaaaaattggaaaagtttttcgggcaattgctatcatgagccatcccatcccaaatactgctgaatctcactcagtacagatcatattaccacagaagcaacttggccgcagatcagacatcacaagcggagactgataatccagagaaggaactaaagccagggatcgatcttcttgggaaggtggacgagttatttatcgacatatatgacagatatgaacctaccaatgactcatcagcagacaattgtttcatctcaacaagttatgatgccacaacacactttgagtccactgttatggatgtactttccctttacacaaagatcaccggaaagactgttgatctcagcgtggatctaagcgctgctagtgctgctgaagatgatatgtgatacttatcgtagtgctatgtggcgtagtgtggaaaatatttaattaagctttgctttggcaacgattattaggttcacctttatttttccaattgttgttattagctgtgttgtgaccatgattaaagattgcatgctgtaaatttgaaggcattttttttatcaaaagttgttaacgcggtgatccgtgtttagatttttgaagggtaactacactggtggtatcaaaactaaaaaaaa

SEQ ID NO: 202630 - DNA, 1463 bp, Zea Mays
aaacagttcggtcatcatcatagtattgattgatctggtgttgcacatggacaggaatgactactacggcggagactccacatcgctcaatctcaatcagctctggaaacggttcaagggtgaagaaacaccgcctgcgcacataggagctagcagagactacaacgttgatatggttccaaagtttatgatggcaaatggtaccttggttcgtgtgctcattcatactggtgtcaccaagtacatgtccttcaaagctgtggatggaagctatgttttcaacaagggaaagatccacaaggttccttctactgacatggaagctctcaagtctcccctgatgggattgtttgagaagcgaagagctgggaaattcttcctttatgtccaagattataaggaaaatgacccaagtactcataagggttacaaccttactaaactaacgacaaaagaacttatctcaaaatatggtttggatgataatacgatagacttcattgggcatgcagtggctcttcatagagatgatagctacttgacagaacctgcaattgacactgtaaaacggatgaagctttatgcagaatcagtggctcgctttcaaggaggatcaccatatatttatcccttgtatggtttaggagaactgccacagggttttgcaagacttagcgctgtttatggtgggacctacatgttgagtaagccagagtgcaaggtcgaatttgatgatgaaggcaaagtttgtggtgttacctcagaaggggagactgcaaaatgcaaaaaggttgtctgtgatccttcctacctacctgacaaggttaaaaaaattggaaaagtttttcgggcaattgctatcatgagccatcccatcccaaatactgctgaatctcactcagtacagatcatattaccacagaagcaacttggccgcagatcagacatcacaagcggagactgataatccagagaaggaactaaagccagggatcgatcttcttgggaaggtggacgagttatttatcgacatatatgacagatatgaacctaccaatgactcatcagcagacaattgtttcatctcaacaagttatgatgccacaacacactttgagtccactgttatggatgtactttccctttacacaaagatcaccggaaagactgttgatctcagcgtggatctaagcgctgctagtgctgctgaagatgatatgtgatacttatcgtagtgctatgtggcgtagtgtggaaaatatttaattaagctttgctttggcaacgattattaggttcacctttatttttccaattgttgttattagctgtgttgtgaccatgattaaagattgcatgctgtaaatttgaaggcattttttttatcaaaagttgttaacgcggtgatccgtgtttagatttttgaagggtaactacactggtggtatcaaaactaaaaaaaa

SEQ ID NO: 202631 - DNA, 1549 bp, Zea Mays
agccgcgaccgcgacgcgcagtgccgtcggtttcctttttccatttcatccctcccactccgtggtccgtgcggcctcctctgccggcccgcagcccgctcggcaaccagacgtccagacctctttgggcgaccgtgactcgagccgttggagatccacactttcctccctccatcgtttctcgatctctcgaccgggcgagggcgacgccgcccgcgcgcgcgccatggatgtggagtacgacgtgatcgtgctgggcaccgggctcaaggagtgcatcctcagcggcctcctctctgtggaccgcctcaaggtgttgcacatggacaggaatgactactacggcggagactccacatcgctcaatctcaatcagctctggaaacggttcaagggtgaagaaacaccgcctgcgcacataggagctagcagagactacaacgttgatatggttccaaagtttatgatggcaaatggtaccttggttcgtgtgctcattcatactggtgtcaccaagtacatgtccttcaaagctgtggatggaagctatgttttcaacaagggaaagatccacaaggttccttctactgacatggaagctctcaagtctcccctgatgggattgtttgagaagcgaagagctgggaaattcttcctttatgtccaagattataaggaaaatgacccaagtactcataagggttacaaccttactaaactaacgacaaaagaacttatctcaaaatatggtttggatgataatacgatagacttcattgggcatgcagtggctcttcatagagatgatagctacttgacagaacctgcaattgacactgtaaaacggatgaagctttatgcagaatcagtggctcgctttcaaggaggatcaccatatatttatcccttgtatggtttaggagaactgccacagggttttgcaagacttagcgctgtttatggtgggacctacatgttgagtaagccagagtgcaaggtcgaatttgatgatgaaggcaaagtttgtggtgttacctcagaaggggagactgcaaaatgcaaaaaggttgtctgtgatccttcctacctacctgacaaggttaaaaaaattggaaaagtttttcgggcaattgctatcatgagccatcccatcccaaatactgctgaatctcactcagtacagatcatattaccacagaagcaacttggccgcagatcagacatgtatgttttctgctgttcctactctcataatgtcgcatcaaaaggcaaattcatcgcattcgtgtcagcacaagcggagactgataatccagagaaggaactaaagccagggatcgatcttcttgggaaggtggacgagttatttatcgacatatatgacagatatgaacctaccaatgactcatcagcagacaattgtttcatctcaacaagttatgatgccacaacacactttgagtccactgttatggatgtactttccctttacacaaagatcaccggaaagagagttccatgtcaagccacagtgcaatttttcatctgg

SEQ ID NO: 202632 - DNA, 2261 bp, Zea Mays
caaccacgccatgtggaggttgcgatcgcagcgcacacatgttcgcgtcgccggcggccagctagccatgccgcatacgcccaccggaccggacacgcagggcgcatgtgtctccgcagtcgcaccgcacgggccccgctctcgccatccgccctagcgcacgcatctcggcgcgtgcccccaacggagccgtccatgacgtaccgcgcgccgccgcctccgcgcattaaaaaccatcgatcactgaccggctcccgaggagacttggcttgtactgcatcgcaaaccgcaatcgcacgcggcacttgccccccgcgatcataacctcaccgcccgccaccagctgcagccacaagcgcagcgctcgacagcctcaccagccgccatcactcgcggcagtacccggccgctgggactgcaagagtggggagtgagacgctgctgctgttgccgagcgcgaggagacactactactcactcaagagtcaagactcaacagcagcaggggcgaccgagctctgcgtgcgtggggagaaccggagaaggcagcagaggagggagggagggagcgcgtggaccaggctaggcgcagcagcatgggcgccgggatcagggtcctggcggcgctcttggcggcgctcgcggcagccaccgccggcgtgacggcgcagctgcggcaggactactacgcggcggtgtgcccggacctggagagcatcgtgcgcgccgcggtgtccaagaaggtgcaggcgcagcccgtcgccgtgggcgccaccatccgcctcttcttccacgactgcttcgtcgagggctgcgacgcgtcggtgatcctggtgtccacggggaacaacacggcggagaaggaccacccgagcaacctctccctggccggcgacggcttcgacaccgtcatccaggccaaggcggccgtggacgccgtgccggcgtgcgccaaccaggtgtcgtgcgccgacatcctggcgctggccacccgggacgtcattgagctgcggcgcacacggtggggttcgcgcactgcagcacgttctcggaccggatccagccgcagtcggtggacccgacgatgaacgcgacgtacgcggaggacctgcaggcggcgtgcccggcgggggtggaccccaacatcgcgctgcagctggaccccgtgacgccgcaggccttcgacaaccagtacttcgccaacctggtggacggccgggggctcttcgcctccgaccaggtgctcttctccgacgcgcggtcgcagcccaccgtggtggcgtgggcgcagaacgccaccgccttcgagcaggccttcgtcgacgccatcaccaggctcggccgcgtcggcgtcaagaccgacccgtcgctgggggacgtccgccgcgactgcgccttcctcaactgaaaaaggatgataagcgctagctagtaggtgtaagcatcggctggcactcacctggaggaagaggccggcttttggtcagtggtgacatctgatggatgtccaatcacgcaggatgccaaaaggcccacgcctacgcatatgaacggtgaaatatagcgaactctaaatagcaaacactgctggagggctcttggacgctaagaaacgctacatcttctcgcaccttactttgttgttcttactttatagtttgatttgtggaatggaataagttaattcatcaatatttcatttctcattaactaataatcaataataatataaggaataagttcatttatagaataaactcattatacatcatatcttatcatttagaatggattaattgttcgaaccaaacactccgtgaaggaccgttggtggacaagccagctagcgtcaaaagctgcgttccgacggctgtgcatgacagtgggactccattgccggatgagtcagtcagcgcgtgcaaggagcaaggccggccgaccccggtggatgctagttgctagcctggttggactagtggggtgtgactgttcacacatacgcacgcgggccgacgcggacagggcgcgtccaaggcggactcactaggcctgggcattcggttcttcggttcggttcagttcggtttctcggttcttgtagaaattcggttcttcaaaaattagaaccgaaatagcaagataaagaaatcagaaccgactagttcagttctcggttcttcggttcggttcctcggttctaaccgaactgtaacagccaccctaaaattatgaataacgacaacttttgtgagaaatttcag

SEQ ID NO: 202633 - DNA, 1393 bp, Zea Mays
atggagaagctacatgccccatgtaagggtatgctcaggaagaacacccatgggtctggacccccaccatcactccacttgtcttccttttatcccactcatcaggcgcagtctgaatccaatccagtccgggccgatcgccatggcaaccgccaccgctcctgcatatatacctaccactgcacatgctgccaggcccagcttcacaagctaggtgtgtcagcccaaaaccaccaaccagcccgagcttttctttgctgcctgccgcggcgcgtcgcgacccgggccgacaagatagggtcggaaagccccgccgccgacggcgtcggcgacgccgcgcgcaagcggcccagcggcgatgttggccccaccccggggccagccgacaagcgccgccgcccggagcacccttcttcctcctccgcgggctcccgcgaccgccaccaccaccaccacggccgccgcccgccgtcctcggccgacgagaaggtggtggtgagaatgttgattctgatcgaagatgggtgattggtgtattgaccgaggagggatttgagaacaaagataccttttatggtagctctgggttcctttgtgccgcacatccaatattccgcatgctaccaccatctggcaaggaaaagaacttcatgtactgccacctacatcctcagataagagcttatgaagcgaatccaaagcccgttggcttagcatttggtggaacaattggaaatgagaggatctttcttgatgaagacttctcgggagttttagtacgacaccatgctgttgataaaacttatcaacatggctctctcatccccaatcagggttatttgcctgttgaggcttcagtgcttgatgttgaggtatgggggctgggtggagaagcaacgaaacgacagcagaatatgtacaagaagagggaggacatcttctcagagcagcgaagaaaggttgatctcaaaacttttgctagctgggaagactctccagagaagatgatgatggacatgatgtcggacccaaacacggttcgacgggaagaccggtgattttggtttgcagcctccggggatgtacagacgacagcgtttgttgcacataggagtattttgcttgcgcatttggctgggtcacacgctttatttaggttgaagtactaaaagaagatttgtacagaacgtaattcccaataaatgaaatggagattctggacaggtctatggtgtccaagcttgctgacatgtcttacggtaccccttttgctggggaggttcatgttgatgttggtgttgtgtggcacaatggctgccagatactgtaattgttatggctgaacgaactgatgaaacaatgctggatttttcatgagcggagcttaattata

SEQ ID NO: 202634 - DNA, 751 bp, Zea Mays
gtggatggcatcgagatggccaatattgaatggaatggaggctcggatactatggatgaaattcttgttaggatacaacaactggaagaagcagtagtaaagcgtgagcgagctatggcgtacacgttcaaccatcagtggagagcaaggtctgccacaagtctaggaaacttcagctatgaagtcggtaagggtggctggggctggagctggatggaccgctggatcgtagcacgcccatgggagtcgcgatccatggtccaccctgagaacccgaagaaagcacaggcgaagaaagagaacaccacaaacccattagctctcaagctacaaggctccattaccctaagcaacaatatcaatgaccggaaaaccctgaaaaagaagccattgccttcagcttctcttactgatcagaagaagccatcaccgtcgccttcttccgatcagaagaaaccagtaccgaaggagcagagagcaaaggcagctggcactcctccaaaaccaaaggccaaatatatgaaggggagtcaagagaaaaagccacaaccacaacagagagtgtctcctccgctgagccaagaagcaaaggcgtacgctcaagagaatggtctcttcttcatggaaacttctgccaaaatagctaccaatgtgaacgacgtgttctatgagattgcgaagaaactgcttcaagggcagcaggttcagaacccacaaggcgggatggttctcaaccagagaccacctgaga

SEQ ID NO: 202635 - DNA, 760 bp, Zea Mays
gtccgccgcatcttacaactcaataaggcaaaccaccagatcaccacaaagatacaaaggcgcatttatgggcatgccacagatgtggcgatcaggcctttggatgagcagaaagctgttcaagctgctacagatctcatcggggaagcctttatcttctcggtcgctgttgctgctctaatttttgaggttcagagaaacgcaaggtctgaggctaggaaggaggaagctcgtagacaggaacttgaggaattgaaacgaagggaagagagtatagctaaagaattggaagatcttaaattgaagcttagtgaaattgagcagcttgctaaagggcgaggcctgacaggaatcttgaacttgaaacgggtccatggcacagaggtcggcaaggcagcagcacctctgcgtgagtaagcaatccggctttggcgcaggaaagtatgattccttgtcgcccccattatttggtaagacttgtgttgtcgtgctcaacctattctttggtgctcatattggatccacatttgtagtggttgatccatggacaccctgagacagtggtaataatacagcgtaacaaagaaatcaaattaaagcgcaatatgtatgtgctacttggtggcggtgaccacaaaatcagatgttaagatggattagggcttgtttggttgtatacttaaggtgtaaaaaatgccacgtttcagattaaagctggttgtttggactgttgcaactataaacgatagagacaaaaaca

SEQ ID NO: 202636 - DNA, 3540 bp, Zea Mays
tctctatccggcgccgcgagtcactttcaccagctctcactcttatccgcctgcgcgcccaccgcgccgcccacccgcgcccaccccagcgccccaaataccgctccaaccctagcctcccgccacgcctttcgatctcgggcggccatgggcaactgctgccgctcgccgaccaccatcgcgtgggaggacgtcagctcctcgcacttccccgcatccaacgcaaagaagaagccgcaccaagcgcggaacggcggcggcggcgacgggcagaagcggctctcggttctggccgggcgacgaggggagctgctcgcctgcaagtccatctccaagcgcaagctgcggacgaccatcgacgtggaggacgtgcgccgggaggtggccatcatgcgccacctgcccaagagcccgagcgtcatgtccctgcgggaggcgtgcggggacgagggcaccgtccacctcgtcatggagctctgcgagggcggcgagctcttggaccgcatcgtcgcgcaggggcactacaccgagtgcgccgccaccaatgtcacccgcaccatcgtcgtggtcgtccagctctaccatcggcatgacatcatccaccgcgacctcaagccggagaacatcctcttcaccaataagaaggagaactcgccactcatggtctctccatcttcttcaagcctagtgagtcacaccagccgagatcctttcccaatttcggacgattttctgcgcacttccgtgatttctggttttagtgggaggaaatttgacggtagagctcagagtagcaaaatgtacttcttttttcctgcaatccataaaacatgtggttattactagctctgcatcccggaaacaacttggtggttctttcataggcaattggctattactagctgcaagatagtatttggtagtgatctggtagatactgttaatctcctttttttcaggataatatctagtggtactgacgataattttcaggacatcggttcaaccgagctctttcttccctattacagagcattttggtttgatgaagaatgaaaatatattgtgttgggctttgcctggttggtacatcaaagtcttaggatgtttgtggtgtggtacacacttttgggattatgatgaacaattagtggtgcataaggtgtgaaatctgtttagtatcacattcattgttatcgatacattatttctttgatgctggaaggtgaatatgtgacaatgagcacaggttccgctactgtgtagaagttatataacactgaattgttagtattttggaattcagagtgcatgtgatatacattcttacacttgaagaattataattataaattcatgaaacatttaatagtatttactctaggtagagttcccaaatacagcatacgtagttacttgatttgcatcaacttatccagtgagcttagtggttaggatttgtgatattgataagtaagataaagtggtactatagtatgatactgctgtggatgttttcttttgtgacagcgaactctttatagaggattcatgtcaggtgcttcttttcttgcccattctctatgtgcttttggtattggacccccactccccccatccccgtacccacccacacaaaaagagctaactaagaatagcccatgtgccattttgtcatttagatttgcatcttaaatgttgattattttatgaaatactgtgtacacaacacgaggacagtccactctgacttaacttactgagtcacttgagtattcagctcatggagcagatttatatgtcaccgtgcaaactttgttttaaagaaaaatggtcttatgctgctgaaaacttgtcgcttaagttatatgtcgtagaaagaaattggtacactcaaataccatccaaagtctgctcggttatactttattactcacggtaaggtcccatacttggaggagatgagaaagaagaaagttgaaagatgggaccaatttgttgatgtcatagagcaaattaagaaggttgcatctgaaatcaggcctgcagattttgtaccctttagaattcatgtggatcagtctgatcagtctttaagaaagctggaggagctaacgaaagagctgcaatcccttcagaaggagaagagtgatcggctgaagcaagtcatggaacatcttaacactttgcattcgttatgcgaggtgcttggtgtagacttcaaacaaacagtaaatgaggtgcaccctagcctgggtgaggctgatgaatcaaagaacctaagcaactgtacaattgaaagccctgcatcagctacaagcagactgcgtgaattgaaagtccagaggatgcaaaagcttcaagatttggcctctagcatgcttgaactttggaatctcatggatacaccacttgaagaacagcagatgttccagaatgtaacgtgcaatattgctgcttctgaacatgaaataactgagcctaacaccctctctattgacttcctcagctacgtggaatctgaagttttaagactcgagcaacttaaagcgagcaagatgaaagaccttgttataaaaaagaagacagaactggaagagcataggagacgtgctcatttgtttggcgaggaaggctatgcagctgaatttcgcgatgaggctattgaggcagttggatgacacaatcatcaaaaccattgagactgctcccaacaatgaactgaaaaaagcaaaagaaatcattcaacgtattcgccgaagagaactttacaaggctggaaaaaagttgcttctcattactaattcagatttccattatacaaacaaaatgatgaatcatgcattcaatcgctttcttcctaatgatgtgggatggagagatctgtttgaaatggttatagtctctacaaggaagccagaatttctccagctttcacatccattgtatgaggttgtaacagatgatggactgatgcatccctgttttaaagtaaattcagttttgcaaccagtattctgttccaaaggacaaactagagcatttcaaaaatattactgcacaggacatagtttgttcgcagaaatcttctgaggtgctgctgaaggaagaggatgttgcagtaagcaatgttaagatagatcttactcgtggaaaagataacccccttgacagcatcaagttctttaaggattccggctctcatcaagtgactcctcccctcacgatgactttgcggacagatgtctcaattctagtggtggagctacgaacaacaatccgatgtcctgatcgagagcgatggagctaatgtttgaacttgtgtttgaacttgtgaactatggatgtgaacttgtgtgaatttgtgaacttatgtatttgaacttatgtgaatttgtgaacttatatatttggacttgtgtgaatttgtgatatgaacatatatcaatgtgtttgaaatctgtattgtatgtgatattctgtgttgcatgtgatattatgtgtgtctaatttttcatttctgtattttttatttttttc

SEQ ID NO: 202637 - DNA, 1467 bp, Zea Mays
ccatggtgcagttagtgaaactaatttgatgttgtagtgtaggtgttgttacattatcctatggtcttggtcaagactctaagttagagaagcgacttaggacaaaaccaaagggaactgtaattaggaacgaggtattcacagtagagtactctttaatttgtaagatacatgagtatgcaaaaccttatatatgcttgatggatggagtgacaatgggatttggaattgggctatcagggcatggccgctaccgcattattacagagagaacactcctagccatgcctgaaaatggtattggcctgttcccagatgttggctttgcttacattggtgcaaaagcaccaggagggggtgcagttggagtttaccttgggattactggaaaaaggatatcatcacctgctgatgctatgttcataggccttggtactcactatgtaccttctgcaaatttgggttcactcaaggagtccctgctgagtgctaacttcaccaatgatcctcatagagacgttgagtcagttctgacaggatacaagaaagaaccagagtctgaaccacaactaaaaaagcttttgccatatatcatttcttctttcagtcctgataaatcagtggctgaatctgtggaagagctaaagaaatgtagccgaagtggtgatgctgcagtggcagaatgggccaatgaagctttagcaggaattgagaaaggcgctccattttctctttgtttaacacagaagcatttctctcaagttgcatcagcatatgggactagtgaacactatttatctaagctggctggtgttatgaaattggaatatcgcattgccttgaggtcgtcgattagaaacgattttgttgaaggtgtgcgtgctgttttagttgacaaggaccagaatccgaagtggaatccagccactctggaagaagtaaacatggccgaggtcgaatcagttttcgagccattaggggccgaggctgagttgagtgtgtgaaatatggcctgccacactcagttttcttatttgtgctgcaataataatgtatacaaaacagaaatgcgatgcccacagaaacaataaatgctgtgtcttcatgaactaactggagtggttccattttctcgaaaggggcgcgtgggaatctaaggtctgttgcttgctttcctgcctctgcctgcaatattccagccatggtaccaggtggatggccaaatactctagaagcgtttgccctgggcacttgcatgtagcttgatgtgagtagtgtaagaacaaccgggtacggaaaccgttgtctggccagcagatttcaaggcgtgtttagacaagtgtacaactgacgcgcacagatgtacggagtatatattatatgaaatatggcactaaaactcttttcccaggggctttgacgcaggcccggccgcggaaaaaagaaagaaaaaaatattacaactag

SEQ ID NO: 202638 - DNA, 1576 bp, Zea Mays
cccgccactacttctccatagctaagatctgtccggaccctgagacgccgccgtcgtcccgtggagcggagccacacgttgtccttccttcgccccgcccttctcggtcgcggctggttgcctgttccctctccgcgccatacggccatacccagagcaagtaggtcgtcaagtaagtccgacgacgagagaaacagccgccgctcggcctcatcatatggcggccgccgccccggttgcgtccgggagcggccgcctcagccgcccgcgcccgccccgtgtggggctgcgcggcgcgcgggtcgccgccgcggcgcaggggccgtcctgcctctacgtggggccaatcgagaccgccagccaggagaagctcgaggcgctctaccaccaggccagggattcttactacagtggtcagccattgatcatcgatgacatgttcgacaaagtcgagcttaagctccggctttatggctccaaatccgtcgtcaaatacccccgttgtagcctcataaggcattcaacctacgccgacgccgagggcaggaggaccaatcgatgttcatggcgttatcaagcatctggatgctgctcctcctgtttggtacctctgcagttcttgttcctactctgtacactctgagcatcgcgttcggggatgtgtttggggcaaggcaccttctgtacggtgaaaagtccctcgatgcggtaacaagagttaacgacttggctttggttggattggggtatctggttggttatcccatcgcatctgcgtccgttggcgcgctgcaaggcttattgtcaaacaatttggttgccctaaaagggtcctgcccaaattgtggcgagcaggtatttgcatttgtcaagattgaaaaaaccgtgagagcacctcatcgagcagaatgccatgtctgtcagtgccctttggagtaccgcacgaaaattgagaaatcttcgtcagggcctagaagaagttgggtctacggccgggtttatctagtgaagcaagggcatcctgaaacggaaatggataaatgaaaaattctaattgattgagactgctgagggaagtttagataatcccatgagatggcactcttctggtcgactgaaacatttttcagatgccacttattttgatcagaagggcttactgtgtacgaatcatttgaaagatttgatccagccaagtgctttgtaatacagatacatttctgagatgtccagacgctgcagatgaaccccatgctgcattgtattcttttctgttttctctttagatgaatccatgatacagtttggatgaagaactactgaagaggctacgaaggtgccattgctatcaggagggagggtcactgaaaggctcacaggagggagggtcactgaaaggctcacactctgcaccaaacatgtttaatcatttgatcaaagatgcccacactcagcatgtatacagacttgctcaaatgtgatgtgttatacaagtgtgtgtgtgtgtatatatgaagttttcagctttattgtatgtatgttttcagattaatttgcctgaatctggaacccgtct

SEQ ID NO: 202639 - DNA, 1574 bp, Zea Mays
tctcccgccactacttctccatagctaagatctgtccggaccctgagacgccgccgtcgtcccgtggagcggagccacacgttgtccttccttcgccccgcccttctcggtcgcggctggttgcctgttccctctccgcgccatacggccatacccagagcaagtaggtcgtcaagtaagtccgacgacgagagaaacagccgccgctcggcctcatcatatggcggccgccgccccggttgcgtccgggagcggccgcctcagccgcccgcgcccgccccgtgtggggctgcgcggcgcgcgggtcgccgccgcggcgcaggggccgtcctgcctctacgtggggccaatcgagaccgccagccaggagaagctcgaggcgctctaccaccaggccagggattcttactacagtggtcagccattgatcatcgatgacatgttcgacaaagtcgagcttaagctccggctttatggctccaaatccgtcgtcaaatacccccgttgtagcctcataaggcattcaacctacgccgacgccgaggaggaccaatcgatgttcatggcgttatcaagcatctggatgctgctcctcctgtttggtacctctgcagttcttgttcctactctgtacactctgagcatcgcgttcggggatgtgtttggggcaaggcaccttctgtacggtgaaaagtccctcgatgcggtaacaagagttaacgacttggctttggttggattggggtatctggttggttatcccatcgcatctgcgtccgttggcgcgctgcaaggcttattgtcaaacaatttggttgccctaaaagggtcctgcccaaattgtggcgagcaggtatttgcatttgtcaagattgaaaaaaccgtgagagcacctcatcgagcagaatgccatgtctgtcagtgccctttggagtaccgcacgaaaattgagaaatcttcgtcagggcctagaagaagttgggtctacggccgggtttatctagtgaagcaagggcatcctgaaacggaaatggataaatgaaaaattctaattgattgagactgctgagggaagtttagataatcccatgagatggcactcttctggtcgactgaaacatttttcagatgccacttattttgatcagaagggcttactgtgtacgaatcatttgaaagatttgatccagccaagtgctttgtaatacagatacatttctgagatgtccagacgctgcagatgaaccccatgctgcattgtattcttttctgttttctctttagatgaatccatgatacagtttggatgaagaactactgaagaggctacgaaggtgccattgctatcaggagggagggtcactgaaaggctcacaggagggagggtcactgaaaggctcacactctgcaccaaacatgtttaatcatttgatcaaagatgcccacactcagcatgtatacagacttgctcaaatgtgatgtgttatacaagtgtgtgtgtgtgtatatatgaagttttcagctttattgtatgtatgttttcagattaatttgcctgaatctggaacccgtct

SEQ ID NO: 202640 - DNA, 1113 bp, Zea Mays
gatctggcgagccactgtagcctacgctaccactgtagctgctttagggctcaccgttgcatgagatagcgtcgtaccgtggccgcttaacaaaggggagggggaggtcgcggcagccgttgaaagcgagcagctcaacaccatgtcgactcccgcgcttgcgactgctgccgagggagcgacgcgcatcatcctggtgcacggcacgggccacggcgggtggtgctggtaccgggtcgccacgctgctccgcgccgcgggacaccgcgtggacgcgccggacctcgcggcgtcgggcatcgactcgcggcagctccgcgacgtgcccaccttcgaggactacacgcggccgctgctcgacgcactccgggcgctcccgccgggagagagggcggtcctggtgggccacagcttcggcggcatgagcatcgcgctcgccgcggagacgttcccggagaaggtggcggccgccgtgtttgtcaccgcgttcctgccggactgcaccaacccgcgctcgcaggtcatcgagaaggtagtagcacgtgtacgcttgttgctgttggtctttcagtttagctaacggaagagctgaccctgatgccgacatgaatggtctcccctgttccggccggccggccggccgtcactaccgtcgaaggttaccgtgtcagactggatggacaccgtcacggatgcagagcacgttccagcctcggtgttcctggggcctgaatttctgcgccacaagctctaccagctgagcccaccggaggactacacgctgtcccagagcctggcccgggtgagctcctactacgtgcccgacctgcagagccagacgccgttcagcgaggccaggtacggcgcggtgagcaaggtgtacgtggtctgcaagcaggatcaggccatgaccgaggcgtaccagcacacgatgatcgccgcctgccccgtggcggaggttctcttggagttgctcttatatggtaaaatacccaaggacatgttcattcggagataatgaccaacaatcaacgaagctacacgcttgagatccacatcatacatgtgtgacgaaggagctggcaagagcgggatgggaccctcaacttgttc

SEQ ID NO: 202641 - DNA, 1793 bp, Zea Mays
cccggtagtagtactcctcgcaagttctatcacctggtgctgttccatgtgcacccgttctggatccaagtcctgtacttccttttgatctccgttttgggtttcttgatgctgagagtcctgcccatgaagtccagctccgtgcctaggccctcggctctggacctactcttcacgtcggtgtcggcgacgacagtctccagcatgatcgccgtcgagatggaatccttctctaacgcgcagctcctcctcatgaccctccttatgctcctcgggggcgaggtgttcacaagcatgcttggtctccacttcacctgcaccaagctcagaaacaagagagaaacacctcataataatctccatggtaatagcttagagcagagtcgtcgtcgtcaccgtcccatggagatggaagcccaggccgccgccgtccaaatggagcttgcagggttcaacaaggacggccatggcgatttcgcatccatggctaggttgctaatgtttatcgtgctgggctacatcttggtcgtgcacatcgccggctacgcgctcattctaatctaccttagcgtggtcggcagcgcgagagcagtgcttgttaggaagaggatcagcctgagcaccttctccgtcttcacggtcgtctcgtcgttcgcaaactgtggcttcgtgccaaccaacgaggggatggtgtccttcaagtccttcccgggcatgctcctcctggtcatgccacacatcctgctcgggaacacgctcttccccatcttcctcaggctctccattacggcgctcgagagggtcacaaggtggcgagacctctgcgagctgctgagagacagaggacccggcggcgggccagctgcggctgccgccgccgccgctataggctacgaccacctgctcccgggaccgcgcacatggttccttgctctcaccgtggcggtgttcctggcggtgcagctggtgctctactgcgccatggagtggggctccggtggccttggagggctcaacgcgttccagaagctcgttgcagcggtcttcatgtccgtcaactccaggcactccggcgagatggtcgtcgacctcgccaccgtctcctccgccgtcgtcgtgctgtatgtgctcatgatgtatctaccgccttacactacatttttaccggtagcagtggaagacgaccagcagcagcaaaatgaggcacaaccccacgacaatagcacgagcaagagcagcacaagtattagcatctggcacaatctgctcatgtcgccgctctcgtgcctaaccatcttcatcgtcgtcatctgcatcaccgagaggcggcagattgctcgtgacccaatcaacttcagcgtcctcaacatcgtcgtcgaggtcatcagtgcgtatggcaacgtgggattcagcaccgggtacagctgcagcaggctcaagaagttcagcatgcttgggggtcaggcatggaggctgaactgaaccgaagtactatttcgaaactcgctcgatcaacctgatctccaggactccaagactagtacttgaattctcagtctattcagacggaaccggatcatatgacaaatccatctgcgaggagtttggctgcattctgtaaagtcggtaggggcaaggggttgttcatatcctttttatttaaaaataaaaaatagttttatatctcgacttttgaaaattatattttgaggtgtctgtcacccaggggacggcagggagttaaatgtaatttttaataaataggttctcgtcgctcactcactcattacggg

SEQ ID NO: 202642 - DNA, 3796 bp, Zea Mays
gtacttgcgaggcaacgggaaggaggtagaagagggagagtaaagtagcgcgccgcagccgcagcggaggaaaggcaagggcggcgagggaacacgcggttgcttgcggaaacccgctcgactcggtctctccgcccgcgagttgggttgatcggagggtttgatgacgggggcgcgggagccggtggccatggagataccagcggaggaagggccagcggcggcgagggcgccgccgcggcggattaggaggaggctggtggagggggcgcgcggcggtggggcgccggcgagcgtggaggagatcgaggccaggcttagggaggccgagctccggaggcagcaattccgtgaatggttggcctgcaaagcaaggaagaagccacggagcccgtcgtggtcctctcaagaagaagaccatgggcagcgccttgaagcgaagcttctggctgctgagcataaaaggctaatccttcttggcgaaggcacataaccgactcgaccaagttggatgaactcagacaagctgctaagaatgatgtggatatgaggtttgagaaggaaagggaagactcgagaccagagttgagtctcgtgtccgacaggcagaggagaaccgcatgcgccttctgcatgccgatatgcagaagcgggccgcactgaaggagaggacagcgaggtccctggtgcagaaggcaaaatcagagagcaaatacatggagcaggtgcgctctgcaatttctctgaagcgcgctgctgctgagaagaaacgactgaggttgctggaagctgaaaagaccaaggctcaagctaggcttttacgcatccaaaaagctgccatgactgtatgcagccggagagaatcagagaggagaaaactgaaagaacagctggacaacaaacttcaaaggggcgaagaggcagagggctgagtatttgaaacaaagaggaagtcctcgtggttcaacccatgctgattacttaaagcatgcatatgccctttcaagaaaactagcaagacactggagaatatttgtgaagtccaggaagacaacatttgctttggctcaagcttatgatgccttggggattaatgagaagtctgtgaaaaatatgccttttgaaaaattagccatgtcaatggaatctcctgtagttcttcggagcacgaaggcattactcgaccgattggagaaacgccttgtcatttctcattcagtagcatcttcatcagtagaaaatgttgatcatcttctgaaacgccttggttctcccccaaggaggaaggctcctcctagcagagaaggaaaaactcgggcagtggtaaaaagaccagctaaaagttctgaggcaagcatcaaattgcccagatactcactgagggtggtgctctgtgcttacatgatactggctcatcccagtgctgttttaagtgggcaaggtgagcgggagaaacagcttatcgagtcggcagcaaactttatcaaggagttcgagctgttgattaaggtaattcttgatggaccagggcagtcatctggtgttactggccagaggaagttcagggcacagttggctaattttgacaaggcgtggtgttcgtatctttacagctttgtggtgtggaaggtaaaagatgcaagattattggaggaagatcttgtcagggctgcatgcaagcttgagttgtcaatgatgcaaacatgcaagctaactgcagacaggcactcgcaaaacaatcttacacatgacatgaaggcaattcagaaacaggttattgatgatcaaaagcttttacgagataaggttcaacacctgagtggcgatgctggccttgagcggatgaactctgctctttccgatacgagatcaaagttctttgaagcaaaggagaatgggagtccattgacagcacctgttgcaaatgtgtctacccctttgagcatcaattcgtctgggaaagcaccactttctgaggttcctgaaagttccaggacaaatgttgttgggacaagctctgtagtccgttctttgttcagtgcttcttcgtcatcagtcagttcatcaccagaaaagcagccgacagagaatgaaaaaatggtcaatgaaatgcttcatgaggatgccagtgcttttgctggcaggtctgatagtgctagtactgctgaggaggagttccagaacaaagtgagagaaaccatggagaaagctttctgggatatggtcaccaactccatgaggggagaaagacctgattatagtcaattgatcaacctagtaaaggaagtgagggattcgttgcatgacctggctccaaaagaatggaaggagaaaattcttgagaacattgaccttgaaattctgtctcaggtacttgggtcaggttcccaggatgcacaatacttggggcagattttggagtattctctggatatggttcgcaagctctctgctgctgcaaaggaggatgagatgaagaaaaaccatgataaattattgagtgaattgtctacgaattctgaagttaacggcgatggcatcaactcatttgtcattgctgttatcaagggccttcgtttcatcctggaagaaataaaggaactgaaagcagaagtgagtaaagcacgtatccagatgatgcaacagatcataaaagagtcggctggggttgagtacctgcagaaggcttttgctgatcgctatggacctcctgagacagcaccagcttctcttcccctaactctgcaatggattttgacatcgaagaacattgcggaagaagaatggagtgaacattcagactgtctttcagtaatgccagcagcagggcaggctcctgctcttgttccggtactccgatctggtcatggagctccagtagggcaaccatctccttctgcaggagacacctctggtcaaccagagtgcaaggattaatctgctgaggctgagggctgtgcagagccaattccaacaggtgatcgtgatcgccacaagcatgctcgtcctgcgccaagttctgatgagcgagaactcgagggccactcctctggaactggaaaatgccatctcagaactcgtcaaggctctcgcggacatactgcacagctcacccgattccggcacggaagagattgtgcaggcgatggtcaatgcatcagcctcagttggctcaccatcagaggagaaggttcaggccaggatgcagatgatcacccgggtgttcctcaagagcctccagcccggtgacgtggtcttcaagaaggtatcccgtgcggtctactgcgccttccgtggcatcatcttaggtggcagtggtcccaagggccagaagctggcggacgctgcattgcgccgcatcggcgccaccaatgttgtcgacagggtgttgaaggctgctgaggtgctgatcaaggtggcaacggtatcagagaaggtccacggcccctggtacaaagctctgatagtctgatgtgagcatgaatgtgaatggtttggcttttgtgaatacagacggtgaaagtgtaaatccttgttccactgggtgggatgggagatatggtgttgtacagcaatttatagttgttggtcagtaggcagttcaggatgtgaagaattctggtgagctgggcgaatatggatgctctttcaccaggatttagtcaggctcgatggatggatgctaaaacgcgtctggaaatgtaaattgtggcaccttgtttgattttcgaactgaaataatgtaaataattgattgcaagttatttgtgctctgcacatattggttgtttcggcc

SEQ ID NO: 202643 - DNA, 3863 bp, Zea Mays
ccgcttcccacggcagctcgctccctatatgaatcgagcggcgcgcgatcatccattaacggaacaaagtacttgcgaggcaacgggaaggaggtagaagagggagagtaaagtagcgcgccgcagccgcagcggaggaaaggcaagggcggcgagggaacacgcggttgcttgcggaaacccgctcgactcggtctctccgcccgcgagttgggttgatcggagggtttgatgacgggggcgcgggagccggtggccatggagataccagcggaggaagggccagcggcggcgagggcgccgccgcggcggattaggaggaggctggtggagggggcgcgcggcggtggggcgccggcgagcgtggaggagatcgaggccaggcttagggaggccgagctccggaggcagcaattccgtgaatggttggcctgcaaagcaaggaagaagccacggagcccgtcgtggtcctctcaagaagaagaccatgggcagcgccttgaagcgaagcttctggctgctgagcataaaaggctaatccttcttggcgaaggcacataaccgactcgaccaagttggatgaactcagacaagctgctaagaatgatgtggatatgaggtttgagaaggaaagggaagactcgagaccagagttgagtctcgtgtccgacaggcagaggagaaccgcatgcgccttctgcatgccgatatgcagaagcgggccgcactgaaggagaggacagcgaggtccctggtgcagaaggcaaaatcagagagcaaatacatggagcaggtgcgctctgcaatttctctgaagcgcgctgctgctgagaagaaacgactgaggttgctggaagctgaaaagaccaaggctcaagctaggcttttacgcatccaaaaagctgccatgactgtatgcagccggagagaatcagagaggagaaaactgaaagaacagctggacaacaaacttcaaagggcgaagaggcagagggctgagtatttgaaacaaagaggaagtcctcgtggttcaacccatgctgattacttaaagcatgcatatgccctttcaagaaaactagcaagacactggagaatatttgtgaagtccaggaagacaacatttgctttggctcaagcttatgatgccttggggattaatgagaagtctgtgaaaaatatgccttttgaaaaattagccatgtcaatggaatctcctgtagttcttcggagcacgaaggcattactcgaccgattggagaaacgccttgtcatttctcattcagtagcatcttcatcagtagaaaatgttgatcatcttctgaaacgccttggttctcccccaaggaggaaggctcctcctagcagagaaggaaaaactcgggcagtggtaaaaagaccagctaaaagttctgaggcaagcatcaaattgcccagatactcactgagggtggtgctctgtgcttacatgatactggctcatcccagtgctgttttaagtgggcaaggtgagcgggagaaacagcttatcgagtcggcagcaaactttatcaaggagttcgagctgttgattaaggtaattcttgatggaccagggcagtcatctggtgttactggccagaggaagttcagggcacagttggctaattttgacaaggcgtggtgttcgtatctttacagctttgtggtgtggaaggtaaaagatgcaagattattggaggaagatcttgtcagggctgcatgcaagcttgagttgtcaatgatgcaaacatgcaagctaactgcagacaggcactcgcaaaacaatcttacacatgacatgaaggcaattcagaaacaggttattgatgatcaaaagcttttacgagataaggttcaacacctgagtggcgatgctggccttgagcggatgaactctgctctttccgatacgagatcaaagttctttgaagcaaaggagaatgggagtccattgacagcacctgttgcaaatgtgtctacccctttgagcatcaattcgtctgggaaagcaccactttctgaggttcctgaaagttccaggacaaatgttgttgggacaagctctgtagtccgttctttgttcagtgcttcttcgtcatcagtcagttcatcaccagaaaagcagccgacagagaatgaaaaaatggtcaatgaaatgcttcatgaggatgccagtgcttttgctggcaggtctgatagtgctagtactgctgaggaggagttccagaacaaagtgagagaaaccatggagaaagctttctgggatatggtcaccaactccatgaggggagaaagacctgattatagtcaattgatcaacctagtaaaggaagtgagggattcgttgcatgacctggctccaaaagaatggaaggagaaaattcttgagaacattgaccttgaaattctgtctcaggtacttgggtcaggttcccaggatgcacaatacttggggcagattttggagtattctctggatatggttcgcaagctctctgctgctgcaaaggaggatgagatgaagaaaaaccatgataaattattgagtgaattgtctacgaattctgaagttaacggcgatggcatcaactcatttgtcattgctgttatcaagggccttcgtttcatcctggaagaaataaaggaactgaaagcagaagtgagtaaagcacgtatccagatgatgcaacagatcataaaagagtcggctggggttgagtacctgcagaaggcttttgctgatcgctatggacctcctgagacagcaccagcttctcttcccctaactctgcaatggattttgacatcgaagaacattgcggaagaagaatggagtgaacattcagactgtctttcagtaatgccagcagcagggcaggctcctgctcttgttccggtactccgatctggtcatggagctccagtagggcaaccatctccttctgcaggagacacctctggtcaaccagagtgcaaggattaatctgctgaggctgagggctgtgcagagccaattccaacaggtgatcgtgatcgccacaagcatgctcgtcctgcgccaagttctgatgagcgagaactcgagggccactcctctggaactggaaaatgccatctcagaactcgtcaaggctctcgcggacatactgcacagctcacccgattccggcacggaagagattgtgcaggcgatggtcaatgcatcagcctcagttggctcaccatcagaggagaaggttcaggccaggatgcagatgatcacccgggtgttcctcaagagcctccagcccggtgacgtggtcttcaagaaggtatcccgtgcggtctactgcgccttccgtggcatcatcttaggtggcagtggtcccaagggccagaagctggcggacgctgcattgcgccgcatcggcgccaccaatgttgtcgacagggtgttgaaggctgctgaggtgctgatcaaggtggcaacggtatcagagaaggtccacggcccctggtacaaagctctgatagtctgatgtgagcatgaatgtgaatggtttggcttttgtgaatacagacggtgaaagtgtaaatccttgttccactgggtgggatgggagatatggtgttgtacagcaatttatagttgttggtcagtaggcagttcaggatgtgaagaattctggtgagctgggcgaatatggatgctctttcaccaggatttagtcaggctcgatggatggatgctaaaacgcgtctggaaatgtaaattgtggcaccttgtttgattttcgaactgaaataatgtaaataattgattgcaagttatttgtgctctgcacatattggttgtttcggcc

SEQ ID NO: 202644 - DNA, 993 bp, Zea Mays
tggcccaatccgcactctgctcatctacaccaccaaacctctgccgctcttcgccgtcagcccgtcactcctctcccccgtccggccgtcccaactcccaatcgtcgccgcgcttctccccgcacgattgccagaatctctaacgcccatggcccccgtctcccccgcggccgccgccgccgcggtctcggcctctcaccacggccgccacctcctcccgtcgtccccgcgccgcctccccaggccccgcccgcgctctcgtccgcaccttcgcctcgccgcctgccacgccgacaccctcctcccctcctcctcatcggaggcccgtgcggcgccaggccctgcggtggagccttcctccgaatctgccaccgactgcttcgtcgattggctgcgcgcgcgcggccttcccccgggcaaagtggacatccgggagcgcccggtgccctgcttgcgcgacggcaaggaccagccgctgcgctacgtctccgctgtcgtcgacctccaggcgggggatgtggcattcgaggtgtcaatgtccctcgtcgttacgcttgagcgggtgctcggggatgaatcaatcgctgagttgttaacaaataacaagttatctgagctggcatgcttggcattgtatctcatgtatgagaaaaaacaaggaaaggattcattttggtacccctacattaaggaacttgaccgacatcgaggaagggggcagctagctgttgaatcaccacttttatggactgaaagtgaactggattaccttactggaagccccttgaaggatgaagttgttgctagagatgaggcaataaggagagagtataatgagcttgacacattgtggtttatggcaggttcactatttcagcaatatccttttgacatacctactgaggcttttccgtttgaaatattcaagcaggcttttgttgcagtacagtcttgtgtggttcatttgcagtgtctgataggaagaagtaagct

SEQ ID NO: 202645 - DNA, 2232 bp, Zea Mays
cattccatccccaaccaaacaagtttagatataaaaatatagcatcgcccgcgctctggagagtctggatcctcctgaacctccaagcagcaagcgatgaaaggagggacgcaagcaattagcctgatggtgcaccttgctgtgccatggctctgccttgcttcttgggcagctctgctaccagcgctagcatctggaaatgtgggtgcagcagctccgatactgagagcagattacataaaattgaacttcagcaccgcttcggcgacccccgacaagtacaagagcttcatcgcttctgttcgtgctggcttggcagggcgctccgtaagcttgaagatggatgtctccagagcctacttcgtggcttacgtagcagggcagcgctcgtgcctcctcaagagatcaggccgcacgttctcgtcggcgatctgttactacggtggcccgtggggaacaagttcggctcctgtcacgcgacctgctgctgctgccggcgacggcgaggatcctggggtcgcggcatggcgagcgagagatctcgacgaggccatctcgtcgctgttcctgttccccactggcaacgctaccgaagaggagctgagacggggcgtcgccgcctgcgacatgatggtggcgagcgcggcgacgttcccgtacgtcgagcggcggatgagcgccggcatgtgggacagcaacggcgtggccaacgacccgagcctgcgggggctccaggcgcgctggccgtggctctccgccgccgtccagcagtcctaccagggcgccttcgccgccccggtccctgtccagcggagcaacggcaagtggatgcgggtggacaacgtgcgtagcgcggtccccctcgtgtccttcctggagcacggaagctgcaacaggacgcggggggcgccggccttgctcataaggtccgtcgtgcaagagccggacgaggacatgcagccgggcggcggcgctcgagccacgacggcggcgtgcggcctgccggccgagccgacggtgcgcctcgtcggcccggaagggaggtgcgtggacgtgccttacggctactactacaacggcaaccaggtgcagctgtggagctgcaagtccaccagcgccgtgaaccagctctggacgctcaagagggacggcaccatccggtccaacggcaaatgcctgaccagcagcggcgacgcggccggcgctcgcgcggtggtcgacgactgcccgcgcttccccacgggccgcgtcgtctgggaggtgcgcgtggacggtaccgtcgcgctcaagtggtcccgcggcctggtgctggccgtgacctcgtcgactctcttcgcggggctcacggtgcggcaggacgaccgcggcaccggccagtcgtggacgccgaccaacgtcaccgcgcccctggacgccgccatcgtggggttccgcgacctctgcctgcaggcggactacgcggggtccgtatccgtcgctgcctgccgcgacggcgtgcagtggtcgctctaccccgacggctccgtacgcccgcccgcgtggctcctccttcaatggcagtgcctggctgctgatgccagcgggggtgtgacggtgaaactctgcgacggggctggatcgtcttgcgagcgctgggtgttccgcaacgacggcaccatcttcaacaccggcaccgggatggtcttggacgccaggccatctgcgggggctaatgctactgctagccaagtcatcgtgtcgcccgccactgggagtcccacccagcagtggacgctcatgctgtgatctcatctacggctcatgagtcatgactgtgggggcagggcagtactgcactgcaacagctagctggtgtgttttgtgtatatatctggcgagctaggttgttaaagcaagcattagctattttaccagtacaataatgcatgcttgctactactactagtaatgcagtctagctctgtgtaccattgcctgcacggctgcacggcccctgttggagtactctataataaatgtacccctagtaaaatctgttttcagtttaccttgccgaaaaatataaacagggctagtttggaggggtgtttggtttgtcactccattcatcgtgaatccattactcaaatttggtgggatgatctaattatttatattagtaataactaactaactataagaaataaggtgatgatggatcaactcattccatttcataaaccaaacaaaaaa

SEQ ID NO: 202646 - DNA, 1177 bp, Zea Mays
gcccagcccaattaaaaccctagacttcctggcgtgctataaaagcaggtggccgccgcctttgccttgctcaccctgcccttctgtgtacgaagccgacgagcagccgacgctaaagcttggtccggtgagcttcagagaaggggcgggtacgtcaagatgcagatcttcgtgaagaccctgacgggaaagaccatcaccctcgaggtcgagagcagcgatacaatcgacaatgtcaaggccaagatccaggacaaggaaggtatcccgccggaccagcagcgactaatcttcgcggggaagcagctcgaagacggccgcaccttggccgactacaacatccagaaggagtccacccttcaccttgttcttcgccttcgcggtggcatcattgaaccttccctccaggcgctcgcccgcaagtacaaccaggacaagatgatctgccgcaaggctgttaactgccgcaagaagaagtgtggccacagcaaccagatttgtatataagcaagatggtgcgagtcagctttagctgagggcaaagaagaagatcaagaactgaagcttgccaaatcggttccttgcatggtttgcgtcaacaagacgaagtttcaaagcttttgtagctgcataggctgctgcaacgtttttcagtcgtaactcgtgtgttcctgttcagggtcttcagcatgacataaatcgtttcagaagtctagtaatattattactatatggtgtcatgtcgtattgtggctcttcctttttgttgctgttgtgctgcagtagagggaaacgttccataattttctccaccgccaatttaatcagctagaaaacagagggaaacgcatgacataaatcgtttcagctggaaatttcgaagcgaaacatggtttaatactatggtcatgactcatgagtgtctaaataaagcaccacaaaactttccaacagctactacaaattttccttgaagtcaagaccttccaagagcatacatcattcaaagtgtttagggcactaaaaataaactgtgttaaatcatgtatttttgaggtgaattacattattagaaaagagaagtgtgagaatgatgtagaaaagtgtttagggcactaaaaataaactgtgttaaatcatgtatttttgaggtgaattacattattagaaaagaaaa

SEQ ID NO: 202647 - DNA, 2996 bp, Zea Mays
cgcctgggagagctgcctggtccaggggattcctgtagctcctctctgggactcattcagaggtcaatttgtcggccttctgagcccattggatttcatacttatattgcgggagctagaaactcatggctcgaacttgacagaagatcagcttgaaacacacactatatctgcatggaaagaggctaagcggcaaacttgtggaagaaatgatggtcagtggcgagcacatcagcatctagtgcatgccaccccttatgagtccttgagggacattgcagtaaagcttttgcaaaatgacatttctacagtgccagttatttattcatcatcatcagatggatcattccctcagttattgcaccttgcatccctttctggaattttgaaatgtatttttaggtattttaaaaactcaactggtaatttgcctattctgaaccaaccggtgtgctccattccgctgggttcctgggttccgaaaatcggtgatccaaacagtcgtccattggctatgttgcgacctaatgcatcacttagctctgcccttaacatgttggttcaagctggagtgagctcaataccaattgtggatgaaaacgactccctgcttgacacttactctagaagtgacatcacagccctagctaaagacaaggtctacacacatgttcgcctggatgagatgaccattcatcaggctttacagcttggacaagatgccaatacgccttttggtttttttaacggtcagagatgccagatgtgcctccggtctgatcctttgctgaaggtgatggagcgactggctaatccgggggtgcggcgggtgttcatagtagaagctgggagcaaacgtgtggagggtattatatcactgagtgatattttcaagttcttgctgagcttgtgataagagaagaggagcatgacggacatttgtttgtgatcaatagtaagaaaacagcagggtatgtgaagcaagctgccatggatctcgcattccccctccccctccggcctttggtcaagtaaggcaggattgaaggtggcgggctttgtctttgctgataatggctgttggaattcatagtctgtaaagttcttttttttcctttgtttttcgttttaaccattttgtgcctcccgttgttaccaaaaatatctggtgatttttattattatttttggattgtttccgccctacatacactagatgtttgcatcccatttttcaattttttaccccccatgtgtagtgcagctgtcctgtgtagcagtattatgttagccgaacgtgtgtgtttggtttcgctggacaatcatatagatagatagatagatagatagatagatagatagatagatagatagatagatagatagctgatgcctggctagaagttttgtaccattttcatcgctggtacggtagcaagcattcttctagtcttggtggtaaggaaacaaacgaagaaatgaatctagtggtgctgttgaatgtggacgcggtcccaactgcccatcttgttcgtcctgtccggtagtaaagaaaaatctagagggttggggatgggagtggataggacctatccacatgtcagtcctttcccgaatacccatcattttcctctcttgccttgccttccccattgccattgtgtaatcctcatcctccgtcgagatcaaggaagaaagaaagaaagaaagcaaccatggcggcaaccgcaatgtgcccctccccctcggccgcaataactcgccacatccatgctcgtcgctcctgtgctgctgcttccttgtccctccgccgctcgggcttcctggggcgcgtcgtgctggccgcggtgccggtggccgtggacgccacccggcgccgccgcgtctccgtgtcggtgcggatggcctgggacggtccgctctcgtcggtgcgcctcatcatgcagagcaggaacgcgaagctgagcgagaagctcaaggagcacatcgaggacaaggtgggtcgggcggtgtccaagcactgccacctggtccgggaggtagacgtgcgcctctccgcgcgcggcggcgagctcggccggggccccaagacgtcgcgctgcgagatcaccctcttcaccaagcgccatggcgtcctgcgcgccgaggaggacgccgagtccacctacgccagcatcgacctcgccgccgccatcgtcaagcgcaagctccgcaagatcaaggagaaggagacggaggtgcgccgcggcggagacgctgacggcgtctgggacgagatcccgccggccgacctgctgccccccgccgaggccgacgacctggaggcggccgtgggcgctgaggacgagcagacggtgctcgccaaggtggtgcgcaccaaggtgttcgagatgccgccgctcacggtggaggaggcgctggagcagctggagaacgtggaccacgacttctactgcttcagggacgaggccacggggcaggtgaacatcctctaccgcaggaaggaaggcggatacggcctcatcatccccaagaacgacggcaaagtggataccgttggcgttgtgccaccacccgccgtcgctgcggagccggagccgtcctacgcagtgcacgccgctgacaacaacaactcctgaactgagcactcgtcgacgtctcatccaaccaaaaccaaaacgagagagaatgcttgcttggtactgtaaaaataaaacaaacgcactcgtcgtcgacgtctcatctgcatcagttgcatgcattgctgtgatgaatgtgtctgtgtttgtgtcacccacacaaactgctcatattagctctccatttcatactctccctcctgctattagcaccaattgacacactgccttttggtataatctgtacgagctgtcagtcattagggtatccattaatcggctctgtaccgagattgagttttgtatagcacacaacagctcgcatccttttgatattccagtccaaatgtccaatcc

SEQ ID NO: 202648 - DNA, 2913 bp, Zea Mays
agatgatgccaccacactgcacacctcatctggttcatagctttattttagcagtgttatgtgctttcttcagttgctgcggcatcttctagagagagtggatttttcatacatccatttgcacctacaggttcctcctgttttggaatactctgatttcttaattcattgtttaatcttcactcctcagaactgcacatttacactacctactactactaacccactaaagttgtcaattcctcagggctactttatgtgtaaacaggcatatagttgcagtcactgcaattgatacttccatttttgaaacttcgatggaaattttggagatgtttatattcacacaaagttatgttatatttaccatcaatgctaagtggttacaaattttactgtcagctagtaccgactgaaaaagtaacaggcagaggttcatgtaatcatgttggggactgttgatgcccaaaatgacacgcgaaaggctttcacagttttgtgtttgttgaatgtgtttgcaatggagattgaagaacacacagattcactttcaatagaggaacccatcacaaggctcccaccagatattattgaggggatacttctcaggcttccggtaaactctctaatgaggctgcgtcaagtctgcaagcaatggtggaacatggtcagcgtgccccgctttatcaaagaacatgcctatcatgcacccaagcacctcctcctttacttgcctaagttgaatatatctgcatcgctccatccaaagactgccaaaccatgtcttgcaacaatcattaatgaaaagtggtctccattgacatgggcctcatcgcatatggaccctgatgatcacctctttgcatcatgcaacggtttgctttgcttctacaagacatacacactaaagatatctaaccctgcaacaggtcaatgcctgcatctcttgaaacctgacggcatattgttgtacgacttccactatctatacagctttggatttcacccgattactggagaatacaagctcgtgcactttctccgtgagcctcagcgctacaaatcaggacagcctttccatttcgacaccattcaagtgtacacccttggtgaagacaaatggagagctatcagagctcctataccatgctgcatggtgcatcttggagtagtaaatgtggatggagtgatgtattggctaacagaagataaaggaacaagctgtggcatggcagttgtatcgtttgatctcagggaagaaatgtttgccttgattcatcttccagcattggaggtgaaagagacagcctcttgtgccaccatcaaagttgcttactatatgactgagatagatgacaaagtgtgcgtagtgactatgccataccaaagccatgcaccaaggtggcgccgaaacaacgcagagctttcaggcaggactgacatttgggctcttgaaagtgacaagtggttcctgaaatatagcatccagtcaccatctctatctcggtatgttcctcagccatgcttcatccacagggagaagatcatactgcaggacagtgaaagtaatgtgtggtaccatgatttgcgaggcaagaacgtgcagattgagcatgcagatggggcgaagcttttgcaccttggtgacaacagattctatgagacacagtcctatttctacaaggagacacttgctcccttgagcatttatgccagagcagccattgttcgtgcaccgcctgagcctcttgctcgttcagttgctttacattagtttctgagaggctcttgcactctgaaggtttggcagcaagtactgacgaatattttaatatggagagtgggtaatggggacggcacacgtatggaatgatccctggttttggagagagtggactagccatccatgccaaggggtgtaaatcctatgaaccaagtgaatcattgagatgattgacacatgcataggcaattggaacgaggcactaaagatgtgaatgaatcttagtaagcccagttcatatggagatggatgatgtctcagtcttgcactatggagtcttttcatgatcaaatcagcctatatttagtccgggaggagttggccactatggaaagcataggaatagatgtgtattcgacagtgagcaactagaggtccatgaagttccccaggaggttgtagacaagggtagtgtttgggtgagggctgatactgtagctttggggcagctaacacatcagtagacagtagtctcaggactcaggaggttaggctgctcaatcttcacaatggtgatgtgcagctctcttgcatattcgagaaaaaaatcaagaggagtttgaaaagaaaaacaagtatggagctgtttcatcttcacgggggctttgatcgataaggattcaggagtgctggaagaagatttggagcaagagctgtcgctgtccggcgtctggcggtctgggggagaccagtgattttcctacgcacgcctgccaaaagtgggatggagttgaacgcaaaatgtgttgtttgtcattgggtagatggaggaggacacctcgtttatacgcgcggaggaggtgtagtgcgactgtgcgagttgaatttgtaagaaactcagccgcatgcttgcttggagatacttgagatggaacggaaaactcaggtctcaacagctgtagagaaggtgaggggagggaagcaaacaacctagcttacattgtgatgaaacaaggcagatgagttctggacctctctctctctctctctctctctctcaaaaatggtttgccagtatagtctgtgacttaggaagattgtcatgcctgaatcccgatatagaatttctggtgtaattttcacagtaatattgttcacacatgtcgatggttcagctgttttcggtgcta

SEQ ID NO: 202649 - DNA, 2614 bp, Zea Mays
gaacatacttggagtcaaactctaaacctagaggtcccacaacatgtacctggcgcagatctagccgaaccctagcgcagggagcagatctgtaccaaccctaatcctagggttcctcacacttgcgggccgagtaatttctcgtcttgtttcggctagggagcggggtggcttctccggccaaggctttcacagttttgtgtttgttgaatgtgtttgcaatggagattgaagaacacacagattcactttcaatagaggaacccatcacaaggctcccaccagatattattgaggggatacttctcaggcttccggtaaactctctaatgaggctgcgtcaagtctgcaagcaatggtggaacatggtcagcgtgccccgctttatcaaagaacatgcctatcatgcacccaagcacctcctcctttacttgcctaagttgaatatatctgcatcgctccatccaaagactgccaaaccatgtcttgcaacaatcattaatgaaaagtggtctccattgacatgggcctcatcgcatatggaccctgatgatcacctctttgcatcatgcaacggtttgctttgcttctacaagacatacacactaaagatatctaaccctgcaacaggtcaatgcctgcatctcttgaaacctgacggcatattgttgtacgacttccactatctatacagctttggatttcacccgattactggagaatacaagctcgtgcactttctccgtgagcctcagcgctacaaatcaggacagcctttccatttcgacaccattcaagtgtacacccttggtgaagacaaatggagagctatcagagctcctataccatgctgcatggtgcatcttggagtagtaaatgtggatggagtgatgtattggctaacagaagataaaggaacaagctgtggcatggcagttgtatcgtttgatctcagggaagaaatgtttgccttgattcatcttccagcattggaggtgaaagagacagcctcttgtgccaccatcaaagttgcttactatatgactgagatagatgacaaagtgtgcgtagtgactatgccataccaaagccatgcaccaaggtggcgccgaaacaacgcagagctttcaggcaggactgacatttgggctcttgaaagtgacaagtggttcctgaaatatagcatccagtcaccatctctatctcggtatgttcctcagccatgcttcatccacagggagaagatcatactgcaggacagtgaaagtaatgtgtggtaccatgatttgcgaggcaagaacgtgcagattgagcatgcagatggggcgaagcttttgcaccttggtgacaacagattctatgagacacagtcctatttctacaaggagacacttgctcccttgagcatttatgccagagcagccattgttcgtgcaccgcctgagcctcttgctcgttcagttgctttacattagtttctgagaggctcttgcactctgaaggtttggcagcaagtactgacgaatattttaatatggagagtgggtaatggggacggcacacgtatggaatgatccctggttttggagagagtggactagccatccatgccaaggggtgtaaatcctatgaaccaagtgaatcattgagatgattgacacatgcataggcaattggaacgaggcactaaagatgtgaatgaatcttagtaagcccagttcatatggagatggatgatgtctcagtcttgcactatggagtcttttcatgatcaaatcagcctatatttagtccgggaggagttggccactatggaaagcataggaatagatgtgtattcgacagtgagcaactagaggtccatgaagttccccaggaggttgtagacaagggtagtgtttgggtgagggctgatactgtagctttggggcagctaacacatcagtagacagtagtctcaggactcaggaggttaggctgctcaatcttcacaatggtgatgtgcagctctcttgcatattcgagaaaaaaatcaagaggagtttgaaaagaaaaacaagtatggagctgtttcatcttcacgggggctttgatcgataaggattcaggagtgctggaagaagatttggagcaagagctgtcgctgtccggcgtctggcggtctgggggagaccagtgattttcctacgcacgcctgccaaaagtgggatggagttgaacgcaaaatgtgttgtttgtcattgggtagatggaggaggacacctcgtttatacgcgcggaggaggtgtagtgcgactgtgcgagttgaatttgtaagaaactcagccgcatgcttgcttggagatacttgagatggaacggaaaactcaggtctcaacagctgtagagaaggtgaggggagggaagcaaacaacctagcttacattgtgatgaaacaaggcagatgagttctggacctctctctctctctctctctctctctcaaaaatggtttgccagtatagtctgtgacttaggaagattgtcatgcctgaatcccgatatagaatttctggtgtaattttcacagtaatattgttcacacatgtcgatggttcagctgttttcggtgcta

SEQ ID NO: 202650 - DNA, 1947 bp, Zea Mays
ctaactaaaatacggttcccggtcaaaaaaacaccgaaatttggtcaggaaatacgaaattcgaatttttgaatttgaatacgtaaacccttcgggaatgcgaaattcagttatttcccgttttcagaaacggacggaattcagttcacaaacgggatgggtaacactgctgtagggtgattctcgaatctcgatctccctgctctacccgcatcaccccgccgttgccggccccttcctcccgcttcccacctcgccgtcgccacctcttcctcttcctcatcgccggcgcttgcgcgccccttctccaccccgttgaccgccgcacccacggcctcgccgttgcagcactcgtgcgatccggtcacgagtggagcgcacgagctcattcgctgcttccgcctccccctcttccttgccggagcccgcgcctcctctcctcgccggcgccttcgcctgctcctgcgcccccttctccacgtcgcacccacggcctcgtgttgctgccctcgtgagatccggtcgcgagcgcccgacctaggccgctgcctcagtctctcctcgctcggtcgcatcaccaccgccggagacggaccgaggtgctctgcgagactccgcgccatagagctcctcctacggcgggttcttttccgtccggtagctgggttccctgaagccagtcatggcgatgaccaccgccgtgacgggcctcgccgtcgcagcaaccgctcccattcgctccttcctctcgtccgccgccgcctctgtcagcctgcccgccgatcttcgtgacctcgcctccgacctagcctcggaccctgccgtctcctaccgctctctgcgtgccatctggtgcgccacctcgccggacacccgcccgccgctccgcgacctcctccagggcgccgacttcgtgctacccagcccgaaacctcgtgagaagagcgatgagctgaaggcgaggctggagaagctccgggagacacaggagaggaaggagtatgctgagctcgtcagggacgtcgctccgcccagcaaggatgacgctcctgagcccttttcatcctacaaggatcagataggatttggtctgcatgtcgtggttattatgttcacaggttacttggtaggatttgctatgttcaaagctctgttcaacaataatgctgtactgaacgctgctggaggtatcttaggattagttggtggcatgctggttgagaccattctcttcatcatcagatcatcgagtaaagagttagcctctgttccaagatcaaagaaagctcagtagactcttgaaatgctatcatcagttagtggtgagagctataagtggccttagcttgtggaagtctatggagcattggtatgggtttgaaaatgcaattcatcgaatatatgcaattgacatccgatttgaatttgcatcatgaaggaatagggcagagggatttgatttcaatattattagctacccagaattttgtatctcgcccaatgattggctcgatgataattgaagaacatgtacctacggatatgtaaaaagtacatacaagaagatggtatgcttaacagcttaagtaccattggagagtatattggcttgaaattttgcagttaaaacttaaaagtcgaaacaaaatatctggaaaggtcgaagttatcgatggaagatcagaatgtcgccgcggcgacgacatgaagacaacacatggcactgtagatagatttgtgggatgacgcaaaacagtggccgaaatatggttttcgggatggatttagaaccaacattgatttagggagtcccaacgaggtggtaaatatagggatgaaattggattttgtatggagtttgtaaatttaaggatctgctttatataactgttggaaaagagttttcccaaaaaactttttaaattcatatttagcgagttgtttata

SEQ ID NO: 202651 - DNA, 1918 bp, Zea Mays
ctaactaaaatacggttcccggtcaaaaaaacaccgaaatttggtcaggaaatacgaaattcgaatttttgaatttgaatacgtaaacccttcgggaatgcgaaattcagttatttcccgttttcagaaacggacggaattcagttcacaaacgggatgggtaacactgctgtagggtgattctcgaatctcgatctccctgctctacccgcatcaccccgccgttgccggccccttcctcccgcttcccacctcgccgtcgccacctcttcctcttcctcatcgccggcgcttgcgcgccccttctccaccccgttgaccgccgcacccacggcctcgccgttgcagcactcgtgcgatccggtcacgagtggagcgcacgagctcattcgctgcttccgcctccccctcttccttgccggagcccgcgcctcctctcctcgccggcgccttcgcctgctcctgcgcccccttctccacgtcgcacccacggcctcgtgttgctgccctcgtgagatccggtcgcgagcgcccgacctaggccgctgcctcagtctctcctcgctcggtcgcatcaccaccgccggagacggaccgaggtgctctgcgagactccgcgccatagagctcctcctacggcgggttcttttccgtccggtagctgggttccctgaagccagtcatggcgatgaccaccgccgtgacgggcctcgccgtcgcagcaaccgctcccattcgctccttcctctcgtccgccgccgcctctgtcagcctgcccgccgatcttcgtgacctcgcctccgacctagcctcggaccctgccgtctcctaccgctctctgcgtgccatctggtgcgccacctcgccggacacccgcccgccgctccgcgacctcctccagggcgccgacttcgtgctacccagcccgaaacctcgtgagaagagcgatgagctgaaggcgaggctggagaagctccgggagacacaggagaggaaggagtatgctgagctcgtcagggacgtcgctccgcccagcaaggatgacgctcctgagcccttttcatcctacaaggatcagataggatttggtactacccaaccgccctattttcaaattgctctatgcaatcttcctactgcttgtttcatggattacacttgttccattgaagtaataggaatataggatgacaccgtgtgtgtatttcaacataattggagcaatatagttcaaaagctataacatacgagttgtggagcaatatcttctctcttcatcaattgttccaaatgcagaggtaggatctactattttttaaaacacacacacataaagacaagaataaacaaataagataatgtaaaataaatttgagaataatatttttgtaaataccactcgaacaaagatcaatcttccgtgtgctcgtatctaaagcaatgatgccattagaatttagacctgaggtgcagcacatgaaaattgttctacctccaccactacattagtgtatacgtccaagaggcatttatctagatttaaagtgaacaacgaactactaaaaatctagtttcaggatttgtttttttgaactatcaactaaatcaggttataataacctgagtttaatctttaatcaagattacattaataacttggtggtgtgaaaatctatttctcgctcaaaggtctgaagttcagaggccatgtattgtgttgtttttcttctttatttttaaagttattattactttaccggtttctatttttatatttatattgaacgtacgtgacaaaaaacaaaatttaatctaaccggaaatataaaaaaatgaaatcgtgaaaagtcatagaaaaagagaaggaacacgatacatctacctgaccggccagcagccatcgctgcgcagtgtgcac

SEQ ID NO: 202652 - DNA, 1645 bp, Zea Mays
cgataattaggtcggaatggtgtggactcagctgcagcgaatcgcactccatcaacaggaaggtcaacctttgcacctccagttggcgttagtgtgaggcctctacaagctgtggaaattcccaatgggacacctagggatagaagggctgtttatcccgatcctactttcgcccagtccacacggtcacgggactcacatgacagttcaacactgacagaagagcttgaaatgctaaaagatgagaatgtaaatcttctggagaagcttgggctagcagaagagaaacttagacaatctgaagcccggacaacagagctcgagaaacaggttgctaatcttggcaatgggttatctatggaagtaaagcttatgaaaaggagggaggaaatgcttgtaagaaaggagcaagagataagaaaagctcttatatccaagaatggtaaaagcgaggaactcaccactcttcagcaacagctacagtctgcaagagaagaagcatcggctgctgtgaagaaactcaaagaagctgaatccgaaacacaagagttacatacaatgacacgcaggatgatcttaagcaaagaagaaatggaagaggttgtcatgaagaggtgttggttagcccgttattggggtttggctgtccaatatggcatctatccagacatctcaatgtcaaaacatgaatactggtcttcacttgcacctcttccatttgagtatgtaacatctgctggacagagagccaaggatggatccgaagcagaaggtaatggtttggaagacgtggacaagcttgttcatgatttgactgttacagcaggggaaggcaacgtagaaaccatgcttgctgttgataaaggacttcaagaactagctttcctgaaggtggaggatgcggtactttttgcccttgcccaacaccatcgtactaatgttgctggagcagctgatccagatattaaatcatctggggatgaaaaattcactgaggcatttgacctaagcaaggaggaggaagaagatgtacagttcaagcaggcttggctcatatttttctggaggagggctaagaccaacaacgtggaagaagatattgccgaggagcgattgcacatgtggatcgatcgacacggccagcaaccaacgtcacatgacgctgtggatgttgagcaaggcatacacgagctgaggaagcttggcatcgagcagctcctgtgggagctctcccgccacgaggcgaaccttgccaaagacagtccatctgatgtcgaggacctgacctaacagtaacagcctgagcggacgacggtggccatctcccacccaaatgcagtccaggctccagccatatatttgtatatcatacagataactgggacatgtaaacattttttgtggttttggtttttcagctttgtcacaaacagttcactgactctccccgatgtacataacttccaccccccgcttttgttgtttgtaaaaggcagcttgaggtgtgcaacggagagtgtgttgatgcgcacggcgaaaaggcgcgatagatagaagaatggctggtcagccgactctgcatgtataggtaccgttacacggcatgcagtccaacaacagaggaacatgccatatacatgtcctg

SEQ ID NO: 202653 - DNA, 1680 bp, Zea Mays
ggcggcggagccaaggacaagtacttcggtatcgctcttcctaaggtcggaatggtgtggactcagctgcagcgaatcgcactccatcaacaggaaggtcaacctttgcacctccagttggcgttagtgtgaggcctctacaagctgtggaaattcccaatgggacacctagggatagaagggctgtttatcccgatcctactttcgcccagtccacacggtcacgggactcacatgacagttcaacactgacagaagagcttgaaatgctaaaagatgagaatgtaaatcttctggagaagcttgggctagcagaagagaaacttagacaatctgaagcccggacaacagagctcgagaaacaggttgctaatcttggcaatgggttatctatggaagtaaagcttatgaaaaggagggaggaaatgcttgtaagaaaggagcaagagataagaaaagctcttatatccaagaatggtaaaagcgaggaactcaccactcttcagcaacagctacagtctgcaagagaagaagcatcggctgctgtgaagaaactcaaagaagctgaatccgaaacacaagagttacatacaatgacacgcaggatgatcttaagcaaagaagaaatggaagaggttgtcatgaagaggtgttggttagcccgttattggggtttggctgtccaatatggcatctatccagacatctcaatgtcaaaacatgaatactggtcttcacttgcacctcttccatttgagtatgtaacatctgctggacagagagccaaggatggatccgaagcagaaggtaatggtttggaagacgtggacaagcttgttcatgatttgactgttacagcaggggaaggcaacgtagaaaccatgcttgctgttgataaaggacttcaagaactagctttcctgaaggtggaggatgcggtactttttgcccttgcccaacaccatcgtactaatgttgctggagcagctgatccagatattaaatcatctggggatgaaaaattcactgaggcatttgacctaagcaaggaggaggaagaagatgtacagttcaagcaggcttggctcatatttttctggaggagggctaagaccaacaacgtggaagaagatattgccgaggagcgattgcacatgtggatcgatcgacacggccagcaaccaacgtcacatgacgctgtggatgttgagcaaggcatacacgagctgaggaagcttggcatcgagcagctcctgtgggagctctcccgccacgaggcgaaccttgccaaagacagtccatctgatgtcgaggacctgacctaacagtaacagcctgagcggacgacggtggccatctcccacccaaatgcagtccaggctccagccatatatttgtatatcatacagataactgggacatgtaaacattttttgtggttttggtttttcagctttgtcacaaacagttcactgactctccccgatgtacataacttccaccccccgcttttgttgtttgtaaaaggcagcttgaggtgtgcaacggagagtgtgttgatgcgcacggcgaaaaggcgcgatagatagaagaatggctggtcagccgactctgcatgtataggtaccgttacacggcatgcagtccaacaacagaggaacatgccatatacatgtcctg

SEQ ID NO: 202654 - DNA, 330 bp, Zea Mays
aggctcccagcaacccttggcataactcgctcgttcgtacacgagaagtcgagaacaagcatccatcctagctcactcttccacctgtctttctcagcctctctctattcctcttcactctctcgaatagatagagagacccgaggtagagcaagacctcgatcaacgagtgaagcaaagggcagcatgatgcaccggcttgtcgtcgaagctaggagaagagcagccccggtggcgatggccgccggcggggtggcgggcggcgagcggtggatgtcgtcgtcggcagccagcaaaggaaggtgtagcacgtctgctactgttgtgcca

SEQ ID NO: 202655 - DNA, 1397 bp, Zea Mays
tgttggcagatggtgctgtgtgcgctggcaaatacctttcagcattgcaagaaaaaggctactactctaggagagatcaacccaagttccagcacttggaatgattgaattttctaacatgtgtatggttttgagtgatcaggggttcatgaagttggggcaatccaaggaagataagcttaggagagtaacacttcatattgacagttcagatatcacttttgcctttaagggaaatcgtttcttccaaaaatgcctggagcagcgatgctaaccagactcaatagtagatcaatacatgtagccaattgttgttatacactgtagtattagtttattgacattatcaagtaccatcagtttcaaccctggatgtatactcaggtgctttcatccaacatgatcaaaccttggttacatcacgaaactctttcttggagtgcagagataagtgtacatgtgacgagttatgacagtattacgtgacataatttttccaaaatatagttgagtgtagttatgctttctcaatttttggtttttccagaactgattgatcatgtagctaaccatttagcataccaagaacatttattgacacatttcttgctggaagttgacaccagtaatgagaaattacaaataattaatgtgtcttttccgaataagtgacattattttgatattttacagtagcattattcaggttgtaaaatgtctttagcaccccccccccttttggaaatttgaatagggcggcttctcgattaaagataaaaacaaatgaacttatagagacaatacaactgaatgaagtgatcgttatcttttgcaaacaactgctttccgttgtacactgtaatttacaattgttctctgcctttcatttctataccagaacttaatactacatctgttcacaaatatatgacatcgtttactttttttagaaaactttgaccactcgtcttattcaaaatattcattcaaaaatgtaaaattttaagtcaagcataaactacctgataaaaacaaatcataaaaaataaatgataattaatactaatttttaaataagacgtgtggtcaaagtttttttaaaaaattaatggtgtcatatatttatgaacggagagagtactcgtttgcaggatgaggagtcaggcttgttttctatatctattttttaaattattgttatgcgctggtaaatcgttttgtttatgctacacatgctgaaaaagattgggccttcccctcccccgagcgactagcttgactgggctatgaaattaggcctatgaccatcacattcgaagcccacttgagggcgtagggcagcgcatctgaattctgatagatgaaatgtcggaattgttttcctatttttattccgc

SEQ ID NO: 202656 - DNA, 1369 bp, Zea Mays
gaattaaggcacaactgaactcttcaccaaattgagagtacgagtgagcaggatgactatgaagttgtcagaaaagttggaagaggtaaatatagtgaggtctttgaaggcatcaatgttaacaattatgagaaatgcatcattaagatccttaagcctgtcaagaaaaagaagatcaaaagggagatcaaaatacttcagaatctctgtggaggtccaaacattgtgaagttgcttgatattgtcagagatcagcattcaaagactcccagtttgatatttgaattcgtcaacaacacagacttcaaagtcttgtaccccacattgacggattatgacatccgctactacatatatgagctactcaaggctctagattactgccattctcaaggcatcatgcatcgagatgtcaagccccataatgtcatgatagatcacgagcttcgcaaacttcggttgatagactggggcttagctgagttttaccatccaggcaaggaatataatgtccgcgttgcatcgaggtatttcaagggacctgaactccttgttgatttacaagactatgattattctttggacatgtggagtcttggttgcatgtttgctggaatgatatttcgcaaggaaccattcttttatggccatgacaaccatgaccaacttgtgaagattgcaaaggtccttggaacagatgggttgaatgcttatttgaacaagtatcacattgagctggaccctcaacttgaagctcttgttggaaggcatagtagaaaaccctggtcaaagttcatgaatgctgataaccaacatctagtatcacctgaggccatagattttctcgataagctcctgcgctatgatcaccaagataggctcactgcacgtgaagctatggcacatccctacttcctccaagtcagagctgtggagaacagtagaacgagaccacaataatcgttgtctacaccctcgaaatgaagttgttgctaatttctggaacatcataggctaaaaccgttcaataagcatctcgctccaggaatctgggccatgactccgtggcagtgaatcagatagtatgggtcgcatcatgtgggcaaccttggcagatgtttttattgttgtctttaatcttgggactactgtagctttaaacctacaggctgtgcttgaatgacatgatattcatatcatatcgtctcctgtggtgggatatgaaattgtatgttatctttaaacataaacatactggttgtattatggtgtgctattatgtatgtatgattcttatttattttgtgtgatattgtgatgaaatactcatggatctcatagatgacatgagtttccggatagatgtgtg

SEQ ID NO: 202657 - DNA, 1638 bp, Zea Mays
tgctgatcgagggtgtagcaacctgtcacgcgtagacatgctgctttctgtgcctatccagatggctttgaatccttcatttcgattccgtgcgaagcagcactgataatgacgctcaagactgggaccttcaaagagcaataggactcatggaggttggagacgcaagaaacggttctgcagcagcggcactgacaaagggaggtgcggatgatgccgcccgcaaaccgctccctccttgctgcgtcaaggccaaggcgcgggtgcctgaaaccgaggccaactgccatgatactgtggtttcagggtggttcacggaacccagatcgcgttttggtaaaacaagcaaagtgcagtacttcaataacccgatgtggcctggagaggcccattcattgaaagtggagaagatcttgtttcaagggaaatcgccttaccaagaaattttagtttttgagtcttcaacctatggaaatgttcttgtgcttgatggtatagttcagttgactgacaaggatgaatgcgcataccaggaaatggttactcaccttccactgtgctcaattcctgcaccgaagaatgttttggttgttggaggtggtgatggtggtgtactgcgcgaaatagccagacatgattcagtggaaactattgatatatgtgagattgatcaactagttattgatgtttccaaagaattctttccaaacttatccattggattcaaagatcctcgtgtccgacttcatgttggtgatgctgttgatttcctgaggaattctcccgaaggaaaatatgatgctattattgtagattcatcagatccaattgggccagcacaggcactcgtggagaaaccgtttattcagacaattgctagagctttgaagcctggtggtgttctttgtaatcttgctgagagcatgtggctgcacacacatctaatccaggatatgcttgctatctgtcgacagacattcaaaggtgctgtgcactatgcctggacaagtgttccaacatatcccagtggtgtcattggatttttgctatgtgcaaaagaaggtcgtgcagtgaacttcttgactcctgcgaatccaattgagaaaatagaaggagcagcaaaagctggaagggaactcagattttacaattccgagatccatagggctgcttttgttctgccaacatttgtaagaagagaactggaagcatataccactcctattagttctgctgaaaacgagaaaccgaaagaatcagtgtcagaaccgcagaagataaagatattgtcaaacaacgccattcttacagcttcctagccctgagccgtactcaatcttgctcggtatagttgtattctcacagaataaatcagtcactggcttttgctgacaccgcacgagcagctttagtatagaatgatgatcgattgaataagagggtggatattgaactgatgtaatgcctctgccgaaacaatatgtctccctatcttgttaggcgtgttgtgtgttgtgcacgatttcagctgtagcttgtaaattgtacgacccgttgatgtaatgtataccctgcgtttgtgctgagaaatcacttcttttgcccgtctgcagtaatagggatgaaaacggtcggtaa

SEQ ID NO: 202658 - DNA, 1435 bp, Zea Mays
cctccgattgctgcatccgttgctgatcgaggagactgggaccttcaaagagcaataggactcatggaggttggagacgcaagaaacggttctgcagcagcggcactgacaaagggaggtgcggatgatgccgcccgcaaaccgctccctccttgctgcgtcaaggccaaggcgcgggtgcctgaaaccgaggccaactgccatgatactgtggtttcagggtggttcacggaacccagatcgcgttttggagaggcccattcattgaaagtggagaagatcttgtttcaagggaaatcgccttaccaagaaattttagtttttgagtcttcaacctatggaaatgttcttgtgcttgatggtatagttcagttgactgacaaggatgaatgcgcataccaggaaatggttactcaccttccactgtgctcaattcctgcaccgaagaatgttttggttgttggaggtggtgatggtggtgtactgcgcgaaatagccagacatgattcagtggaaactattgatatatgtgagattgatcaactagttattgatgtttccaaagaattctttccaaacttatccattggattcaaagatcctcgtgtccgacttcatgttggtgatgggccagcacaggcactcgtggagaaaccgtttattcagacaattgctagagctttgaagcctggtggtgttctttgtaatcttgctgagagcatgtggctgcacacacatctaatccaggatatgcttgctatctgtcgacagacattcaaaggtgctgtgcactatgcctggacaagtgttccaacatatcccagtggtgtcattggatttttgctatgtgcaaaagaaggtcgtgcagtgaacttcttgactcctgcgaatccaattgagaaaatagaaggagcagcaaaagctggaagggaactcagattttacaattccgagatccatagggctgcttttgttctgccaacatttgtaagaagagaactggaagcatataccactcctattagttctgctgaaaacgagaaaccgaaagaatcagtgtcagaaccgcagaagataaagatattgtcaaacaacgccattcttacagcttcctagccctgagccgtactcaatcttgctcggtatagttgtattctcacagaataaatcagtcactggcttttgctgacaccgcacgagcagctttagtatagaatgatgatcgattgaataagagggtggatattgaactgatgtaatgcctctgccgaaacaatatgtctccctatcttgttaggcgtgttgtgtgttgtgcacgatttcagctgtagcttgtaaattgtacgacccgttgatgtaatgtataccctgcgtttgtgctgagaaatcacttcttttgcccgtctgcagtaatagggatgaaaacggtcggtaa

SEQ ID NO: 202659 - DNA, 1516 bp, Zea Mays
gtttgcgtgcctccgattgctgcatccgttgctgatcgaggagactgggaccttcaaagagcaataggactcatggaggttggagacgcaagaaacggttctgcagcagcggcactgacaaagggaggtgcggatgatgccgcccgcaaaccgctccctccttgctgcgtcaaggccaaggcgcgggtgcctgaaaccgaggccaactgccatgatactgtggtttcagggtggttcacggaacccagatcgcgttttggagaggcccattcattgaaagtggagaagatcttgtttcaagggaaatcgccttaccaagaaattttagtttttgagtcttcaacctatggaaatgttcttgtgcttgatggtatagttcagttgactgacaaggatgaatgcgcataccaggaaatggttactcaccttccactgtgctcaattcctgcaccgaagaatgttttggttgttggaggtggtgatggtggtgtactgcgcgaaatagccagacatgattcagtggaaactattgatatatgtgagattgatcaactagttattgatgtttccaaagaattctttccaaacttatccattggattcaaagatcctcgtgtccgacttcatgttggtgatgctgttgatttcctgaggaattctcccgaaggaaaatatgatgctattattgtagattcatcagatccaattgggccagcacaggcactcgtggagaaaccgtttattcagacaattgctagagctttgaagcctggtggtgttctttgtaatcttgctgagagcatgtggctgcacacacatctaatccaggatatgcttgctatctgtcgacagacattcaaaggtgctgtgcactatgcctggacaagtgttccaacatatcccagtggtgtcattggatttttgctatgtgcaaaagaaggtcgtgcagtgaacttcttgactcctgcgaatccaattgagaaaatagaaggagcagcaaaagctggaagggaactcagattttacaattccgagatccatagggctgcttttgttctgccaacatttgtaagaagagaactggaagcatataccactcctattagttctgctgaaaacgagaaaccgaaagaatcagtgtcagaaccgcagaagataaagatattgtcaaacaacgccattcttacagcttcctagccctgagccgtactcaatcttgctcggtatagttgtattctcacagaataaatcagtcactggcttttgctgacaccgcacgagcagctttagtatagaatgatgatcgattgaataagagggtggatattgaactgatgtaatgcctctgccgaaacaatatgtctccctatcttgttaggcgtgttgtgtgttgtgcacgatttcagctgtagcttgtaaattgtacgacccgttgatgtaatgtataccctgcgtttgtgctgagaaatcacttcttttgcccgtctgcagtaatagggatgaaaacggtcggtaa

SEQ ID NO: 202660 - DNA, 1474 bp, Zea Mays
ccctgttcgattcaccgcgaggtctgcgacggagagactgggaccttcaaagagcaataggactcatggaggttggagacgcaagaaacggttctgcagcagcggcactgacaaagggaggtgcggatgatgccgcccgcaaaccgctccctccttgctgcgtcaaggccaaggcgcgggtgcctgaaaccgaggccaactgccatgatactgtggtttcagggtggttcacggaacccagatcgcgttttggtaaaacaagcaaagtgcagtacttcaataacccgatgtggcctggagaggcccattcattgaaagtggagaagatcttgtttcaagggaaatcgccttaccaagaaattttagtttttgagtcttcaacctatggaaatgttcttgtgcttgatggtatagttcagttgactgacaaggatgaatgcgcataccaggaaatggttactcaccttccactgtgctcaattcctgcaccgaagaatgttttggttgttggaggtggtgatggtggtgtactgcgcgaaatagccagacatgattcagtggaaactattgatatatgtgagattgatcaactagttattgatgtttccaaagaattctttccaaacttatccattggattcaaagatcctcgtgtccgacttcatgttggtgatgctgttgatttcctgaggaattctcccgaaggaaaatatgatgctattattgtagattcatcagatccaattgggccagcacaggcactcgtggagaaaccgtttattcagacaattgctagagctttgaagcctgacattcaaaggtgctgtgcactatgcctggacaagtgttccaacatatcccagtggtgtcattggatttttgctatgtgcaaaagaaggtcgtgcagtgaacttcttgactcctgcgaatccaattgagaaaatagaaggagcagcaaaagctggaagggaactcagattttacaattccgagatccatagggctgcttttgttctgccaacatttgtaagaagagaactggaagcatataccactcctattagttctgctgaaaacgagaaaccgaaagaatcagtgtcagaaccgcagaagataaagatattgtcaaacaacgccattcttacagcttcctagccctgagccgtactcaatcttgctcggtatagttgtattctcacagaataaatcagtcactggcttttgctgacaccgcacgagcagctttagtatagaatgatgatcgattgaataagagggtggatattgaactgatgtaatgcctctgccgaaacaatatgtctccctatcttgttaggcgtgttgtgtgttgtgcacgatttcagctgtagcttgtaaattgtacgacccgttgatgtaatgtataccctgcgtttgtgctgagaaatcacttcttttgcccgtctgcagtaatagggatgaaaacggtcggtaa

SEQ ID NO: 202661 - DNA, 1188 bp, Zea Mays
ctcggttgcaggtagttagtcggttccggattcgcgccggcctttttgcacgacgtggatgttgcagccggagttcttgacgacggtgcccaacgaggaatagaaagggggaaaaaaagaaacgcgtatctgaattccacacggccggcgaagacacttgaacagtcttgctggcaatgggaaacaagggaccagtgccaacacaggaatcgacgaatgatgacgccgaggcaccgtcgtctacgtctgctgcgagcaatactaagagcaagacagtgataatagtgtccgctgctacccgctagacgtggagcgagagcagctgttcgaaggatcaagcgacgacgacgccgcccacacgccacggaagagaagcacccaggagatcctcaccaaatacaagttcaaaggggacgccgcggctgccgcggctcacgcgaagcagaagctcatggagcggcaggagaaactcgcgagaatcacggagcagtccgcggagctggagagcgaggccgagaacttcgccgcgctcgcgcagcagatcaggaagaacacggagacctggtggtggaagcggtgatcaacaacgtaagccatcgcctgcttacgtagctcatgcgtcgtcagcagactggcatgggacgccacgggatcatatgcatggctgtaacccggccacgctgctcggttcctctctgcacaagcgtcagcagactgtggcgctagtacgtgccgctctctctgcatctgcatcacatcactacgagccccagcaagcagaacgaaaagcaatgcgattgtgacggttcagccagcgtcggccctgctgcccctgcagcagcagcagcatgtctgttttcctacggatctttgttttaaggcttcaacaatgagagagatgtgacctgccccccagctgccggtgcataaattcagcatggctctctgatggatggtagaaagacaccaggacgtcacgcgtctcctacctttaatttttaattaattaaagattcacaatacgatcagaaagaaatccgctagtagcgccgtaagctgattacggaccaaaaggacccgaaccaaacagcagcaccttgcggctgatcgatggccaaaatagttggtgtcggatggcccggccacgaggacctcgtgtgctgctgccggccacaagtaccggtggct

SEQ ID NO: 202662 - DNA, 2838 bp, Zea Mays
cacgcacaaccaactgcttgtatcgcggatatcgatctctgtttcgtttatttgctgctaccaagtcaattcgatccagtcgtctcaatcgtccagcgtacccacgcgcgcggcggcggcggatcgctggtggtagtagctaggtagtaactctcttagctaaggcggcagcagcaccggcccacgcggcggcggaccgatcggtcgtcgtcgtcggagatatacagatggcggcggccgccatgtgcccggggccgatgaaggcgacgtcgcagggggcgttccagggcgagaacccgctggactacgcgctgccgctggccatcctgcagatctgcctggtcgtcgtcgtcacccgcggcctcgcctacctgctccgcccgctgcgccagccccgcgtcatcgccgagatcatcggaggaatcctgctaggcccgtcggcgctggggcggagccacaggttcctgcacgccgtgttcccggcccagagcatgacggtgctggacacgctggccaacatcggcctgctcttcttcctcttcctcgtgggcctcgagctggacatctccgccatccgccgcaccggcaagaaggccctggccatcgcgctggccggcatcagcgcgccgttcgcgctcggcatcggcacgtcgttcgcgttccgcgccaccatcgtcaagggcacgccgcaggggcccttcctcgtcttcatgggcgtggcgctctccatcaccgcgttcccggtgctggcccgcatcctcgccgagctcaagctgctgaccacggacctcggccgcatggccatgtccgccgcagcggtcaacgacgtcgccgcctggatcctcctggcgctcgccatcgccctctcgggctccggctcgcccatcgtctcgctgtgggtgctgctcaccgccgctggatttgtcgttgctgtctcgctcttccttcgcccggtgctggcctggatggcgcgccgctcccccgagggcgagccggtcaaggaggtctacatctgcgccaccctcgccatcgtgctcgccgccggcttcgtcaccgacaccatcggcatccatgccctgttcggcgccttcatggtggggatcgtggtccccaaggacgggcctttcgccggcgtcctcatcgagaaggtggaggacctcatctcggggctcctcctcccgctctacttcgtctccagcgggctcaagaccgacgtggccaccatcaagggcgccaagtcctggggcctgctcgtgctcgtcatcgctaacgcgtgcctcggcaagatcggcggcacggtgatcacgtccctgctcgtcaagatccccgtccgcgaggccgtcacgctcggcttcctcatgaacaccaaggggctcgtggagctcatcgtcctcaacatcggccgcgaccgcaaggtgctgaacgacgaggcgttcgccatcctggtgctcatggcgctcttcaccaccttcatcacgacgcccatcgtgatggccatctacaagccggcgcggcgggcggtgccctacaagcgccgcacggtggagtgcgcggcgggcgacgcggacggcgagctgcgcgtgttggcctgcttccacaccaaccgccacatccccacgctgctgaacctggtggaggcgtccaggggcaccgcgcgccgccgcctcaccatgtacgcaatgcacctggtggagctctcggagcggtcgtcggccatcagcctggtacagcgcgcgcgccgcgacggcatgccctttttcagcggcggcaaggagcagcgggcggagcaggtggtggtggcgttcgaggcgttccagcagctgagctccgtgcgggtgcgcgccatgacggccatctcggacctggacaccatccaccgcgacgtcatcgacagcgccgccgacaagcgcgccgccatcgtggtgatgccgtaccaccgggcgctcggccacgacggctccttcgcgtcgctggggtcggcgtaccacgccgtcaacaagcgcgtgctccgcgaggcgccctgctcggtcgccatcctcgtggaccgcggcctcggcgggcacgcccaggtgtcggccaagaacgtgtccttctccgtcgccgtgctcttcttcggcgggccggacgaccgcgaggcgctggcctacgcgacgcgcatggccgagcacccgggcgtcgccgtgacgctggccaggttgcagccgagccgaccgccgctgctggacgaggccgagagcgcggccgacgaggccgcggtggaggcgttcaaggccagggtcggggccgtgaaggacgggtcggtgcggttcgaggagccggaggcgtgcaccagggagcaggtgctggagaccatcgagtcgctgtccgggttcaacgtgttcgtggtggggcggatgccgccggtggcgccgctggtggagaggcccgacgagctgggccccgtcgggagctacctggtgtcgcccgagttcaggacgtcggcgtccgtgctggtgatcaagaggtacgacccggccacgaaccccaagagcaagaggttcgaccccaaggcggggccgccggtggcgacggaggaggacgtgctggacgaggagatggggatggggcgcgccaccgtggtgcccgtgtgatgcaaaatttcgccgatgagcgacatggcgtgcatgagtaggtgcacgtacagtacatacgacgagctgcatgcgctcgctggcacgcgctgaggtgtgacgcgtatcgccaccgacggacgacgtgcgaccttattgaatgaagtgtatataatatatattattgggacatacgtacatgcatgccgcgccctttgttggctagcta

SEQ ID NO: 202663 - DNA, 2738 bp, Zea Mays
cgttacacacagttcctttcaggcttcacccgttttgctctcgagtctctcccggttcggatccaaattcagcaatccgacctgagaccaagaccgcgcaccacgcggctcgccgccgatggcgaacgccgacgccgacgaagcgccgctgctctctgtggaacacctccgtccaggatcctgcagccgcgagctcgagctgcgggagttccgcgaccgctacgtgatccgttcgctcgacggcgccgccgctttcgccgtccttcgctccggcggctccatccgccctctctccccagaggaagccgtagctgagagcgactgcaaggtttccagaatatacggcgtggtcggcaccataagattgctcgctggaagctatgtactcgttatcacttctcagaaagatgctggctcttatctgggctcccctgtgtaccaagtgaactcaatgaaattcttatgctgcaacgaggctatcaagcacttgactccacaggaaagaagggatgaggcatacttcatgtctctcctgagaattgcagaaactacttgtggattgtattattcatatgacagggatttgacactaaacttgcagagggcatccaagttggctgctgggagggtacataaaccactatggaagcaggctgatccacgttttgtttggaacaaaaatttgttagaggaacttattgaagctaagcttgatgagttcatcatcccactgatacaaggaaatatccaaaaaatgatagttccatgtcactgtttatgtatatatttggtttgcatgcataatgtggggcctataccttgccatcatccaaccatattagaaggatatatttcaaaaagttgcaatgcattcccattgttttctatacttggaggacgaacatgatcaggaagctggtgtcctttaactcctatagacccatacgttttcagtcagcacaatttaccttgaaggatagaccagtgaggataacattgttctcaaggagatgcaacaggcgtttaggaacaagaatgtggagaaggggtgcgaatcttgaaggcgccacagcaaattttgtagaaacagaacagttggttgagtatgaagatctcacatcctcatttatacagcttcgaggttcaattccacttctctgggagcaaatagtggatttaagctacaaaccacggcttagcattattgaacatgaagaaactcataaggttgttcaacgccactttcatgatctttcacaacgatatggcaagataattgttgctgacttgactgataaagcaggagagctgcattctcatttcattaagaggagaaaaaaacaagggagaggctgaaccatctcgttttaacagttgttctatttgtccatcgagcgacaacggttcatctaatctgttgttacttgcagcgaggtgatgaaggagatttgagcaatgcatttgctgctgaaatggacagaattcctggtgtcaggtatatacattttgatttccatcatgtttgtcgtggaggtaactttgacaatttgcaagctctctacaatcaaattgaggaagctattcataagcaaggctgagcagatattttcttatgaacactaaaggagagattttgctggagcaaagtggtgtagttaggtccaattgcattgattgcctggaccgtacaaatgtgacacagagtttccttgcaagaaaatcattggattctcaattgcagctgatgggagcattattgtcatctgaaagcatttctctctctgataacattcatgatacattcaaaaaattatgggttgagcacggtgatgagctgagcctggagtatgctggctcttatgctttgaaaggggatctagtgagatatggaaggcagacattgcctggactaattaaagatggaatgagtgctctttcaagatattatttgaataattttcatgacggagtgcggcaagatgctcttgaccttattagcggttattatacagtcagccaaggcagctcttctccttttcataatggtgttgattcttcttcgtatctgccggtggcttcagcaatcatagttggtgggattaccgcgacaactttcactctcagtcaagttggacggaacgcgcagcacttgatctcctccattatctgtgcgggcttaacagtcggagtagtagccttggtgaaagccaatgggaaacagttttgctctaggccccgtctgtgtggtctaatctaatccttggtcttttccccccttccctttcatattgccctttgttagaaattgaatgtaaaaggattagaatgttgttttattcgttgcaagagtaaggttaaataaggaggcaggatggcctgccggtcccgtaatctgaagctgctaatttgtaagcctatagtttggatttgcacattctatttgttatactttttatgtatccatgaatagaaaattacgcctcgaaattccaaatttgtaataaatccgagagaccacatatttttttagtgtgactggttggtagcgacggtcttggcgtcttgcatagttgctgacacagaaaagacacctccgtccctctgtctggtacagtgagggtggggcatcaaaaacacaaagatgctgttcttatcaggcacagatgtttgccaagtataattccacgttgcgctatacagtcgggtttgctcgtatgcatttatgatctagatactta

SEQ ID NO: 202664 - DNA, 3087 bp, Zea Mays
gcttggcttggcttgcattcacagttgcacgccggccgccgccaaccccgcccccacgtcgcgcgcgctgtctccctctcgcctctctcgtggagacgactgggcgacagccgacagccgctgtcgcccaacgcaagctgcccaggtcttcttcgggctcttcgccggcgacgagcacagccaggtttaggtcgagcaggggccgatgggggaagaggcggagagcaactgcaagcgcaaggcgccggactcgagcgtggaagagcagccgagcctcgcgccggcgccggcgcagtcgcaggcggacccggcggccaagcgcccgaacatctcccgctcttgcgtccacgaggtagccgtcccgaatgggtacgagtcggttaaggacgaggcggtgcacgggacgcttgccagcccggccttcaatggggagatggccaagcagtacccgttcaagcttgaccccttccagagcgtatccatcgcttgcctggagcggaacgagtccgtgcttgtctccgcgcacacttccgcggggaagaccgtcgttgcggagtacgccattgccatggcgttcagggacaagcagagggtcatctacacctccccgctcaaggccctgagcaaccagaagtacagggagctcagtcaggagttcacagatgtcgggctgatgactggcgacgtcacgctccatccgaacgccacatgcctggtcatgacgacagagatcctcagggcgatgctctacaggggctccgaggtgatcaaggaggttgcctgggttatattcgatgagatacattacatgaaggatcgtgagagaggggtcgtgtgggaggagagcatcattttcttgccccctgccatcaagatggttttcctttcggctaccatgtcgaatgcgaccgaatttgctgaatggatatgcagcctgcacaagcagccctgtcatgttgtgtatacggacttcaggcccacaccattgcagcactatatgtttccaataggtggttctggtctttaccttgtagtagatgaaaatggccagtttagagaagataactttgcgaagctacaagactcctttgctaagccaaataatcaactggatggaaggaaaggtggtggacctaaagcgagtggccgaattgcaaaaggtggaagcgcctctgggaattctgacatatacagaattgttaagatgattatggagcgcaagtttcaaccagtcataattttcagctttagtagaagagaatgtgagcatcatgccatgtctatgtcaaaacttgacttcagcactgaagaagaaaaggaatgcattgagcaggttttctgtaatgctattggttgtttagtggaggaagacagaagtttacctgctatagagttgatgttgccacttcttaaacgagtttgccatgggtcttaatatgcctgcgaaaacggttgttttcacgtctgtcaaaaaatgggatggcgatagtaaccgctatattggttctggagaatatatacagatgagtggaagagctggccggcgtggcaaggatgaacgtggtatctgtgttataatgatagatgagaagatggaaatgagtgttatcaaggacatggtgttaggcaaaccagcacctctagtcagtactttccgtctgagctactacactattctgaacttaatgagccgtgtggagggccaatttaccgctgagcatgtgattaggcattcattccatgaatttcagtatgagaaggcattgccagaaatagctcaaaagattacacggttggagaatgaagctaccttgcttgattcttctggcgagactgatcttgctgaatatcacaaattggggcttgatatatctgaactggagaagaaaatcatgtctgagatgattagaccagagagggctttgttgtatttggttcctggaaggctggttagagtgagggatggttcaacagactggggatggggtgtggttgtaaatgtagtgaagaaacctccagcatctgggactctccctcctgcattaagtgcatcgcgcagcaacaactatacagtcgataccttgcttcactgctcctctaattccagcgagaatggatcacgttcaaagccatgccctcctcgcccaggggaaaaaggtgaaatgcatgtggtgcctgtaccattgcctttagtatctggtctaagcagtgttagaatcaacattcctcctgatctacgaccacctgaagcaagacagaatatactttctgcagtgcaagaactaggaaagcgctacccccaaggtcttccgaaactacatccaatcaatgacatgggtattcaagaacctgaactagttgacttggtacataaacttgaagaccttgagcagaaacaatgctctcaccgacttcataagtccggtcaaagtgaacaggaactatcatggtaccaaaaaaaagcagatctgaatactgaaattcagcaactcaagtcaaagatgcgggattcacagctacaaaaatttagagatgaacttaggaaccggtcccgtgttctgaagatgctggggcatattgatgctgacggtgttctccagttaaaaggacgtgctgcctgtctaatagacacaggggatgaactgcttatcactgaacttatgttcaatggtacatttaatgatcttgaccatcatcaagttgcctcccttgctagctgctttgtaccttgtgataaatcaagtgagcagatacgcctaagaaatgaactttctaggccgatgatgcagcttcaggaggctgcaagaaaaatagctgaggtacaacgagaatgcaaactggaagtaaatgtggaggaatatgttgaatcaacctgcagaccctaccttatggatgtcatatactgttggtcaaggggagccacctttgcggaggtgatggaaatgaccgacatatttgaaggaagtgtcataagacttgctagaaggctggatgaatttctgaatcagttgagagctgctgctgaagccgtgggggaggttaaccttgagaagaagttcaagaatgcaagtgagagtttgcgtcggg

SEQ ID NO: 202665 - DNA, 3092 bp, Zea Mays
gcttggcttggcttgcattcacagttgcacgccggccgccgccaaccccgcccccacgtcgcgcgcgctgtctccctctcgcctctctcgtggagacgactgggcgacagccgacagccgctgtcgcccaacgcaagctgcccaggtcttcttcgggctcttcgccggcgacgagcacagccaggtttaggtcgagcaggggccgatgggggaagaggcggagagcaactgcaagcgcaaggcgccggactcgagcgtggaagagcagccgagcctcgcgccggcgccggcgcagtcgcaggcggacccggcggccaagcgcccgaacatctcccgctcttgcgtccacgaggtagccgtcccgaatgggtacgagtcggttaaggacgaggcggtgcacgggacgcttgccagcccggccttcaatggggagatggccaagcagtacccgttcaagcttgaccccttccagagcgtatccatcgcttgcctggagcggaacgagtccgtgcttgtctccgcgcacacttccgcggggaagaccgtcgttgcggagtacgccattgccatggcgttcagggacaagcagagggtcatctacacctccccgctcaaggccctgagcaaccagaagtacagggagctcagtcaggagttcacagatgtcgggctgatgactggcgacgtcacgctccatccgaacgccacatgcctggtcatgacgacagagatcctcagggcgatgctctacaggggctccgaggtgatcaaggaggttgcctgggttatattcgatgagatacattacatgaaggatcgtgagagaggggtcgtgtgggaggagagcatcattttcttgccccctgccatcaagatggttttcctttcggctaccatgtcgaatgcgaccgaatttgctgaatggatatgcagcctgcacaagcagccctgtcatgttgtgtatacggacttcaggcccacaccattgcagcactatatgtttccaataggtggttctggtctttaccttgtagtagatgaaaatggccagtttagagaagataactttgcgaagctacaagactcctttgctaagccaaataatcaactggatggaaggaaaggtggtggacctaaagcgagtggccgaattgcaaaaggtggaagcgcctctgggaattctgacatatacagaattgttaagatgattatggagcgcaagtttcaaccagtcataattttcagctttagtagaagagaatgtgagcatcatgccatgtctatgtcaaaacttgacttcagcactgaagaagaaaaggaatgcattgagcaggttttctgtaatgctattggttgtttagtggaggaagacagaagtttacctgctatagagttgatgttgccacttcttaaacgaggtattgcagtacaccattctggactacttccaataattaaggagctagtggaattgctctttcaagaaggtcttgtgaaagctctctttgctaccgagacatttgccatgggtcttaatatgcctgcgaaaacggttgttttcacgtctgtcaaaaaatgggatggcgatagtaaccgctatattggttctggagaatatatacagatgagtggaagagctggccggcgtggcaaggatgaacgtggtatctgtgttataatgatagatgagaagatggaaatgagtgttatcaaggacatggtgttaggcaaaccagcacctctagtcagtactttccgtctgagctactacactattctgaacttaatgagccgtgtggagggccaatttaccgctgagcatgtgattaggcattcattccatgaatttcagtatgagaaggcattgccagaaatagctcaaaagattacacggttggagaatgaagctaccttgcttgattcttctggcgagactgatcttgctgaatatcacaaattggggcttgatatatctgaactggagaagaaaatcatgtctgagatgattagaccagagagggctttgttgtatttggttcctggaaggctggttagagtgagggatggttcaacagactggggatggggtgtggttgtaaatgtagtgaagaaacctccagcatctgggactctccctcctgcattaagtgcatcgcgcagcaacaactatacagtcgataccttgcttcactgctcctctaattccagcgagaatggatcacgttcaaagccatgccctcctcgcccaggggaaaaaggtgaaatgcatgtggtgcctgtaccattgcctttagtatctggtctaagcagtgttagaatcaacattcctcctgatctacgaccacctgaagcaagacagaatatactttctgcagtgcaagaactaggaaagcgctacccccaaggtcttccgaaactacatccaatcaatgacatgggtattcaagaacctgaactagttgacttggtacataaacttgaagaccttgagcagaaacaatgctctcaccgacttcataagtccggtcaaagtgaacaggaactatcatggtaccaaaaaaaagcagatctgaatactgaaattcagcaactcaagtcaaagatgcgggattcacagctacaaaaatttagagatgaacttaggaaccggtcccgtgttctgaagatgctggggcatattgatgctgacggtgttctccagttaaaaggacgtgctgcctgtctaatagacacaggggatgaactgcttatcactgaacttatgttcaatggtacatttaatgatcttgaccatcatcaagttgcctcccttgctagctgctttgtaccttgtgataaatcaagtgagcagatacgcctaagaaatgaactttctaggccgatgatgcagcttcaggaggctgcaagaaaaatagctgagggagccacctttgcggaggtgatggaaatgaccgacatatttgaaggaagtgtcataagacttgctagaaggctggatgaatttctgaatcagttgagagctgctgctgaagccgtgggggaggttaaccttgagaagaagttcaagaatgcaagtgagagtttgcgtcggg

SEQ ID NO: 202666 - DNA, 3296 bp, Zea Mays
gcttggcttggcttgcattcacagttgcacgccggccgccgccaaccccgcccccacgtcgcgcgcgctgtctccctctcgcctctctcgtggagacgactgggcgacagccgacagccgctgtcgcccaacgcaagctgcccaggtcttcttcgggctcttcgccggcgacgagcacagccaggtttaggtcgagcaggggccgatgggggaagaggcggagagcaactgcaagcgcaaggcgccggactcgagcgtggaagagcagccgagcctcgcgccggcgccggcgcagtcgcaggcggacccggcggccaagcgcccgaacatctcccgctcttgcgtccacgaggtagccgtcccgaatgggtacgagtcggttaaggacgaggcggtgcacgggacgcttgccagcccggccttcaatggggagatggccaagcagtacccgttcaagcttgaccccttccagagcgtatccatcgcttgcctggagcggaacgagtccgtgcttgtctccgcgcacacttccgcggggaagaccgtcgttgcggagtacgccattgccatggcgttcagggacaagcagagggtcatctacacctccccgctcaaggccctgagcaaccagaagtacagggagctcagtcaggagttcacagatgtcgggctgatgactggcgacgtcacgctccatccgaacgccacatgcctggtcatgacgacagagatcctcagggcgatgctctacaggggctccgaggtgatcaaggaggttgcctgggttatattcgatgagatacattacatgaaggatcgtgagagaggggtcgtgtgggaggagagcatcattttcttgccccctgccatcaagatggttttcctttcggctaccatgtcgaatgcgaccgaatttgctgaatggatatgcagcctgcacaagcagccctgtcatgttgtgtatacggacttcaggcccacaccattgcagcactatatgtttccaataggtggttctggtctttaccttgtagtagatgaaaatggccagtttagagaagataactttgcgaagctacaagactcctttgctaagccaaataatcaactggatggaaggaaaggtggtggacctaaagcgagtggccgaattgcaaaaggtggaagcgcctctgggaattctgacatatacagaattgttaagatgattatggagcgcaagtttcaaccagtcataattttcagctttagtagaagagaatgtgagcatcatgccatgtctatgtcaaaacttgacttcagcactgaagaagaaaaggaatgcattgagcaggttttctgtaatgctattggttgtttagtggaggaagacagaagtttacctgctatagagttgatgttgccacttcttaaacgaggtattgcagtacaccattctggactacttccaataattaaggagctagtggaattgctctttcaagaaggtcttgtgaaagctctctttgctaccgagacatttgccatgggtcttaatatgcctgcgaaaacggttgttttcacgtctgtcaaaaaatgggatggcgatagtaaccgctatattggttctggagaatatatacagatgagtggaagagctggccggcgtggcaaggatgaacgtggtatctgtgttataatgatagatgagaagtgcatcctcattctgcagttgtatttctgtgtccagttgacaaaatctgatgtgagaattgatcactgatttccttgctatctattgttcttgctatttcaattgcagatggaaatgagtgttatcaaggacatggtgttaggcaaaccagcacctctagtcagtactttccgtctgagctactacactattctgaacttaatgagccgtgtggagggccaatttaccgctgagcatgtgattaggcattcattccatgaatttcagtatgagaaggcattgccagaaatagctcaaaagattacacggttggagaatgaagctaccttgcttgattcttctggcgagactgatcttgctgaatatcacaaattggggcttgatatatctgaactggagaagaaaatcatgtctgagatgattagaccagagagggctttgttgtatttggttcctggaaggctggttagagtgagggatggttcaacagactggggatggggtgtggttgtaaatgtagtgaagaaacctccagcatctgggactctccctcctgcattaagtgcatcgcgcagcaacaactatacagtcgataccttgcttcactgctcctctaattccagcgagaatggatcacgttcaaagccatgccctcctcgcccaggggaaaaaggtgaaatgcatgtggtgcctgtaccattgcctttagtatctggtctaagcagtgttagaatcaacattcctcctgatctacgaccacctgaagcaagacagaatatactttctgcagtgcaagaactaggaaagcgctacccccaaggtcttccgaaactacatccaatcaatgacatgggtattcaagaacctgaactagttgacttggtacataaacttgaagaccttgagcagaaacaatgctctcaccgacttcataagtccggtcaaagtgaacaggaactatcatggtaccaaaaaaaagcagatctgaatactgaaattcagcaactcaagtcaaagatgcgggattcacagctacaaaaatttagagatgaacttaggaaccggtcccgtgttctgaagatgctggggcatattgatgctgacggtgttctccagttaaaaggacgtgctgcctgtctaatagacacaggggatgaactgcttatcactgaacttatgttcaatggtacatttaatgatcttgaccatcatcaagttgcctcccttgctagctgctttgtaccttgtgataaatcaagtgagcagatacgcctaagaaatgaactttctaggccgatgatgcagcttcaggaggctgcaagaaaaatagctgaggtacaacgagaatgcaaactggaagtaaatgtggaggaatatgttgaatcaacctgcagaccctaccttatggatgtcatatactgttggtcaaggggagccacctttgcggaggtgatggaaatgaccgacatatttgaaggaagtgtcataagacttgctagaaggctggatgaatttctgaatcagttgagagctgctgctgaagccgtgggggaggttaaccttgagaagaagttcaagaatgcaagtgagagtttgcgtcggg

SEQ ID NO: 202667 - DNA, 3278 bp, Zea Mays
gcttggcttggcttgcattcacagttgcacgccggccgccgccaaccccgcccccacgtcgcgcgcgctgtctccctctcgcctctctcgtggagacgactgggcgacagccgacagccgctgtcgcccaacgcaagctgcccaggtcttcttcgggctcttcgccggcgacgagcacagccaggtttaggtcgagcaggggccgatgggggaagaggcggagagcaactgcaagcgcaaggcgccggactcgagcgtggaagagcagccgagcctcgcgccggcgccggcgcagtcgcaggcggacccggcggccaagcgcccgaacatctcccgctcttgcgtccacgaggtagccgtcccgaatgggtacgagtcggttaaggacgaggcggtgcacgggacgcttgccagcccggccttcaatggggagatggccaagcagtacccgttcaagcttgaccccttccagagcgtatccatcgcttgcctggagcggaacgagtccgtgcttgtctccgcgcacacttccgcggggaagaccgtcgttgcggagtacgccattgccatggcgttcagggacaagcagagggtcatctacacctccccgctcaaggccctgagcaaccagaagtacagggagctcagtcaggagttcacagatgtcgggctgatgactggcgacgtcacgctccatccgaacgccacatgcctggtcatgacgacagagatcctcagggcgatgctctacaggggctccgaggtgatcaaggaggttgcctgggttatattcgatgagatacattacatgaaggatcgtgagagaggggtcgtgtgggaggagagcatcattttcttgccccctgccatcaagatggttttcctttcggctaccatgtcgaatgcgaccgaatttgctgaatggatatgcagcctgcacaagcagccctgtcatgttgtgtatacggacttcaggcccacaccattgcagcactatatgtttccaataggtggttctggtctttaccttgtagtagatgaaaatggccagtttagagaagataactttgcgaagctacaagactcctttgctaagccaaataatcaactggatggaaggaaaggtggtggacctaaagcgagtggccgaattgcaaaaggtggaagcgcctctgggaattctgacatatacagaattgttaagatgattatggagcgcaagtttcaaccagtcataattttcagctttagtagaagagaatgtgagcatcatgccatgtctatgtcaaaacttgacttcagcactgaagaagaaaaggaatgcattgagcaggttttctgtaatgctattggttgtttagtggaggaagacagaagtttacctgctatagagttgatgttgccacttcttaaacgaggtattgcagtacaccattctggactacttccaataattaaggagctagtggaattgctctttcaagaaggtcttgtgaaagctctctttgctaccgagacatttgccatgggtcttaatatgcctgcgaaaacggttgttttcacgtctgtcaaaaaatgggatggcgatagtaaccgctatattggttctggagaatatatacagatgagtggaagagctggccggcgtggcaaggatgaacgtggtatctgtgttataatgatagatgagaagttgtatttctgtgtccagttgacaaaatctgatgtgagaattgatcactgatttccttgctatctattgttcttgctatttcaattgcagatggaaatgagtgttatcaaggacatggtgttaggcaaaccagcacctctagtcagtactttccgtctgagctactacactattctgaacttaatgagccgtgtggagggccaatttaccgctgagcatgtgattaggcattcattccatgaatttcagtatgagaaggcattgccagaaatagctcaaaagattacacggttggagaatgaagctaccttgcttgattcttctggcgagactgatcttgctgaatatcacaaattggggcttgatatatctgaactggagaagaaaatcatgtctgagatgattagaccagagagggctttgttgtatttggttcctggaaggctggttagagtgagggatggttcaacagactggggatggggtgtggttgtaaatgtagtgaagaaacctccagcatctgggactctccctcctgcattaagtgcatcgcgcagcaacaactatacagtcgataccttgcttcactgctcctctaattccagcgagaatggatcacgttcaaagccatgccctcctcgcccaggggaaaaaggtgaaatgcatgtggtgcctgtaccattgcctttagtatctggtctaagcagtgttagaatcaacattcctcctgatctacgaccacctgaagcaagacagaatatactttctgcagtgcaagaactaggaaagcgctacccccaaggtcttccgaaactacatccaatcaatgacatgggtattcaagaacctgaactagttgacttggtacataaacttgaagaccttgagcagaaacaatgctctcaccgacttcataagtccggtcaaagtgaacaggaactatcatggtaccaaaaaaaagcagatctgaatactgaaattcagcaactcaagtcaaagatgcgggattcacagctacaaaaatttagagatgaacttaggaaccggtcccgtgttctgaagatgctggggcatattgatgctgacggtgttctccagttaaaaggacgtgctgcctgtctaatagacacaggggatgaactgcttatcactgaacttatgttcaatggtacatttaatgatcttgaccatcatcaagttgcctcccttgctagctgctttgtaccttgtgataaatcaagtgagcagatacgcctaagaaatgaactttctaggccgatgatgcagcttcaggaggctgcaagaaaaatagctgaggtacaacgagaatgcaaactggaagtaaatgtggaggaatatgttgaatcaacctgcagaccctaccttatggatgtcatatactgttggtcaaggggagccacctttgcggaggtgatggaaatgaccgacatatttgaaggaagtgtcataagacttgctagaaggctggatgaatttctgaatcagttgagagctgctgctgaagccgtgggggaggttaaccttgagaagaagttcaagaatgcaagtgagagtttgcgtcggg

SEQ ID NO: 202668 - DNA, 3260 bp, Zea Mays
gcttggcttggcttgcattcacagttgcacgccggccgccgccaaccccgcccccacgtcgcgcgcgctgtctccctctcgcctctctcgtggagacgactgggcgacagccgacagccgctgtcgcccaacgcaagctgcccaggtcttcttcgggctcttcgccggcgacgagcacagccaggtttaggtcgagcaggggccgatgggggaagaggcggagagcaactgcaagcgcaaggcgccggactcgagcgtggaagagcagccgagcctcgcgccggcgccggcgcagtcgcaggcggacccggcggccaagcgcccgaacatctcccgctcttgcgtccacgaggtagccgtcccgaatgggtacgagtcggttaaggacgaggcggtgcacgggacgcttgccagcccggccttcaatggggagatggccaagcagtacccgttcaagcttgaccccttccagagcgtatccatcgcttgcctggagcggaacgagtccgtgcttgtctccgcgcacacttccgcggggaagaccgtcgttgcggagtacgccattgccatggcgttcagggacaagcagagggtcatctacacctccccgctcaaggccctgagcaaccagaagtacagggagctcagtcaggagttcacagatgtcgggctgatgactggcgacgtcacgctccatccgaacgccacatgcctggtcatgacgacagagatcctcagggcgatgctctacaggggctccgaggtgatcaaggaggttgcctgggttatattcgatgagatacattacatgaaggatcgtgagagaggggtcgtgtgggaggagagcatcattttcttgccccctgccatcaagatggttttcctttcggctaccatgtcgaatgcgaccgaatttgctgaatggatatgcagcctgcacaagcagccctgtcatgttgtgtatacggacttcaggcccacaccattgcagcactatatgtttccaataggtggttctggtctttaccttgtagtagatgaaaatggccagtttagagaagataactttgcgaagctacaagactcctttgctaagccaaataatcaactggatggaaggaaaggtggtggacctaaagcgagtggccgaattgcaaaaggtggaagcgcctctgggaattctgacatatacagaattgttaagatgattatggagcgcaagtttcaaccagtcataattttcagctttagtagaagagaatgtgagcatcatgccatgtctatgtcaaaacttgacttcagcactgaagaagaaaaggaatgcattgagcaggttttctgtaatgctattggttgtttagtggaggaagacagaagtttacctgctatagagttgatgttgccacttcttaaacgaggtattgcagtacaccattctggactacttccaataattaaggagctagtggaattgctctttcaagaaggtcttgtgaaagctctctttgctaccgagacatttgccatgggtcttaatatgcctgcgaaaacggttgttttcacgtctgtcaaaaaatgggatggcgatagtaaccgctatattggttctggagaatatatacagatgagtggaagagctggccggcgtggcaaggatgaacgtggtatctgtgttataatgatagatgagaagttgacaaaatctgatgtgagaattgatcactgatttccttgctatctattgttcttgctatttcaattgcagatggaaatgagtgttatcaaggacatggtgttaggcaaaccagcacctctagtcagtactttccgtctgagctactacactattctgaacttaatgagccgtgtggagggccaatttaccgctgagcatgtgattaggcattcattccatgaatttcagtatgagaaggcattgccagaaatagctcaaaagattacacggttggagaatgaagctaccttgcttgattcttctggcgagactgatcttgctgaatatcacaaattggggcttgatatatctgaactggagaagaaaatcatgtctgagatgattagaccagagagggctttgttgtatttggttcctggaaggctggttagagtgagggatggttcaacagactggggatggggtgtggttgtaaatgtagtgaagaaacctccagcatctgggactctccctcctgcattaagtgcatcgcgcagcaacaactatacagtcgataccttgcttcactgctcctctaattccagcgagaatggatcacgttcaaagccatgccctcctcgcccaggggaaaaaggtgaaatgcatgtggtgcctgtaccattgcctttagtatctggtctaagcagtgttagaatcaacattcctcctgatctacgaccacctgaagcaagacagaatatactttctgcagtgcaagaactaggaaagcgctacccccaaggtcttccgaaactacatccaatcaatgacatgggtattcaagaacctgaactagttgacttggtacataaacttgaagaccttgagcagaaacaatgctctcaccgacttcataagtccggtcaaagtgaacaggaactatcatggtaccaaaaaaaagcagatctgaatactgaaattcagcaactcaagtcaaagatgcgggattcacagctacaaaaatttagagatgaacttaggaaccggtcccgtgttctgaagatgctggggcatattgatgctgacggtgttctccagttaaaaggacgtgctgcctgtctaatagacacaggggatgaactgcttatcactgaacttatgttcaatggtacatttaatgatcttgaccatcatcaagttgcctcccttgctagctgctttgtaccttgtgataaatcaagtgagcagatacgcctaagaaatgaactttctaggccgatgatgcagcttcaggaggctgcaagaaaaatagctgaggtacaacgagaatgcaaactggaagtaaatgtggaggaatatgttgaatcaacctgcagaccctaccttatggatgtcatatactgttggtcaaggggagccacctttgcggaggtgatggaaatgaccgacatatttgaaggaagtgtcataagacttgctagaaggctggatgaatttctgaatcagttgagagctgctgctgaagccgtgggggaggttaaccttgagaagaagttcaagaatgcaagtgagagtttgcgtcggg

SEQ ID NO: 202669 - DNA, 405 bp, Zea Mays
accaaccctagggttctcacggcgccataagagcctctcctctctccccggccgcccgctgccgctgcttgcgcctctctcgcccgcatcgccgcagggttcgcaaagatggcagtgccgctgctgacgcagaagatcgtgaagaagcgggtcaagcagttcaagaggccacacctcgaccgctacaagtgcctcaagccaagctggcgtaggcccaagggtatcgactcccgcgtcaggcggaagttcaagggatgcaccttgatgcccaacattggatacggctctgacaagaagacgaggcactaccttcccaacaagttcaagaagtttgtcgttcacaacgtctctgagctggagctgctgttgatgcacaacaggacgaccctatttatcctgtgcttc

SEQ ID NO: 202670 - DNA, 2104 bp, Zea Mays
cttcaagatgtggaaatggtattctagctctagaactaggagagggaaatctcagctccatgcttcatggcaggtgaggattgtgaagcctgtgcgcgcccatgttctccacgaaaagacgaactcgttctccttcacgatttcgacagcattgacacgaaaacagttgttaatccctagcctaggtatccatagatccaacccagatgctgatgcgggggtgcaacagtgcaagaacaactctggattcctccggatgatgccatgccaccaatcctcactaaccaattattattatccaacaaatccacgagaaaaggacgtcctttttttctctctgaagagtgggagtgtacccggcggcctggcctaccgccttcatttcttggcacaaccaaccgggggctcggaagaggagaagagccgaccagccgggcatattctctcttcctccctccggtgctctctccagcggtccagccgcagcgccctgaaagagggaggcttccactcttctttctccccgagcacccgccgtacgtctcctgcaccttcttccagtttctcccatttcagtttgtccactccctgtcattcctgccgcctcgacctccccgctctggaaggttcagatttagcctgggtgcgtctgcaggttccggttcatggagagatggagcctgggtgccaaagtggtagctctcgcactcctgctgtctgctgcttctcatggaagagagttgcctgtcaagagtagtgaccgcagttttatctacaatcatactcttgcaaagacgcttgtggaatatgcatcagcggtgtatatgacagatttaaccgctctgtttacgtggacatgctcaagatgcaatgacttgactcaaggattcgagatgagatctctaattgttgatgtggagaactgcttgcaggcatttgttggtgtagatcatagtctgaattcgataattgttgcaatcaggggaactcaagagaacagtgtacagaattggataaaagacttgatatggaagcagcttgatctaagttatccaaacatgccaaatgcaaaggtgcacagtggatttttctcctcgtataacaatacaattttgcgtctagctatcacaagtgctgtgcacaaggcaagaaagtcatatggagatatcaatgtcatagtgacaggccactcgatgggaggagctatggcttctttttgcgcgctcgatcttgctatgaagcttggaggtggcagtgtgcaactcatgacttttgggcagcctcgtgttggcaatgctgcattcgcctcatacttcgccaaatatgtacccaacacaattcgagtgacacacgggcatgatattgtgccacatttgccaccttatttctcctttcttccccagctgacataccaccatttcccaagagaggtatgggtccaggattctgatggcaacacaactgaacggatttgtgacgacagcggtgaagacccagattgttgcaggtgcatctccatgttcggcttgaggattcaggaccatttcacttacctaggagttgatatggaagcggacgactggagcacctgtagaatcatcacagctcaaagggttcagcagttccgactggagctagcgggcaacatcatgatgaccaagcacgatatcgacgtctccatcgttgaacctagtgtacaaaacagattggagcagttctagataggcggaacattcgttttgtccagattcagagaagcaacagcctcttgttaatgcagtggaaattgttcagagacgaaggcgacccttgttttctctattagttcggtcagaatgggatgttctttcagatcaaggaaataaatcgggagtcatctcttgtaacaaagagaatcagagcatgatgtacataaggaaaaatcataggcacggtttatgctggatatggtagggattgcttctgtgtaaatatatgtatacaatgtaaacttgcaatggctatatttgcagcaacataagcaccaagctaactgaaaaatatcagttaaccgaatgaatgaggcgtatctatatatacatgatgtgagcttgcaatagcgtat

SEQ ID NO: 202671 - DNA, 2773 bp, Zea Mays
atgtggaaatggtattctagctctagaactaggagagggaaatctcagctccatgcttcatggcaggtgaggattgtgaagcctgtgcgcgcccatgttctccacgaaaagacgaactcgttctccttcacgatttcgacagcattgacacgaaaacagttgttaatccctagcctaggtatccatagatccaacccagatgctgatgcgggggtgcaacagtgcaagaacaactctggattcctccggatgatgccatgccaccaatcctcactaaccaattattattatccaacaaatccacgagaaaaggacgtcctttttttctctctgaagagtgggagtgtacccggcggcctggcctaccgccttcatttcttggcacaaccaaccgggggctcggaagaggagaagagccgaccagccgggcatattctctcttcctccctccggtgctctctccagcggtccagccgcagcgccctgaaagagggaggcttccactcttctttctccccgagcacccgccgtacgtctcctgcaccttcttccagtttctcccatttcagtttgtccactccctgtcattcctgccgcctcgacctccccgctctggaaggtcaaatccttcgcccctaagcttttatttctgtttgtatttggttctggaatcgttgcctgctggctgctgctgctgcacattacccccgtattctgtgctccggccgtgggattgccctgctcgctttctttcaaaaaagaaaaggaaaaggagcaattgctctgctcgctttcagtttgtgtggttgacgtctctctctgagtctctgtgcttcagcaggttcagatttagcctgggtgcgtctgcaggttccggttcatggagagatggagcctgggtgccaaagtggtagctctcgcactcctgctgtctgctgcttctcatggaagaggtagttccgtgcgattctctgttggttgctgggttgctgttttatgtaaattggcaccaaaggggtccccgacagcaagctagcttaatagtaacaaacaagataagtatcgagttttcatcgattgtgctaacatctaggaaaagctctgcgttgtggaggaggggggaagtaggtgacaggtgtgtatcagttgctgccatttgctagttcctgctacaggactttgttgttcatatcgtggtgtcctgtcctgattgctagaaaggaagccattattggtggccctacaaaacaaaacaagttaggaaattgcaaaagtagatggttgatgaaccgtaactgcacagaatcgttacaagttgtttttttaagttgacattgcactcaggattctagtcgctggccgcatccctaatattcagtctgccatattttatttcccttatcacagagttgcctgtcaagagtagtgaccgcagttttatctacaatcatactcttgcaaagacgcttgtggaatatgcatcagcggtgtatatgacagatttaaccgctctgtttacgtggacatgctcaagatgcaatgacttgactcaaggattcgagatgagatctctaattgttgatgtggagaactgcttgcaggcatttgttggtgtagatcatagtctgaattcgataattgttgcaatcaggggaactcaagagaacagtgtacagaattggataaaagacttgatatggaagcagcttgatctaagttatccaaacatgccaaatgcaaaggtgcacagtggatttttctcctcgtataacaatacaattttgcgtctagctatcacaagtgctgtgcacaaggcaagaaagtcatatggagatatcaatgtcatagtgacaggccactcgatgggaggagctatggcttctttttgcgcgctcgatcttgctatgaagcttggaggtggcagtgtgcaactcatgacttttgggcagcctcgtgttggcaatgctgcattcgcctcatacttcgccaaatatgtacccaacacaattcgagtgacacacgggcatgatattgtgccacatttgccaccttatttctcctttcttccccagctgacataccaccatttcccaagagaggtatgggtccaggattctgatggcaacacaactgaacggatttgtgacgacagcggtgaagacccagattgttgcaggtgcatctccatgttcggcttgaggattcaggaccatttcacttacctaggagttgatatggaagcggacgactggagcacctgtagaatcatcacagctcaaagggttcagcagttccgactggagctagcgggcaacatcatgatgaccaagcacgatatcgacgtctccatcgttgaacctagtgtacaaaacagattggagcagttctagataggcggaacattcgttttgtccagattcagagaagcaacagcctcttgttaatgcagtggaaattgttcagagacgaaggcgacccttgttttctctattagttcggtcagaatgggatgttctttcagatcaaggaaataaatcgggagtcatctcttgtaacaaagagaatcagagcatgatgtacataaggaaaaatcataggcacggtttatgctggatatggtagggattgcttctgtgtaaatatatgtatacaatgtaaacttgcaatggctatatttgcagcaacataagcaccaagctaactgaaaaatatcagttaaccgaatgaatgaggcgtatctatatatacatgatgtgagcttgcaatagcgtat

SEQ ID NO: 202672 - DNA, 1862 bp, Zea Mays
ctcgcgtcctcctccacaccaatgcggccaccaccgcacgtcgccgcctccacctcgcctgccctccacgccgggtcgtcccggcgccggcctcaccaccgcggccggacgatgatgtccgtctcctgctgccacttggcggcgctcgtgtccatcctcgcggcgggcgcggctacggcgttgctcaccttgtccctaccctcttcccctggcgcatccacgacgaggagaaccgacttcgctggagcattgtcagtggcaaacgagaccccgccactgccgcacttgtcagcgcctccggcacccgccacgccgccccctgctccaccttccccgcccgccgacaggcctcgaaagcgagagccgtcgttctggaggatggcgccggaggaggcgctgcgctacgccaagaaggaaatacgggacgccgagccggtgctcgacgaccccgacctgtacgcgcctctgttcaagaacgtctcccagttcaagaggacggccggaggcccatcttccacacgcctcccctcagcggcatctacgcctccgagggctggttcatgaagctcctcaaggagagccgccggcacgtcgtcgccgacgcgggcaaggcgcacctcttctaccttccctacagctctcagcagctgaggctcacgctctacgaggccggctcccacaacctcaggccgctggccgcgtacctgagaaacttcgtcagaggcctcgccagcaagtacccgttctggaaccgcacgagaggagccgaccatttccttgtcgcctgccatgattggggaccttacacgacgaccgcgcacagggacctccgcaagaacgccatcaaggcgctgtgcaacgccgatagctcggagggcatctttacccccgggaaggacgtctccctgcccgaaacaaccatccggacccccaggcggccgctccggtacgtcggcggcctgccggtgtcccgccggagcatcctagccttcttcgccggcaacgtgcacggcagggtccggccagtgctcctcaggcactggggcaacgggcaggacgacgacatgcgggtgtacagcctgctgcccagcagggtgtcacgccggatgaactacatccagcacatgaagaacagccgcttctgcctctgccccatggggtacgaggtgaacagcccccgcatcgtcgaggcgctctactacgagtgcgtgcccgtgatcatcgccgacaacttcgtgctgcccttcagcgaggtgctggactggagcgccttctcggtggtcatcgccgagaaggacataccggacctcaagaagatcctgaaggggatctcgctgcggaggtacgtggcgatgcacgactccgtcaagcgcctgcagcgccacttcctgtggcacgccaggccgatcaagtacgacctcttccacatgatcctgcactcaatttggttgagtagagtcaaccaggtccaggttcagcttgagggatgaaatgtagtagtgtcaagcttgatcttgtcataagacagcttgcctactactccctccgtttctttttatttgtcgctggatagtgtaaaattgcactatccagcgacaaataaaaagaaacggagggagtatgttgtatgatacaaatcgtcatatgtttgagatggttttataaagatatatttagaaatcgtagatttttttcttggttcaatacaagcctctgtaactgtatctagagaggacagtgcatttcctcatgttgttggcatgcagctcatgtagaaaggagtgtctctagtcggctcggtttgagaaatcactctaaggtcttgttcggttatacccaaattcatatatattgaggaggat

SEQ ID NO: 202673 - DNA, 2821 bp, Zea Mays
cttacatgtatgtagtgtttggagaacagtatctatgttttacgtaccctaacactgctggtgctcttcacttgggtttaatccaaagtccaaaaccacatcacacccttctaatcccaatcgcggcacgactcacgagctcctcgcgccgctgcagtgggctctgcgcctttcctctcgccggagtcctaaaaaaaccctagggactagggagcgtgcggctgctgctgctgcggccggacgaggggatgggcacagggggagacggggacaaggcggggccggcgctgccgctggaggcgcttttggcgctcgggctcgaccagcgcaccgccgagaacgcgctcgtcaacgccaaggtcaccgccaacctcgccgccgtcatagctgaggctggtataaaggaatgtgacaagtcaattggtaatcttctatatgcagttgccaccaagtacccaactaatgcacttgttcatcgccctgtccttattagctatgtcttgtcaacaaagataaagagccctgcacagctagatgctgccctctcatttcttactaatactggtcctgattctctagatgtggacaagtttgaagaagcatgtggtgtaggcgtggttgtttctattgaggaaattaaatctactgttactgacattcttgaggagaatatggaagctataaaggagcagcgttggtatgctatgtggacaggttaggaagagacacccctggggtgatgctaaggcagtaaaggaggaaattgacaagaggcttgcagaaatcctaggtccaaagacagaagctgacagtataaaaccagtgaaaaagaagaaggaaaaaacagcaaaagttgaggagaaaaaagttgcagttgccactactgccccaccatctgaggaggaattgaacccgtatactatatttccccaaccagaggaaaactttaaggttcatacagaaatatttttcagtgatgggaacatatggagagcacataacacaaaggaaattttggaaaaacatctcaaggcaactggaggaaaagtgatgacccgttttccaccagaacctaatggatatcttcatattggtcatgccaaggctatgtttatcgattttggtctggctaaggagcgaaatggccattgctaccttaggtttgacgacacaaatccggaagctgaaaagaaagaatacatagatcacattcaagaaattgtccattggatgggatgggaaccctacaaagtaacatacacgagtgattatttccaacctttgtatgagcatgctgttgagttaattcggaaagggctagcctatgtggatcatcagactgcagaagaaattaaggagtacagggaaaagaagatgaatagtccatggagggataggccaattgaagagtcattgaatttatttgaagacatgaggcgtgggttgattgcggagggtgcagcaactctccgaatgaagcaggatatgcaaaatgagaacaaaaatatgtctgacttaatagcatatagaataaaattcacccctcatccacatgctggtgataattggtgtatctatccgagctatgactatgctcattgcatggtggattctcttgaaaacatcacgcattcgctgtgcacacttgagtttgacatacgccgcccttcatactactggctacttgttgccttgggtctttatcaaccatatgtgtgggaatattcgaggctaaacatatcaaatactgtgatgtctaaaagaaagttgaatcgacttgtgacagagaactgggtagatgggtgggatgatccccgcttgttgacactggctggactccggcggcggggagtatcatcaaccgcaataaattcctttatccgtggaatcgggataacaagaagtgacaacagcttaattcgtgttgatcgtctagaataccacatcagggaagagcttaacaaaacagcccctcgaaccatggttgttttgcgtcctctaaaggtggtaataactaacttggaagaaggaaaagtactagaccttgatgggaaaatgtggccagatgcttctgatactgatgcttcctctcactataagcttccgttctcaagaactgtctacattgagaaaactgattttcgccttaaggactcaaaagactactatgggctggcccctggtaaatctgtcatgctaaggtatgcgttccccataaaatgcacagacgttatctatggtgatactcctgatgatattgttgaaattcgagcagaatatgatcctttgaagacttctaaacttaagggtgttctgcactgggttgctgagccagcacctggtgtcgaaccattgaaggtggaagtaagactattcgagaaattgttcatgtcagagaatcctgctgaattggaggattggcttggtgatcttaacccgcactcgaaagaggtgataaaggacgcttatgctgtaccatcgcttgccactgcagttctgggcgacaagttccagtttgagcggcttggttacttcgccgtggacacggactccactcctgagaagctcgtgttcaacagaactgtcaccctccgtgattcattcggtaaagctggaccaaagtgacttccagtgtaatgtaggtagggcgtgggtgctcggttgcataggcgcacctgagctatacttttttttgaagaagaaaatgatcttgtaatacagaacagcctaaaggcctcaatctttgtaaaatttacatgtgactgcagtgcagcttgtttgcttcgaaggaatcagattttgtatggtagtgttactgtgt

SEQ ID NO: 202674 - DNA, 2484 bp, Zea Mays
atgggcacagggggagacggggacaaggcggggccggcgctgccgctggaggcgcttttggcgctcgggctcgaccagcgcaccgccgagaacgcgctcgtcaacgccaaggtcaccgccaacctcgccgccgtcatagctgaggctggtataaaggaatgtgacaagtcaattggtaatcttctatatgcagttgccaccaagtacccaactaatgcacttgttcatcgccctgtccttattagctatgtcttgtcaacaaagataaagagccctgcacagctagatgctgccctctcatttcttactaatactggtcctgattctctagatgtggacaagtttgaagaagcatgtggtgtagttggtatgctatgtggacaggttaggaagagacacccctggggtgatgctaaggcagtaaaggaggaaattgacaagaggcttgcagaaatcctaggtccaaagacagaagctgacagtataaaaccagtgaaaaagaagaaggaaaaaacagcaaaagttgaggagaaaaaagttgcagttgccactactgccccaccatctgaggaggaattgaacccgtatactatatttccccaaccagaggaaaactttaaggttcatacagaaatatttttcagtgatgggaacatatggagagcacataacacaaaggaaattttggaaaaacatctcaaggcaactggaggaaaagtgatgacccgttttccaccagaacctaatggatatcttcatattggtcatgccaaggctatgtttatcgattttggtctggctaaggagcgaaatggccattgctaccttaggtttgacgacacaaatccggaagctgaaaagaaagaatacatagatcacattcaagaaattgtccattggatgggatgggaaccctacaaagtaacatacacgagtgattatttccaacctttgtatgagcatgctgttgagttaattcggaaagggctagcctatgtggatcatcagaagaaattaaggagtacagggaaaagaagatgaatagtccatggagggataggccaattgaagagtcattgaatttatttgaagacatgaggcgtgggttgattgcggagggtgcagcaactctccgaatgaagcaggatatgcaaaatgagaacaaaaatatgtctgacttaatagcatatagaataaaattcacccctcatccacatgctggtgataattggtgtatctatccgagctatgactatgctcattgcatggtggattctcttgaaaacatcacgcattcgctgtgcacacttgagtttgacatacgccgcccttcatactactggctacttgttgccttgggtctttatcaaccatatgtgtgggaatattcgaggctaaacatatcaaatactgtgatgtctaaaagaaagttgaatcgacttgtgacagagaactgggtagatgggtgggatgatccccgcttgttgacactggctggactccggcggcggggagtatcatcaaccgcaataaattcctttatccgtggaatcgggataacaagaagtgacaacagcttaattcgtgttgatcgtctagaataccacatcagggaagagcttaacaaaacagcccctcgaaccatggttgttttgcgtcctctaaaggtggtaataactaacttggaagaaggaaaagtactagaccttgatgggaaaatgtggccagatgcttctgatactgatgcttcctctcactataagcttccgttctcaagaactgtctacattgagaaaactgattttcgccttaaggactcaaaagactactatgggctggcccctggtaaatctgtcatgctaaggtatgcgttccccataaaatgcacagacgttatctatggtgatactcctgatgatattgttgaaattcgagcagaatatgatcctttgaagacttctaaacttaagggtgttctgcactgggttgctgagccagcacctggtgtcgaaccattgaaggtggaagtaagactattcgagaaattgttcatgtcagagaatcctgctgaattggaggattggcttggtgatcttaacccgcactcgaaagaggtgataaaggacgcttatgctgtaccatcgcttgccactgcagttctgggcgacaagttccagtttgagcggcttggttacttcgccgtggacacggactccactcctgagaagctcgtgttcaacagaactgtcaccctccgtgattcattcggtaaagctggaccaaagtgacttccagtgtaatgtaggtagggcgtgggtgctcggttgcataggcgcacctgagctatacttttttttgaagaagaaaatgatcttgtaatacagaacagcctaaaggcctcaatctttgtaaaatttacatgtgactgcagtgcagcttgtttgcttcgaaggaatcagattttgtatggtagtgttactgtgt

SEQ ID NO: 202675 - DNA, 668 bp, Zea Mays
gattcagcgcgatgtcctcttgtccgactatggtgttggatgacagaagcaccatttctgccacgtgagaggctcttcaagctgcaacatcatttccagaacatgaccaagcacacctacctgaaagggcgctacgatgtgatcacctccgttgccatccctcttgcacttgctgcctccagcatgttcatgattgggcgtggagtttacaacatgtctcatggaattgggaaaaaggagtgatctaccacgggttaactagtttttctacttggcatggaagtaccatccagactatgaagtcttctttgcttgctaaataatactgtcaaagaacaagtcgactacatttttgcatcatatttctgtttgtatttgtggatatgaaatgccatcaacttgaagatcagcattgttactattttggttaattactccattcctgtcgctgtttgtgtcctttcaattgaagctagccttatatttttttctgaggtccagtcatcttactcagttcatcagctgctccgcaccacgtcatgcacaaatctcaaatctggctgaagcatgcacgcaagaggcatcttgtgcacaaaactgtcaaaccaagcggaaattatggtcaattgctatcttaggctaggttgggagccacaaaaccggaaaag

SEQ ID NO: 202676 - DNA, 658 bp, Zea Mays
taccttgcggtctcaaaacatcgcttcggatgacagaagcaccatttctgccacgtgagaggctcttcaagctgcaacatcatttccagaacatgaccaagcacacctacctgaaagggcgctacgatgtgatcacctccgttgccatccctcttgcacttgctgcctccagcatgttcatgattgggcgtggagtttacaacatgtctcatggaattgggaaaaaggagtgatctaccacgggttaactagtttttctacttggcatggaagtaccatccagactatgaagtcttctttgcttgctaaataatactgtcaaagaacaagtcgactacatttttgcatcatatttctgtttgtatttgtggatatgaaatgccatcaacttgaagatcagcattgttactattttggttaattactccattcctgtcgctgtttgtgtcctttcaattgaagctagccttatatttttttctgaggtccagtcatcttactcagttcatcagctgctccgcaccacgtcatgcacaaatctcaaatctggctgaagcatgcacgcaagaggcatcttgtgcacaaaactgtcaaaccaagcggaaattatggtcaattgctatcttaggctaggttgggagccacaaaaccggaaaag

SEQ ID NO: 202677 - DNA, 668 bp, Zea Mays
aacgtttgtagtggtttgcctttgagacatggttaatggatgacagaagcaccatttctgccacgtgagaggctcttcaagctgcaacatcatttccagaacatgaccaagcacacctacctgaaagggcgctacgatgtgatcacctccgttgccatccctcttgcacttgctgcctccagcatgttcatgattgggcgtggagtttacaacatgtctcatggaattgggaaaaaggagtgatctaccacgggttaactagtttttctacttggcatggaagtaccatccagactatgaagtcttctttgcttgctaaataatactgtcaaagaacaagtcgactacatttttgcatcatatttctgtttgtatttgtggatatgaaatgccatcaacttgaagatcagcattgttactattttggttaattactccattcctgtcgctgtttgtgtcctttcaattgaagctagccttatatttttttctgaggtccagtcatcttactcagttcatcagctgctccgcaccacgtcatgcacaaatctcaaatctggctgaagcatgcacgcaagaggcatcttgtgcacaaaactgtcaaaccaagcggaaattatggtcaattgctatcttaggctaggttgggagccacaaaaccggaaaag

SEQ ID NO: 202678 - DNA, 638 bp, Zea Mays
ctctacatgatgacagaagcaccatttctgccacgtgagaggctcttcaagctgcaacatcatttccagaacatgaccaagcacacctacctgaaagggcgctacgatgtgatcacctccgttgccatccctcttgcacttgctgcctccagcatgttcatgattgggcgtggagtttacaacatgtctcatggaattgggaaaaaggagtgatctaccacgggttaactagtttttctacttggcatggaagtaccatccagactatgaagtcttctttgcttgctaaataatactgtcaaagaacaagtcgactacatttttgcatcatatttctgtttgtatttgtggatatgaaatgccatcaacttgaagatcagcattgttactattttggttaattactccattcctgtcgctgtttgtgtcctttcaattgaagctagccttatatttttttctgaggtccagtcatcttactcagttcatcagctgctccgcaccacgtcatgcacaaatctcaaatctggctgaagcatgcacgcaagaggcatcttgtgcacaaaactgtcaaaccaagcggaaattatggtcaattgctatcttaggctaggttgggagccacaaaaccggaaaag

SEQ ID NO: 202679 - DNA, 1285 bp, Zea Mays
gtaaaaagcataaaattcagtagaggagaatggtaggataaatgacaagacaagtaaatttgtctcaaatttagtgattgctcctcattgcaattagttcagtcatatagatctaactcggtatgggtatcctcttgttcccagtacgtaacacttcagctatggtctgttttgacagatgcaccagcacatactcacattttactagagcgcaggcgatggtaaaactactgcagaaattgcaccggcggcaacagtttgttatttgctccgacggcacccataagcggagcagcttattagagttaggtttgggatccgaccctaccgccacttcatttcatcattgcagttctccgacaggcgcttcgttgagccacaagaaatggatgaagtcatacagcttagcactcacgcttacctgttcaggcgtcgggttcagccgcctcatatggtctggcctcattcggtccagatggtgaatacaccgagtcctaatctcatggatggatggaagctcctcccgtgaattcgcttcaccagttgacaaaacaacacatgttgacatcaatggctcccagcttaaataacttaagcaattgtcttatccgtctaacagttcaaactaaaccaggatacgtgtttaactgattcaagtgataattcctacggcaaaaaccctattctatatttggctttggtgattagcatcatacgtgcagtaacaataggtcattttaggtaaatgccaatactagcagcacatcatagtctactgcaatacgcatcagtgtattttgtaaatatgcttcatgaaagacgactagcacggtcaatggagcatgcatgcagcacaagggaaaaataaggagtgatgcagaaattactcaggtgggaggttccatacatgaatttccaggccagtagcacttcaataattcctcaacatgctgtggaacaacgtacgctctctttgattcattgaaagggtgacgacataggagcctttcaccaatctataaacgaatggtaaatcataaaacccaccatctgtttcagatttcgtaaaatagtaactatggcatacaaaatcacaactgaaaaaaataacaagcaaatgttttttttacgcaggctcagtggctcactgactgtatttataagcattgacatgaatattgtttacctttggacctggctcatcttctccggtcattatatcaaccaacggatacccttctttgccatacaatctgtagcattttttcttacatggtatcgatac

SEQ ID NO: 202680 - DNA, 1283 bp, Zea Mays
atgcatagtgacagaatcacaagcttcgaaatttggtatgggctacgtccaagcatgacatctacctagtatcacattactcaattcgtcattggtcagcattgagtggtgtcgatactgaacttatcaacgtccaaggacacgtggcaccaagggagaagcatgcaggaagtttatcagagggtttttatcagactcaagttagtaccttggcagtcaaggacaatttactggtagctggtgggtttcaaggagagctgatctgtaaacaccttgatcgggaaggtattagtttttgctgtcgaacaacttatgatgataatgctattacaaatgcggttgagatatttaatacctctagtggcgctgttcacttcatcgcatcaaataacgattctggtgtgagatactatgacatggagagattccagctattcaagcatttgcagtttgaatggccagtgaatcatgcttctttgagtcctgacagaaaggtcgttgttattgtcggtgatgatcctgatggtctacttattgatgccaactctggaaagacactccattccataaaaggacatcgggactactcatttgcatcggcttggagccctgatgggcgaacatttgctactggcaaccaagacaagacatgccgaatctgggacgcgaggaatctctcaaaatccgtccatgtgttgaggggtaaccttggagccatccggtccatccgcttcacctcggatggccagttcatgtccatggctgaacctgctgactttgtgcacgtctacgacgtgaagagtgactacaacaaaaggcaggagctggacttctttggcgagatatccggcacatcgttcagcccagacactgacgcgcttttcgttggcgtgtgggataggatgtatggcagcctgcttcagtttggccgcctgtacaactactcgtatcttgactccgtgttttgatgtggaaccaaacggatgttggactgttgggtttggtgtgccgcggttctctgaatgttgtcagcatgattaggcggttatccttatatcaggattttaagttgacaaagataattgaattaataaatgttgtaccgtgcccgatgtgtatatataaaagaaatgtatacatatgcctattcagataccgagttgagatgtgacttggtctactccatgtgtgattgatgaattggttgtcgaagaggtttaaagctttcgacgcttgaagttgaacacagtgcgtgtagttccatgtaggttgtaagccacatg

SEQ ID NO: 202681 - DNA, 854 bp, Zea Mays
ctatatttggatcttcttgttggtgctatcattacaagcatgcttctttgagtcctgacagaaaggtcgttgttattgtcggtgatgatcctgatggtctacttattgatgccaactctggaaagacactccattccataaaaggacatcgggactactcatttgcatcggcttggagccctgatgggcgaacatttgctactggcaaccaagacaagacatgccgaatctgggacgcgaggaatctctcaaaatccgtccatgtgttgaggggtaaccttggagccatccggtccatccgcttcacctcggatggccagttcatgtccatggctgaacctgctgactttgtgcacgtctacgacgtgaagagtgactacaacaaaaggcaggagctggacttctttggcgagatatccggcacatcgttcagcccagacactgacgcgcttttcgttggcgtgtgggataggatgtatggcagcctgcttcagtttggccgcctgtacaactactcgtatcttgactccgtgttttgatgtggaaccaaacggatgttggactgttgggtttggtgtgccgcggttctctgaatgttgtcagcatgattaggcggttatccttatatcaggattttaagttgacaaagataattgaattaataaatgttgtaccgtgcccgatgtgtatatataaaagaaatgtatacatatgcctattcagataccgagttgagatgtgacttggtctactccatgtgtgattgatgaattggttgtcgaagaggtttaaagctttcgacgcttgaagttgaacacagtgcgtgtagttccatgtaggttgtaagccacatg

SEQ ID NO: 202682 - DNA, 851 bp, Zea Mays
aaagttaaagaagcttgactaagaacatagataaacatgcttctttgagtcctgacagaaaggtcgttgttattgtcggtgatgatcctgatggtctacttattgatgccaactctggaaagacactccattccataaaaggacatcgggactactcatttgcatcggcttggagccctgatgggcgaacatttgctactggcaaccaagacaagacatgccgaatctgggacgcgaggaatctctcaaaatccgtccatgtgttgaggggtaaccttggagccatccggtccatccgcttcacctcggatggccagttcatgtccatggctgaacctgctgactttgtgcacgtctacgacgtgaagagtgactacaacaaaaggcaggagctggacttctttggcgagatatccggcacatcgttcagcccagacactgacgcgcttttcgttggcgtgtgggataggatgtatggcagcctgcttcagtttggccgcctgtacaactactcgtatcttgactccgtgttttgatgtggaaccaaacggatgttggactgttgggtttggtgtgccgcggttctctgaatgttgtcagcatgattaggcggttatccttatatcaggattttaagttgacaaagataattgaattaataaatgttgtaccgtgcccgatgtgtatatataaaagaaatgtatacatatgcctattcagataccgagttgagatgtgacttggtctactccatgtgtgattgatgaattggttgtcgaagaggtttaaagctttcgacgcttgaagttgaacacagtgcgtgtagttccatgtaggttgtaagccacatg

SEQ ID NO: 202683 - DNA, 4822 bp, Zea Mays
ctctctctctcctcccggccaaccaaaccctaaccctaaacccctcccccaccaacctcggcccagtctccccacccccactgacccggctccccacctccgactcgccacgctggcccgattcgatcgatgtacgtgagcgagctcccgacctcatgatggttttggctgcggggtgaaaagaggcacagcaagcgtcgatggcattgggagatctcatggcgtccaggctcgtccactcctcgtcctccaggggactgtcgtcctcgccgacgccgccgttgcccaatcaacaccaccaccagaaccacaaccataccggggatggcctcctggctgccagcgggccggagcccaggaacgggctggaggccgacgaggtggataagtcggcgcccgtgccgtacctgccccagctggtcgtgctgtgcgagcagcgccacgagcctgaggggatcgatgaggctgcggccgcagccgcagggccctccaccagtggcctcgtctccaagtggcgccccaaggatcggatgaagacaggatgtgttgcacttgtattatgtttaaacataagtgtggatccacctgatgtaattaaaatttccccttgtgcaagaatggagtgctggatagatcctttttctatggcacctcctaaagcccttgagagtattggaaaaacgttgcattcacagtatgagcgctggcaacctaaggctcgatacaagcttcagctggacccaacagtggaggaagttaagaagctttgcaatacttgccgcaaatatgccagatcagagagagttcttttccattataatggccatggcgtaccaaagcctacatctaatggtgagatttgggtgtttaacaagagttacacacagtatattccacttccaattactgatcttgattcatggctgaagacaccttcaatttacgtttttgattgctcagcgtctggaattattgtgaaagcttttctagagcgcctagattggagttctagctcctctgcatcttcacggaaggactgcattcttcttgctgcctgtgaggcacatcaaactcttcctcagagtgcagaatttcctgccgatgtgtttacagcttgcctcacaacacccatcaaaatggctttgcactggttttgtaagcgatcattactccgtggttctctggatctttctcttattgaccaaattcctggaaggcaaaatgaccgtaaaactcttcttggggagctcaattggatttttactgctataacagatacaattgcatggaatgttcttcctcatgatctgttccaaaggcttttcaggcaagatcttcttgttgctagcctctttcgtaacttcttgcttgctgagagaatcatgcgatcagcaaattgttctccagtttcttatccgttgttacctccaacacatcaacaccatatgtgggatgcatgggacatggctgctgagatttgcctttccaagcttcctcagttaattgctgatccaaatgcagagtttcagccaagtccgttttttacggaacaactgacggctttcgaagtgtggcttgatcatggctccgaggacaagaaacctcctgaacagttacccatagttcttcaggtcctgcttagtcaatcacacagatttagagcacttgttctgctcggaagatttcttgacatggggccgtgggcagttgatttggccctgtctgtcggaatatttccttatgtactcaaactgcttcaaacaagtgcaatggagttgcgtcaaattcttgtgtttatatggacaaaaattctctctcttgataagtcgtgccaggttgatttggttaaagatggaggacacacatattttgttaggtttcttgacagtttggatgcttacccagaacagcgtgcaatggctgcttttgttttagcagtcattgtggatgggcataggacaggccaagaggcttgtatgaatgcagggcttatagatgtttgcttgagacacctgcaacctgagaatcctcatgattcacagacagaacctttacttctacagtggctttgtttatgccttgggaaactctgggaagatttccctgatgttcagctgcttactttacaaacaaatacgccagaaattgtactatgcttattgtcggagcctcaacctgaggtgaaagctgaaataaatgtagttcgaagccttctgcagatatcttcagatgccagtccccttgttcgatctgaggttgctatagcgcttactcgctttgcattgggtcataacaaacatctcaaatctgttgcggctgagtattggaaacctcaatccaattcattgctgaagtcactgccatcattggcaaatataaataacccaaacaatgtttacagtcccaacaatattctacaaggcagcattggtcctgtgctgagggttggcagtgatagcagtgctgctggtcgtgatggaagaatgtctacaagtagcccaattgcaacaagtagcatcatgcatggctctccccagtcagacgattcttcccaactctctgattctggcttattactgagagagaatgctagtaatggtggtcccggctacactaggtccaggcctgttgataatgtcatttattctcaatttatatcaactatgtgttcttttgctaaagatccttacccaagaattgcaactattggtcggagagcactgtcccttataggtgttgaacaagtagtcatgaaaaatactagatttaatagtggaggtgcacatcggggagagacatctgcttcaaactttggaatggcacgctcttcatcctggcttgatatgaattctggaaacaacttgataaaatttaggacccctcctgttagccctcctcagcatgattttcttccaggattacgccgagtgtgttctatggagtttggacaacatcctataagttcacctgatggcttagctgttccccttttaagctccgctgcagctaccagtaatgctgaactaagtatactccctcaatcaacaatttataactggagttgtggtcacttctctaggcctcttttaattggctctgatgataacgaagaggcaaatgctagaagggaagagagagaacgacttgcactagattatatcgctaagtgccagcgctcctcttgcaagatgacaaaccaaattgctagttgggatacgaggtttgagttgggaacaaaaacagctttattgttgccattttctccgatcgttgttgcagctgatgaaaatgagcaaataagagtgtggaactacgacgatgcgctgccagtgaactcttatcaaaaccataatttgtcagacagagggctatccaaacttttgctgattaatgagcttgatgagagcttgcttttagctgcctcaagtgatggaaatgtacgtgtatggaaaaattttactcaaaagggaggacaaaaacttgtaacggctttctcatccgttcagggacatcgaactgctggtcgcagtattgtgattgactggcagcagcaatctggttatctttatgcatctggtgacatgtcttccatcttgctatgggatcttgacaaggaacaacaactcagcactattcagtcatctggtgatagtgccatttcttcactgtctgcatctcaggtctgctctggacattttgctgctggttttgctgctggttctgtcaggatatatgacatacgctctcctgatagggttgtctatacggccaggccacacgcaccaagaacagaaaaggttgtaggcatagggtttcaacctgggtttgatccttacaagattgtaagcgcatctcaagctggagacattcagtttcttgatgttagaaggtcagcagaaccctacctgactattgaggcacacaggggttcacttacagcattggcggttcaccggcatgccccagttgttgctagtggctcagccaagcagatgattaaagtgtttagtcttgaaggagagcagttgacaataattcgctaccagccatcttttatgggccaaagaataggcactgtgaactgcctttcttttcacccatacaaatcactcctatctgctggtgctggtgataatgctcttgtctctatctacgccgaggaaaattacaagtaaggtgaggcctacatctcatgacaatgcagccacaaggcaaccggcaggcctggtgttttttggccaagtgatgctcccccgcagcatggtccagctacaagatccaagatggtgtgaagaggctcccggtgcgtattgcctgttgttggacgacgtgtgcaatttgtaagatagagccaagattcgttagccgcctccttgcagaaggtttgtggaacccctaccctgatcatgtcattgaacttggaggctccccccaaataattaatcatacctaggttaaccaaaatgtaaatagacaccgcgtttcgggttgtcggtggtcagcattcctccttttgaagatgcttgtgatgatatgagaaatcaggtttggtaggggctgctgcctgggcaagtggggtttgtgcatatgggcccaggtagtatggttgcacatgtctgctcacagatgctgttgaatggaaggaatgttgtctagtcgcttgcattgtaaccattggagattgtccatttgtatgtatggatcttgtctgtacatctgtaatccgtgcgatgatgtgttttatggaacagtccaaggcttcaggtcttgtggatgcctgctgtgcaattgtttcgggaaagcagcagcgtcactgtcaaag

SEQ ID NO: 202684 - DNA, 5044 bp, Zea Mays
gcctggcgtcgcgtcgcctgcttcctcgttcccgcatcgagacgccgcttcccgtcccttccccctcctctctctctcctcccggccaaccaaaccctaaccctaaacccctcccccaccaacctcggcccagtctccccacccccactgacccggctccccacctccgactcgccacgctggcccgattcgatcgatgtacgtgagcgagctcccgacctcatgatggttttggctgcggggtgaaaagaggcacagcaagcgtcgatggcattgggagatctcatggcgtccaggctcgtccactcctcgtcctccaggggactgtcgtcctcgccgacgccgccgttgcccaatcaacaccaccaccagaaccacaaccataccggggatggcctcctggctgccagcgggccggagcccaggaacgggctggaggccgacgaggtggataagtcggcgcccgtgccgtacctgccccagctggtcgtgctgtgcgagcagcgccacgagcctgaggggatcgatgaggctgcggccgcagccgcagggccctccaccagtggcctcgtctccaagtggcgccccaaggatcggatgaagacaggatgtgttgcacttgtattatgtttaaacataagtgtggatccacctgatgtaattaaaatttccccttgtgcaagaatggagtgctggatagatcctttttctatggcacctcctaaagcccttgagagtattggaaaaacgttgcattcacagtatgagcgctggcaacctaaggctcgatacaagcttcagctggacccaacagtggaggaagttaagaagctttgcaatacttgccgcaaatatgccagatcagagagagttcttttccattataatggccatggcgtaccaaagcctacatctaatgagttacacacagtatattccacttccaattactgatcttgattcatggctgaagacaccttcaatttacgtttttgattgctcagcgtctggaattattgtgaaagcttttctagagcgcctagattggagttctagctcctctgcatcttcacggaaggactgcattcttcttgctgcctgtgaggcacatcaaactcttcctcagagtgcagaatttcctgccgatgtgtttacagcttgcctcacaacacccatcaaaatggctttgcactggttttgtaagcgatcattactccgtggttctctggatctttctcttattgaccaaattcctggaaggcaaaatgaccgtaaaactcttcttggggagctcaattggatttttactgctataacagatacaattgcatggaatgttcttcctcatgatctgttccaaaggcttttcaggcaagatcttcttgttgctagcctctttcgtaacttcttgcttgctgagagaatcatgcgatcagcaaattgttctccagtttcttatccgttgttacctccaacacatcaacaccatatgtgggatgcatgggacatggctgctgagatttgcctttccaagcttcctcagttaattgctgatccaaatgcagagtttcagccaagtccgttttttacggaacaactgacggctttcgaagtgtggcttgatcatggctccgaggacaagaaacctcctgaacagttacccatagttcttcaggtcctgcttagtcaatcacacagatttagagcacttgttctgctcggaagatttcttgacatggggccgtgggcagttgatttggtctgtactgacctcttatgcacgtacatttctatgaaatagttgttttttctcttcagttttcaacctatgcatttcattgtcgtaggccctgtctgtcggaatatttccttatgtactcaaactgcttcaaacaagtgcaatggagttgcgtcaaattcttgtgtttatatggacaaaaattctctctcttgataagtcgtgccaggttgatttggttaaagatggaggacacacatattttgttaggtttcttgacagtttggatgcttacccagaacagcgtgcaatggctgcttttgttttagcagtcattgtggatgggcataggacaggccaagaggcttgtatgaatgcagggcttatagatgtttgcttgagacacctgcaacctgagaatcctcatgattcacagacagaacctttacttctacagtggctttgtttatgccttgggaaactctgggaagatttccctgatgttcagctgcttactttacaaacaaatacgccagaaattgtactatgcttattgtcggagcctcaacctgaggtcagagctgctgctgtttttgcacttgggactctcctggatactacatcatcaaatggcgctgatgatgattctgactatgatgaaaaggtgaaagctgaaataaatgtagttcgaagccttctgcagatatcttcagatgccagtccccttgttcgatctgaggttgctatagcgcttactcgctttgcattgggtcataacaaacatctcaaatctgttgcggctgagtattggaaacctcaatccaattcattgctgaagtcactgccatcattggcaaatataaataacccaaacaatgtttacagtcccaacaatattctacaaggcagcattggtcctgtgctgagggttggcagtgatagcagtgctgctggtcgtgatggaagaatgtctacaagtagcccaattgcaacaagtagcatcatgcatggctctccccagtcagacgattcttcccaactctctgattctggcttattactgagagagaatgctagtaatggtggtcccggctacactaggtccaggcctgttgataatgtcatttattctcaatttatatcaactatgtgttcttttgctaaagatccttacccaagaattgcaactattggtcggagagcactgtcccttataggtgttgaacaagtagtcatgaaaaatactagatttaatagtggaggtgcacatcggggagagacatctgcttcaaactttggaatggcacgctcttcatcctggcttgatatgaattctggaaacaacttgataaaatttaggacccctcctgttagccctcctcagcatgattttcttccaggattacgccgagtgtgttctatggagtttggacaacatcctataagttcacctgatggcttagctgttccccttttaagctccgctgcagctaccagtaatgctgaactaagtatactccctcaatcaacaatttataactggagttgtggtcacttctctaggcctcttttaattggctctgatgataacgaagaggcaaatgctagaagggaagagagagaacgacttgcactagattatatcgctaagtgccagcgctcctcttgcaagatgacaaaccaaattgctagttgggatacgaggtttgagttgggaacaaaaacagctttattgttgccattttctccgatcgttgttgcagctgatgaaaatgagcaaataagagtgtggaactacgacgatgcgctgccagtgaactcttatcaaaaccataatttgtcagacagagggctatccaaacttttgctgattaatgagcttgatgagagcttgcttttagctgcctcaagtgatggaaatgtacgtgtatggaaaaattttactcaaaagggaggacaaaaacttgtaacggctttctcatccgttcagggacatcgaactgctggtcgcagtattgtgattgactggcagcagcaatctggttatctttatgcatctggtgacatgtcttccatcttgctatgggatcttgacaaggaacaacaactcagcactattcagtcatctggtgatagtgccatttcttcactgtctgcatctcaggtctgctctggacattttgctgctggttttgctgctggttctgtcaggatatatgacatacgctctcctgatagggttgtctatacggccaggccacacgcaccaagaacagaaaaggttgtaggcatagggtttcaacctgggtttgatccttacaagattgtaagcgcatctcaagctggagacattcagtttcttgatgttagaaggtcagcagaaccctacctgactattgaggcacacaggggttcacttacagcattggcggttcaccggcatgccccagttgttgctagtggctcagccaagcagatgattaaagtgtttagtcttgaaggagagcagttgacaataattcgctaccagccatcttttatgggccaaagaataggcactgtgaactgcctttcttttcacccatacaaatcactcctatctgctggtgctggtgataatgctcttgtctctatctacgccgaggaaaattacaagtaaggtgaggcctacatctcatgacaatgcagccacaaggcaaccggcaggcctggtgttttttggccaagtgatgctcccccgcagcatggtccagctacaagatccaagatggtgtgaagaggctcccggtgcgtattgcctgttgttggacgacgtgtgcaatttgtaagatagagccaagattcgttagccgcctccttgcagaaggtttgtggaacccctaccctgatcatgtcattgaacttggaggctccccccaaataattaatcatacctaggttaaccaaaatgtaaatagacaccgcgtttcgggttgtcggtggtcagcattcctccttttgaagatgcttgtgatgatatgagaaatcaggtttggtaggggctgctgcctgggcaagtggggtttgtgcatatgggcccaggtagtatggttgcacatgtctgctcacagatgctgttgaatggaaggaatgttgtctagtcgcttgcattgtaaccattggagattgtccatttgtatgtatggatcttgtctgtacatctgtaatccgtgcgatgatgtgttttatggaacagtccaaggcttcaggtcttgtggatgcctgctgtgcaattgtttcgggaaagcagcagcgtcactgtcaaag

SEQ ID NO: 202685 - DNA, 798 bp, Zea Mays
acgcaaatggtaaaacgcttgggaaacacaattcagccctggcctttttccagttgagttcacctcttggctcttgcctcctgcatctctagagaggcacatcccagctccaagcttcgcgccttgttggatcgtggcgtccaagcaacggtggtagcggagcgcgaggcagtggccgcagaaggaagcgcgaagcatccatggaccaacgccaggtggttagcgagaattatgccaatcccataacatgcttcttccatgtgctattcaaggcgggggcgctagccttctacatcctattctcgctctttgtgaagagcttcgtcatcatcttcgtgatcacggtgctcctcgcagcgcttgacttctgggtggtgaagaacgtcagtggcaggatactagtcgggctgcggtggtggaatgagatcgatgatgacggaaacagtgtgtggaagtttgaatgccttgatggggagtctctcgctcggatgaacaagaaggattcatggctgttctggtggactctttacttgactgctgctgcatggatcgttcttggtatattttcactcatcaggcttgaggctgattaccttcttgttgttggagtttgcttgagtctaagcattgcaaacattgttggattcaccaagtgcaacaaagatgccaagaagaacatccagactttcgctcaaaatgcactcgcttcccgtgtcacatcatcgctgcaatcagcattcggtgtcatctgaagtcccacgcggaggccctgaaatcattggttgcttagacgccaag

SEQ ID NO: 202686 - DNA, 3439 bp, Zea Mays
gagtgtgttacatgataatatctatatccggatatatatcttgaggatacatatataacatgcaccagtgtgaggttagctagaccttgcctgtatataaacgcacgcgcacacacatggagacacaaggggtcttcctcatttttctcgtctgaaaaagaagagagcacaacaggcatccctcttctaacctcctgatgatggcactcaacggcggttggagaaagaccttcgtgtccatcctgacgacatgctttcttgtggtggttgtaattgtttccctatcctgcgaagcaaaaggcggcgtcgtccccaggttgcggccaccattctgctttccatacgatcgtgaatactgcacgccatttcactgcggcaaagtttgccaagagtacaacttccctgctaagaatggcggctactgcgataaacgtggtgacccatggaagtgctgctgtccatattgaaacgtacaaaatgcatgcatccatccgtgctgctacctgatcgatatacatgtcaatcatcatcaatatatataatgaatgaataaaatgcatgtgttggaaaatactgcagtgcaggagcttatgatcccacgatctcgcgtccgagactcaatagatttgttgggcctaatcaatatcattgcccagatcgcacttgcatgtgtagatttgttaggccaaggcccaaatttttcggatctttatctcaacttgcacagacgacctttagatattactaatttaagaatttggactgttaaaaaccggttagtctctatttcaaacttgatcagatttgtagaaaagattgtcaacttctgtacgtgacaccaaataaatatactatgaaaacatgtttcataataaatctgattatatatacctcagtgacaccagctgagctatgagcaaaaacaggccgtaatgacagaacagggaaaaggacgatacaccacctagcttatcacaaacctcaggcaagcttaagaaaatgcttggtgtcagggtcgaggccgatcaccaagataccgtacctacaaaacaaaccaagtaaaattcagcatcccaaacaaacgcacagagacatacagtagtagtttactgttccccagcatcgacacctcagaactgcggccaaaagccgaacaccgtcatgatccatgaaccgttaatggcccagcacgtacgtcaacaatagatagggggtgcatgaactgacctccactgagacccacggcaggacaagtgttatcatcagctcaccgtgtgcttgctaacctcacctcacaggccaaagcaaagcagcctttagttttctatccatccatccactgcccggtggacgctgcttttgatacctcacctttttatttttatttggctcctcttggaccagcgttagtgtgtggtggtggtgagaccaaatcatgtgagactcagactgggtggtgcttgtcgctcataacgttcatctgcatctccgttggccaccgctggccaggtcccagatgatcacctcggcgttccttatcaccaccatatgcttttgggagaatcggttggctcgtcggcatgcaggcatccacatctcggctaagaaaactggctggctcatcggcttgtgctggtctccatcaccaattcaccatgcgatgaaaaccatgttcagattgttgatgtttaggctgattgacagctgctgattctgcacatatgcataaaacaaaccctttcagtaaaaaaatacattttttcagtaaaactgatactgccatacttgcacatgaaaatatgaaatcaagcataaatactgtacacatttgttgaacttctgttgctcttaaactactaactcttgcattatggagagtcggaaagaacaaattcacgcatgtgagatgagaaaaggacctgacttaggtcatgcattccatggaataataaggtttcatcacgatgatgatgactgatcagtccctaaagtcagtactagtacatcctactaaagccagggaagcgaggacgacgagctcttggtaccggtcagaggctacagcagcaaccgacatatagacagattaaagaagcgcaaaagacaaacaagcaaacaaacagagcaatggcagcaggtcgattgggctctccattagtggaatatggagcagtgttcagtgcacaggggggcttccaaaagcaggatagatgccaagataacaagttgatgaggccgtccccgccacaatgtggactgcagcacaggttgcaggctggagttcatcaaggatttgaacctggaactggagcccacaagcacacagaggaggaagaacaccaagactggttcccaacctatccaaggtagaagcgagcaacgttagtgtggtagtaacatggtgactgtgagagaggagatgcgtaaggggccatggacagagcaggaggacattcagctggtatgcactgtccgcctgtttggtgaccatcgttgggacttcattgctcaagtctcaggtttgaggggttggagaactacaacttaggcctcaacaggacaggaaagagctgccgcctgcgctgggtgaactatcttcaccctggcctcaagcatggccgcatgtcaccacaagaagagcgcattatcattgagctccatgctcggtgggggaacaggtggtctaggatagcaaggaggctgccagggcgcacagacaatgagatcaagaactactggagaacacacatgagaaagaaggcacaggagaggaagatgggcatgccatcaccttcatcctcatcctcctcactgacataccaaacctgccttcttgacaccattccagtcattgggatgggcagtggtgacactcacaatggtagctgtgtcaccagcaccctcgagaacacacagagtgtcatggatggatatcccatggatcagatatggaaggagattgaggcaccacatgcacctaacttgctgagtattgctgaagggaaagagaagacgtgcagcagtagcccctgtcatctaccatcacctgtaatgtgggactacaaatgccctgagatattctggaagatgggagatcaagaaatcatgatgtgatggaaaatgaaatcaagatgttggctgcacgatttggttatgggcttatggtaaataaggccatcgctattgaaggctgaaggaatacatctatattggtcaggccactcagctatctgcctagcagatttgcagtatttgtacttcctaactatgcttgcattagtatgcagtatttttaaatctagtgtaacactggtggtatgctcataatgtatgtatctatgtagtttgaaaaatagtttgtatcagtttgtgcaatagtgtggacgctctatatgcatgatatatctatttatctctgttcttgttgtgctgaacaaat

SEQ ID NO: 202687 - DNA, 1304 bp, Zea Mays
cacaatgtggactgcagcacaggttgcagagggaagagcttgtcctgttgcctataaaagagtggctaaagacagcaattcagcacaaagcataagacatagtggcttcttctccctatagctaccttcttcctatcaggctggagttcatcaaggatttgaacctggaactggagcccacaagcacacagaggaggaagaacaccaagactggttcccaacctatccaaggtagaagcgagcaacgttagtgtggtagtaacatggtgactgtgagagaggagatgcgtaaggggccatggacagagcaggaggacattcagctggtatgcactgtccgcctgtttggtgaccatcgttgggacttcattgctcaagtctcaggtttgaggggttggagaactacaacttaggcctcaacaggacaggaaagagctgccgcctgcgctgggtgaactatcttcaccctggcctcaagcatggccgcatgtcaccacaagaagagcgcattatcattgagctccatgctcggtgggggaacaggtggtctaggatagcaaggaggctgccagggcgcacagacaatgagatcaagaactactggagaacacacatgagaaagaaggcacaggagaggaagatgggcatgccatcaccttcatcctcatcctcctcactgacataccaaacctgccttcttgacaccattccagtcattgggatgggcagtggtgacactcacaatggtagctgtgtcaccagcaccctcgagaacacacagagtgtcatggatggatatcccatggatcagatatggaaggagattgaggcaccacatgcacctaacttgctgagtattgctgaagggaaagagaagacgtgcagcagtagcccctgtcatctaccatcacctgtaatgtgggactacaaatgccctgagatattctggaagatgggagatcaagaaatcatgatgtgatggaaaatgaaatcaagatgttggctgcacgatttggttatgggcttatggtaaataaggccatcgctattgaaggctgaaggaatacatctatattggtcaggccactcagctatctgcctagcagatttgcagtatttgtacttcctaactatgcttgcattagtatgcagtatttttaaatctagtgtaacactggtggtatgctcataatgtatgtatctatgtagtttgaaaaatagtttgtatcagtttgtgcaatagtgtggacgctctatatgcatgatatatctatttatctctgttcttgttgtgctgaacaaat

SEQ ID NO: 202688 - DNA, 2675 bp, Zea Mays
agaaaaagcagcaggttgcaacttgcaaccctagaactaggaggagccagcactagggtaggcggtaggcggtagcctcaccaagggcggtgacgggaaaacctagcagtataacccctgctcgcagtcgtccacactcccgctgcttcacgcagtcggcgcctccactctgctccctcgctcgccgtcttcttccatccaggcccctcagctttccctgtttcccatatattctcgcgcggctccacgctctcgctctccacactccacaccgcagacgcctggggggcgctcctactcctcctctagggaaggaggggctcgaggttccaccaattcgccgacaggtcccttgcgtgccatccccgccgcgcgcgcagctccagaggcctccatcccatccatggacgccaagaggcagggcttcttctccgcgctgcgggaggaggtggcgcgcgggctgtcgccggggcgcgcgcggcggcggtcggcgtccaacgccgcggaggtggcggcggcgctgcgccgcctcgggggcggcggcgaggcgctcgcgccgctcatggagggcccggatccggaggcgggccccggcgcgacctgcggcggctccgcgaggaaggaaggcgggtgggggcggtgggtgcgcggccagctccagctcacgcgcgcgccggcgctggaggccggggccggagctggctccggcgccgccgccgccgccgccgccgccggcaggcgcaacgacctcaggctgctgctcggcgtcatgggcgcgccgctcgcgcccgtgcacgtctgcgccgctgagccgctgccgcacctcagcatcaaggacacccccattgagacgtcgtcggcgcagtacatactgcagcagtacctggcggcgtcgggcgggcagaggctgctgtcctccatccgcaactcgtacgccatgggcaaggtgcggatggtggcgaccgagttcgaggcgggcggccgcgtcgtccggaaccgcatggcggcgcagcgcgccgagcccgggcgcttcgtgctgtggcagatggcgcccgagatgtggtatatggagctggccgtgggcgggagcaaggtgcacgccggctgcaacggcaagctcgtctggcgccacaccccctggctcggcgcgcactccgccaagggccccgtgcgcccgctccgccgcgctctgcagggcctggacccgctgacggcggcgagcatgttcgccggcgcgcggtgcatcggcgagaggaaggttaacggggaggactgcttcatcctgaagctgagcgcggacccggagactcttcgggcgcgcagcgaggggctggcggagatcatccggcacgtgctgttcggctacttcagccacaagtccggactcctcgtgcacctggaggactcgcacctgacccggatccagtccgccaccggcggcgacgcggtgtactgggagacgaccatcagctcgtccgtcgaggactaccgcgccgtggacggcgtggtggtggcgcacgccgggcggtccgccgtgaccctgttccggttcggcgaggcggccgtggggctgggccacaccaagacccgcatggaggaggcgtggaccatcgaggaggtggcgttcgacgtccccggcctctccgccgactgcttcatcccgcccaccgacgtcgggcccggctccgtcagcgaggccgccgagctcccgcggggcgagcggagcaaggccgccgccggcctcgtcctcccgtgccaccgcgctagggtcgccgcgctcgagaaggccgacgacggtggcgtcgcgtggagcggcgccctgcagctcgggtgcaagtgattcgtggtaccccgtgctctctcgcagccgtcttgcatttcctgactgactggttttggtaggagacacagaggtaaggtcaggaggaggacttggaggagctttaccattccaagtttccctctgtaaataggaagctcacatcgccttccgtatccctgcctcgtctcgtccggagatctggtagtaggtagtctttgtctgtaacgctgtgtcggcacctcgaggacgaagatccaggggagcggggtgtttgtgtttcttctccgtccagccatatggtatggatcctagtgggcggcggtgcttcttcttctcttctgtcgtagccaaaactaatcatctgaggctagtgaggaagaagggtttcctcgcaggcaattgagttctgtcgtcgtgtacgtggagtctgattagcagcagtccagtatgcttggttggcgagtcaaactaactttttttaggggggagggcgcaaattatgtagtgacctgcctgtgggtggtcctggccgcggggtggtccgtccggtcaggctgtgtaccctttttccttcacatctctctttatttattagtacgatgagatggtgtggttatgttctacacaagttttatgtaagccaaaacttgtatgaaatatcatggtttgagtttgctttttttcctctcccattttctggctgcccactcccacaacttttttgtaatttagccatttttgattttatttttataaatataccctttttagttttattttaaaaaatagacccttaagtcggtgtcgcattggcgcttaggtataggccacgacctacgacttggcggcggcg

SEQ ID NO: 202689 - DNA, 2370 bp, Zea Mays
tacacacattccctaccacaaatccaagaaaaccccacaccctgaaaatacacaccgtccctataaccatgtacatattcatgggcatggcactcatcaccagcggtttctatacttaacacatcgagtgaatgaatgaagccacgcgctcacagtatagatgctctgaaattaccaatgccatggatagaaagagcagtgtatatcaattttgtcagtaggaagcatgtgcattttgcacatgtcgctgcctataaatacccgccggaacacctgagatgcgctgcagcctgcaggtgacatgacagtgagctagctagtgtgagtagaagcaagcagcaagatgggagaaatggcgcatgcttgctctgcccctcgcccgtctcccgctcaccatttgtgtgtgcgcatcctactagcgtacctgcttgcggcgcggtggctcgtgccatcctgctcggcggcttctttcttccgcttcccttggcccgccgagcggcacgactaccgtgacgcgctggccaagtccatcctcttcttcgagggccagaggtcggggcggctgccgcctggccagcgcgcgtcgtggcgcggggactccggcgtgtcggacggcgccgcggccggggtcgacctggagggcgggtactacgacgccggcgacaacgtcaagttcggcttccccatggcgttcaccaccaccatgctggcctggagcgtcatcgagttcggcgactccatgccgcgcgacgagcgccgccacgccgccgccgccgtccgctgggccaccgactacctcctcaagacgctcgcccaccccggcgtcatcttcctgcaggtgggcgatccgtggaaggatcacgactgctgggagaggccggaggacatggacacggaccgcacggtgtacaacgtcagcgcggggcgcccgggctcggacatcgcgggggagacggcggcggcactggcggccgcgtccatggtgttccgagatgacgacccggagtacgccgagacgctgctcacgagcgcaaggaaggcgttcgagttcgcggacacgtacaagggcgcgtacagcgacgacccggacctcagggcagggggctgccccttctactgcgacttcaatggctaccagcgccaatctgatggtggaaaaaataagtaggtcaaattcataacacaaatatagaagagagaaaaaaggacgagctgctgtggggggcagcatggctgaggagagcctccaaggatgacacgttcctccagtacattcagaacaacggcaagaccctgggtgcagaggacagcagcaacgagttcgggtgggacaacaagcatgccggcctcaacgtcctcgtctccaaggagttcatagaaggcgccgcgctgcctttgcagtcgtacaaggagttcgcggacagcttcgtatgcacgctcatcccggagtcgtcttcttccccgcacatcacgtacacccccgggggcatgatctacaagcctggaggcagcaacatgcagcacgtcacctccatctctttcctgctcctgacctacgccaagtacctctccaagtcctctcataccgtcgactgcggagacgtttcagttggccctgaaactcttcagctgcaagccaaaagacaggtcgattacctgctaggagacaacccgatgaagatgtcgtacatgatcgggtacggcgaccggtacccgcagcggatccaccaccgggcctcgtcgttgccctcgatcagggaccatcctcagccgatggcgtgcaaggaaggcacgccgtacttcaactcatccggtgcgaatcctaacccgctggtcggcgcggtggtcggcgggccgggggaggacgacgcttacgaggatgaccgtgcggatttcagaaaatctgagcccaccacctacatcaacgctcccttggtaggggtccttgcgtacttcgttggcaacccgaatcctggtcataacaccagacattgagcatcgcagcctctgaatctttcttggtgtgtgtgtatatatttttatatatgagatcgagtggatggagctatagataagatacttgtaggtgagagagacaaagagagtttgtcttgcatgattttttttttttggccttttgttgttgggtttgcactgaacttgtttggacatgtgcaagtgccattttcactggactagtatagtcatcagtgagaaatattgtactttggtttttggtttggaaggttctaaaggaactcatagcttgaaaaaaaaactaatgccatatggaagactgttttgactatcatggtgtcctgaaaattgtggcagaataaatgctgaaagtttgtagagggctatttgctg

SEQ ID NO: 202690 - DNA, 2252 bp, Zea Mays
cacaccgtccctataaccatgtacatattcatgggcatggcactcatcaccagcggtttctatacttaacacatcgagtgaatgaatgaagccacgcgctcacagtatagatgctctgaaattaccaatgccatggatagaaagagcagtgtatatcaattttgtcagtaggaagcatgtgcattttgcacatgtcgctgcctataaatacccgccggaacacctgagatgcgctgcagcctgcaggtgacatgacagtgagctagctagtgtgagtagaagcaagcagcaagatgggagaaatggcgcatgcttgctctgcccctcgcccgtctcccgctcaccatttgtgtgtgcgcatcctactagcgtacctgcttgcggcgcggtggctcgtgccatcctgctcggcggcttctttcttccgcttcccttggcccgccgagcggcacgactaccgtgacgcgctggccaagtccatcctcttcttcgagggccagaggtcggggcggctgccgcctggccagcgcgcgtcgtggcgcggggactccggcgtgtcggacggcgccgcggccggggtcgacctggagggcgggtactacgacgccggcgacaacgtcaagttcggcttccccatggcgttcaccaccaccatgctggcctggagcgtcatcgagttcggcgactccatgccgcgcgacgagcgccgccacgccgccgccgccgtccgctgggccaccgactacctcctcaagacgctcgcccaccccggcgtcatcttcctgcaggtgggcgatccgtggaaggatcacgactgctgggagaggccggaggacatggacacggaccgcacggtgtacaacgtcagcgcggggcgcccgggctcggacatcgcgggggagacggcggcggcactggcggccgcgtccatggtgttccgagatgacgacccggagtacgccgagacgctgctcacgagcgcaaggaaggcgttcgagttcgcggacacgtacaagggcgcgtacagcgacgacccggacctcagggcagggggctgccccttctactgcgacttcaatggctaccaggacgagctgctgtggggggcagcatggctgaggagagcctccaaggatgacacgttcctccagtacattcagaacaacggcaagaccctgggtgcagaggacagcagcaacgagttcgggtgggacaacaagcatgccggcctcaacgtcctcgtctccaaggagttcatagaaggcgccgcgctgcctttgcagtcgtacaaggagttcgcggacagcttcgtatgcacgctcatcccggagtcgtcttcttccccgcacatcacgtacacccccgggggcatgatctacaagcctggaggcagcaacatgcagcacgtcacctccatctctttcctgctcctgacctacgccaagtacctctccaagtcctctcataccgtcgactgcggagacgtttcagttggccctgaaactcttcagctgcaagccaaaagacaggtcgattacctgctaggagacaacccgatgaagatgtcgtacatgatcgggtacggcgaccggtacccgcagcggatccaccaccgggcctcgtcgttgccctcgatcagggaccatcctcagccgatggcgtgcaaggaaggcacgccgtacttcaactcatccggtgcgaatcctaacccgctggtcggcgcggtggtcggcgggccgggggaggacgacgcttacgaggatgaccgtgcggatttcagaaaatctgagcccaccacctacatcaacgctcccttggtaggggtccttgcgtacttcgttggcaacccgaatcctggtcataacaccagacattgagcatcgcagcctctgaatctttcttggtgtgtgtgtatatatttttatatatgagatcgagtggatggagctatagataagatacttgtaggtgagagagacaaagagagtttgtcttgcatgattttttttttttggccttttgttgttgggtttgcactgaacttgtttggacatgtgcaagtgccattttcactggactagtatagtcatcagtgagaaatattgtactttggtttttggtttggaaggttctaaaggaactcatagcttgaaaaaaaaactaatgccatatggaagactgttttgactatcatggtgtcctgaaaattgtggcagaataaatgctgaaagtttgtagagggctatttgctg

SEQ ID NO: 202691 - DNA, 1064 bp, Zea Mays
atggttgacgtacgtatgcttcaactcaaaggtattctctagaattgatggcgggatgctaacggatgcttgaggtttgcttaagcaacatcgttacatgtatatatacactagtacgtcttgcgttagaacagccgagatttgccttctttctgcagccagcagcagggacgctgaacatgggctgagagatgcgtgggagcaggtgaaggagatgagagccagggaggaggagaccaggcagagagctgccttcctccagcacggcttcgcgtcggcgtggaaggagggaatccacaccgacatcgtcgtcaaacctggcaccggtcccgcgattccagcccacaaggccatcctggccgcgcggtcggaggtgttccggcacatgctgtccggcgacgaccgctgcaaggcccccgccggcggctccatctcgctcccggagctctcccacgacgacctgtccctcctgctcgccttcctctacacaggcgctctggaggcgccaggagaaggaggaggagaggccagccaggaccaggagcggcagctgcacgcgctcctcgtcgcggccgacaagtacgatgtgccgttcctgaggcgggtctgcgaggcgcggctggcggcgggcgtggcgccccggaacgcgctgcggacgcttgaggtcgccgagctgagctccagcgccgcgctcatggagcgcgccatgggcgccgtcgtggagcacgccgaggaggtcgtgttctcggcggaatacgagcggttcgccgcacggaacgcggggctgtgcgtcgagatcacccgcgcgctgctggccaggatgccgacgccggcgaggagtgatggcccgtgcttagagcttggaagcagctagctgatgcatgcagttgtattgtatcagatgatgatggatcggaaagaatactactcttgttccagtttcgagtcacgacaatatgtaattgtaaacgcataagttcttctgaaacacgggcgagcacgatgagcaagactgcaagaacaacacagtacagtacaacacggcgcgtctcatgtcatcgagg

SEQ ID NO: 202692 - DNA, 1057 bp, Zea Mays
gccgccggggccgcatctctccccgttagggcccagctgaacactgtcgtcgcctccacctccgcgtttgggccaccgcaagagttcagggctcctctagggttcgagatcaaatccggccagcagagcagcatcctcagcaccacgctcaccatccccctctacctcggcaccggcgtcttcaccctcgggtacacaccacgccttttctcaccatctgagcattgccaaggagctcctctccatccccgatggcaccctcgccccaccaccgacgacgaatgggcgcttcagattcctgatcagcaggagagtcgttgaggctgagacgacgacacgaatgcggcaaggagcttcagattcactgccattagaaacttgcaggtaagaaatactgtggtggtttggacctcagttattggccagatgaagggcggaggccattatcagatcctcgtccacctttgggctactgctgataagaggacgagtgtcgtacacctctccaattccccccttcaatgtggtcagtgttgaatcatctacgtcatacagtgaacaagggcatactgatgagagaagggatgacatggatttttctcattcgagcatcaggttttgtgcgctgattatggtgtggtcgttgaggatttggcagtcaagtcaatgccacaattgtgagatattgaaatcgatgataatatatgtcagctccggcgaacgagaaggcgtaccgcagggccatgaagcgcgcctgcctagccgctgtggccgttctccgcgaggtccggtcactgagcgtttaccattttatggcccgctatctccctccttgtcatggcttggtatggcgtggcgcctggattttagccgctgatcggaattgtcgagtgcgtagggtacaattgggatcgggagattggggcacactgtccatttgcgttagtgagacgtggtgcattataaactgagtcgaccatggcctacttgttttcagtcctataaatttggggtttctgggtgactaattttattaccgtagcttcaggaggttgtt

SEQ ID NO: 202693 - DNA, 1421 bp, Zea Mays
gccgccggggccgcatctctccccgttagggcccagctgaacactgtcgtcgcctccacctccgcgtttgggccaccgcaagagttcagggctcctctagggttcgagatcaaatccggccagcagagcagcatcctcagcaccacgctcaccatccccctctacctcggcaccggcgtcttcaccctcgggtacacaccacgccttttctcaccatctgagcattgccaaggagctcctctccatccccgatggcaccctcgccccaccaccgacgacgaatgggcgcttcagattcctgatcagcaggagagtcgttgaggctgagacgacgacacgaatgcggcaaggagcttcagattcactgccattagaaacttgcaggtaagaaatactgtggtggtttggacctcagttattggccagatgaagggcggaggccattatcagatcctcgtccacctttgggctactgctgataagaggacgagtgtcgtacacctctccaattccccccttcaatgtggtcagtgttgaatcatctacgtcatacagtgaacaagggcatactgatgaggttttgtgcgctgattatggtgtggtcgttggtgagactgcaacgtcctctgtaatcatctctctgacaagttagattatgtgctgaaatttctgttatttttgttggattgtattgttgtgaaagggggcatagtacgatgaattggggactgaaagagcatagcagagcagagggcctatgtaatataattttttatgtataaattgtgcaaaaacaaattacctcttttgggtttcaatcatttgacaacccttggaccctgacattatattagtttacttaccttgaccttgtgatgagttttggaatatttggaggaggttcacatggactgaacagcctgtttagtagctttgcttcagcacagtaaactatatttagaacatttggatggtaaactatttcaatcattgttgttacatggtatcagaggatttggcagtcaagtcaatgccacaattgtgagatattgaaatcgatgataatatatgtcagctccggcgaacgagaaggcgtaccgcagggccatgaagcgcgcctgcctagccgctgtggccgttctccgcgaggtccggtcactgagcgtttaccattttatggcccgctatctccctccttgtcatggcttggtatggcgtggcgcctggattttagccgctgatcggaattgtcgagtgcgtagggtacaattgggatcgggagattggggcacactgtccatttgcgttagtgagacgtggtgcattataaactgagtcgaccatggcctacttgttttcagtcctataaatttggggtttctgggtgactaattttattaccgtagcttcaggaggttgtt

SEQ ID NO: 202694 - DNA, 1012 bp, Zea Mays
gccgccggggccgcatctctccccgttagggcccagctgaacactgtcgtcgcctccacctccgcgtttgggccaccgcaagagttcagggctcctctagggttcgagatcaaatccggccagcagagcagcatcctcagcaccacgctcaccatccccctctacctcggcaccggcgtcttcaccctcgggtacacaccacgccttttctcaccatctgagcattgccaaggagctcctctccatccccgatggcaccctcgccccaccaccgacgacgaatgggcgcttcagattcctgatcagcaggagagtcgttgaggctgagacgacgacacgaatgcggcaaggagcttcagattcactgccattagaaacttgcaggtaagaaatactgtggtggtttggacctcagttattggccagatgaagggcggaggccattatcagatcctcgtccacctttgggctactgctgataagaggacgagtgtcgtacacctctccaattccccccttcaatgtggtcagtgttgaatcatctacgtcatacagtgaacaagggcatactgatgagagaagggatgacatggatttttctcattcgagcatcaggttttgtgcgctgattatggtgtggtcgttggtgagactgcaacgtcctctctccggcgaacgagaaggcgtaccgcagggccatgaagcgcgcctgcctagccgctgtggccgttctccgcgaggtccggtcactgagcgtttaccattttatggcccgctatctccctccttgtcatggcttggtatggcgtggcgcctggattttagccgctgatcggaattgtcgagtgcgtagggtacaattgggatcgggagattggggcacactgtccatttgcgttagtgagacgtggtgcattataaactgagtcgaccatggcctacttgttttcagtcctataaatttggggtttctgggtgactaattttattaccgtagcttcaggaggttgtt

SEQ ID NO: 202695 - DNA, 2082 bp, Zea Mays
ccccgttagggcccagctgaacactgtcgtcgcctccacctccgcgtttgggccaccgcaagagttcagggctcctctagggttcgagatcaaatccggccagcagagcagcatcctcagcaccacgctcaccatccccctctacctcggcaccggcgtcttcaccctcgggtacacaccacgccttttctcaccatctgagcattgccaaggagctcctctccatccccgatggcaccctcgccccaccaccgacgacgaatgggcgcttcagattcctgatcagcaggagagtcgttgaggctgagacgacgacacgaatgcggcaaggagcttcagattcactgccattagaaacttgcaggtgaggaaggagagggtccaagttcctgacctctgcatcgattgagagggtccaagttcctgacccctgcattgactaattatctttgagtttcatcattatgttgaaattagtatgcgttcaaaatactcaattgattctcacggctaccgtgcctcctagcgaaacttgcttttcgttggagtatctggcgtagtaatggaaaaaattaccttctccctttgagggttccagtccatttcgttctctataattgtcacctacccttcccgagcctacttttgttgctactataagaataagaatgaaaaaagcttcatctctatttgtttctgatatgaattgtgtagcttagagttgtctcttaacttacaatcttacattggtgtaaaacagtgaccacactaaaagcacaaatgcaaggttttacagaccagttgtgatgctgctaccactaacatgtacaaataggaaaggcaagaaaatggcttagagcaagtatttttaaagaaaaagtgatccatttaagaaacctttttattaagttacttctgataccagctcctcaatccgcgagtgtcttcagcttcactttctctatctgttgtacgcgggtgtctcttcgtcttgtgtgtgagttggatgagaactagacaactggtaggaaccactctctgtttcagtttctgtttgtgtttcacttcagttcaggttgtctgcgctcttctcttagggatcgagaatcatagggaggttcctcgcttctataagaaatatgtgcctttttgtttcattttccttgtggagttgtagttcagttcagttcatcttcgtgcatggggagtgcttggttcgattgttcacagccataggtgctacagattcgtctatggcgaagacagaagtttttgttttcatgatgttttcatggaagatggcgagaagctctccacccttatcatagttaactcttttgattaagtgattaaccaatttggtaacacatatttaatgttttagcttgtttggtttagatatggaggtccgtcagtaattttgtattttttttgtattatctttatctggaaactaagttgtatgtagtgacaggtaagaaatactgtggtggtttggacctcagttattggccagatgaagggcggaggccattatcagatcctcgtccacctttgggctactgctgataagaggacgagtgtcgtacacctctccaattccccccttcaatgtggtcagtgttgaatcatctacgtcatacagtgaacaagggcatactgatgagagaagggatgacatggatttttctcattcgagcatcaggttttgtgcgctgattatggtgtggtcgttgctccggcgaacgagaaggcgtaccgcagggccatgaagcgcgcctgcctagccgctgtggccgttctccgcgaggtccggtcactgagcgtttaccattttatggcccgctatctccctccttgtcatggcttggtatggcgtggcgcctggattttagccgctgatcggaattgtcgagtgcgtagggtacaattgggatcgggagattggggcacactgtccatttgcgttagtgagacgtggtgcattataaactgagtcgaccatggcctacttgttttcagtcctataaatttggggtttctgggtgactaattttattaccgtagcttcaggaggttgtt

SEQ ID NO: 202696 - DNA, 2259 bp, Zea Mays
gcagcagaggtgtagatgcttactgttcgatcaaattcacgtgcttcgagctccaggaaggaagattctgtacctgttcgcagaggaggaaacgctgcacatggcccggcacagattttcagtttccgggagttggctgttgccaccaaaaatttcagaagagattgcctgttgggagaaggtggctttggtcgtgtgtataaaggacatatggaaaatgggcaggtcattgctgtgaagcaacttgatagaaatggttttcaaggaaatcgtgaatttcttgtggaggttctcatgctaagtctcttgcaccatcctaatctggtcagattaattggctattgtgccgatggtgaccagcgcctcttagtttacgaatacatgttgttgggatcactggaaaatcgtctgtttggtccagcaggcaaggaacctcttgactggaatacaaggatgaagattgctgctggtgcagcgaagggtctggagtaccttcatgacaaggcaaatccaccagtcatatacagagacttcaaatcatcaaacattcttctgggtgaagactactaccctaagctgtctgattttgggcttgcaaaacttggtccagttggtgacaaaacccatgtatcaacacgagttatgggaacatatggatattgcgctcctgagtatgccatgacagggcagttgacgctaaagtctgacgtttacagctttggtgttgtgttccttgaacttattacaggccgcaaagcaatcgatcacacccagccttcaggggagcaaaaccttgtcgcatgggctcgtccacttttcagagaccgaaggaagttctgccagcttgctgatccattgttgcatggcggctacccgaaaaggggtttgtaccaggccttagctgttgcagctatgtgtttgcaggagcaagcagcatcccggccgctgataggagacgttgtcactgcactgtcttacctagctgcacatccttatgatccaaatgcgccttccacaaaggattctaagacctgcccgtctaccccaagggcaaagacacaccgacgaaccaccagtgttcctgatgctcaacatgctgctgagtcgcttattttgaacttcccagacatgaggaaggagactgtcagaggaggggaattcgagaaggatcgtactgaaggttctggcagcagcagtagctctggaaggaacgattgcctggatgtcccgcgacttctatccgttcctaacggcaaagtttgcggtgaaggtaataacattcagaagtccactgttaaggttggtgcccgtgagaactagaatacagagccggccaaattctgcaggcatctttgaatggatgcatggattagaccattctttccatgcttgctgtcaattttgcgaggaatcttcgtcgcttggcgtgagtctttctgaaggggactgttgtcgagagttgagtactaccactgcaacaggtttggttttgcagacccggatagcctcatgctccacggttggtttttggttgcctccacggaacagttcaacaattcctccaggctttacatgaagtctcatgctgatgaaaggaagaactactctgtcgctgagattcagagcttagactctttagagtgtgcatttcgatgagaatctgctacattctgaatgtcacccacaccacagctttcacctgtgctgactaacgaaccctgcagtaatgtgtcattgaaggatgtggttgagtttccttgttctgttcttgtaggaaccacgtgccgacagggctgtgtctgtacatgttaatgggttgtttgtaggaacaattggatctataccattaaaagatccaaactttagatatataccatggacctcatatgtcattgactcatgtggacccacatgtaagtgagatagtaatggtatggatctaaagtggtgatcttttaatggtatggatccaaatttcccttgtttgtaagtagagctgttcatatatttattttttcttcttcgtcggtattgtgtaatggggtgatttgcagacaacatgtcaggcgtagctctgtagtctgtacagaaaaagaaggtttgcttttttgtttgcttggtattgtatgtaacattgactcgtcatatactattgtacaaatggggaagaacactgatcctttgggtaaggtgctgcttctcttcggtttgaactggagcgaattggaatgaggaagaggggaggggaaaccccccaag

SEQ ID NO: 202697 - DNA, 247 bp, Zea Mays
  misc_feature (99)..(99): n is a, c, g, or t
atcgagttcacggggctatgtgactcccgcttcgtctccgtctgcgacgacgtctcgcaacacgtcttcttcgacagctaccacccaacagagagagcntacaggatcatcgtcaacgacatctttcaaaactacggacactactgacgaaccatgaggcagtatatatatggaattctgatggaggagcaagactgaaatgaactgatcgactaggttgatctgaggaggaagtagactagctgtg

SEQ ID NO: 202698 - DNA, 3787 bp, Zea Mays
gcgggcgaagcaattaacgggaatattttaatgcggcttcgggtacacgcgggcaggtcaatcctcgcactccacctcctgcctgcccccgcacccgtagccatgttggatccaccgccccaccacgggtagctgaaggggcggcggcggcggcgcggcagagggatgaagaacttcctcaggaagctgcacatcggtgactccgccgccggggatggcgcctcgtcgccttcggcacctaccccgccgccaacgaaaaagggcgggggcatcgagcataggcacgcctccgggttgtcgggctggctgagctccgtgaccagccggccgcacccacctacgccgctttctgcttctgctgcaccggcagcggcggcgccggaggtggaggagtcggcgttgacgactgcgttggcttcgtctgttgaggagaagagggtagccgaggaggacgaggagagggcgaggcgggagtcccggaaggaggcggagatggagaagaaagagaaacagcaggcggagctggagaactatcacatgcagctggccctcgagatgagcgtgagggaggacccggaggcgatgcagatcgaggtggccaaacagatcagcctcggctcctgccccatccagagctcgcccgcagaggtcatcgccttccgatactggagtttcaatgcccttagctatgacgacaaaatattggatggtttctatgacatttgtgccactggggatgagcttgcaatgtcaaccataccttctctgatggatctgcaagcactgccattttcacatggaggcaaaactgatgctgtattggtcgacagagcactggattctgagctcgtagctcttgagcagaaggctgttatcatggctgtagaatttcgctcgaaaaaatcagaatttgttgaccgctctttggttcagactctagctaatttagtttccaactacatgggtggaccagtcattgatccagaaagcatgctgttgaagtaccgaaatatgagcagtgcgttgaaagctgatataagaagtgcagttgtacctcttgggcagctaacagttggtttggctcgtcaccgtgcactgctttttaaggttttggcagatagccttgctgttccttgccgattagttaaaggaaggcagtacactggatcagatgatggagctttgaacattgtgaaatttaatgatggaagggagtgcattgttgatctcatgatagatcctggtactcttatttcatcagatggtgctgacctgggtagagaattggaagacagcttagtcgtagataatcaacatgttaacaaagatgacactagcactcagttactttcctctttcagtgaagcttcaagttccatgcacagttcatttgaaaatggatcgcttgaaaaaggatttatttgcaatgctgggcattttggtccatatgaagcaacaactgcccatagtgacaatgatgtgcttgggtctggggtatcaagttcatttgatgagctatcggtcagcacatatgcatgtgaaaacatacctattattcatgaatctaatacagatcataccatgactgaaaaaagcaaagataagtcgatcacatcaaataattcgtcatcatgttcgcctccatcttctgagataggcagtactcctgctgtacgaaggaaaaaggtcaaagacgtctcggagtatatgattagtgctgcaaaagagaaccctcagatagcagaaaggatccatgctgtgttacttgaaagtggtgttgtgccaccacctgacttgttttcagaagaatctaaggaacaaccaaaggacctgattgtttacgacacatctctgtttcaaacaacagatgaaatgataaggacaatgaatgagcttgaatccacagcacacgatggttgtgctggtcttggtccttcattgccacctgatcctggacatgagctccaaacaaagattgttccttatcggatgcctcctgacctcaagcctgtccagggattaggtgtttaccataagtttgatttccgggataacatcaatccctctatacctctctatgaaccaagtccagctcctcaggaaaatccattacaacttataaagcaaatgcctgttacagctgctgctgttgcaacagctgcagtggttgcatcttcaatggttgttgctgctgcgaaatctaacagcgatattaaactagatgtgccagttgcagcagctgccactgctgctgcagttgttgctactacagctgctgttaaccaacaatatgaatacttggatccgggttgtcaattgctttgcttgccaagttcatcaaataaattaatccaaaaaggtagacatgacttgttggatgatgatcagctggaaacaaatcatggacaggataatgcccttgagcgtgaaaaggatttggttcaagcaccccaggaagctgagcgaatctctgataggtcaactgggacagagagtgcaagatctgaaatttctcttgataaaatcgcagagtttgaaatccagtgggaagaacttacccttggagaacgagttgggctgggatctttcggagaagtgtatagaggtgaatggcatgaaacagaagtcgcagtcaagaaattcttgcaacaagatatttcaagtgatgctctggaagaatttagaactgaggtgggaataatgagaagactgcgtcatcctaatgttgttctttttatgggtgctgtcactcgtgttcctcatctttctatcgtgactgaatttctgccaaggggtagtttatttcggttaatccataggcccaataaccagttggatcaaaaaaggcgtttaaggatggcacttgatgtggcacgtggtatgaattatttacacaattgcaccccagtcatagttcaccgagacttgaaatctccaaatctacttgttgacaaaaattgggttgtgaaggtctgtgattttggtttatcacgtctgaaacatagtaccttcctttcgtcaagatccgcagctggaacagcggagtggatggcaccagaaatacttcgaaatgaaccatcagatgagaaatgtgacgtcttcagctatggggtcatattatgggagctctgtacattgctgcagccatgggaaggtatgaatcccatgcaggttgttggagctgttggttttcagcaacgacggcttgatattcctggtggtgtggatcctgctgtagcagagataataaggagatgctggcagactgatccaaggatgcggccatcattttcagagatcatggctactttgagaccattgttaaaaaacatgcctgccaaccaacctaccaggaagcgggcacaacaaacagatgattaagaatatattgtacgccaaatgcgtatttgatgaagaacagatccatgaagccaaagaaaagaaagggaaaagaaaatttgtgaaagttcgtgcatactatttttgcagacacaatggttactggagtcagaagttgacatgtcatgttgtaacaggatcatcgtcttctgttcagttaggccttatttttgctagtcctcgaactaatggaaaactattccatctttaaggccccatcaaattgtaatgttttactatgaaaaggttggctcacccttgtgtatatcacgtctcaacaaatctgcttttaattgacaggtagattacaaaagaaaattatgccctttgtactaagaatgatcattctttgcggtaggaaaaatgttaaacctacttttgcaaacat

SEQ ID NO: 202699 - DNA, 3886 bp, Zea Mays
ggaatattttaatgcggcttcgggtacacgcgggcaggtcaatcctcgcactccacctcctgcctgcccccgcacccgtagccatgttggatccaccgccccaccacgggtagctgaaggggcggcggcggcggcgcggcagagggatgaagaacttcctcaggaagctgcacatcggtgactccgccgccggggatggcgcctcgtcgccttcggcacctaccccgccgccaacgaaaaagggcgggggcatcgagcataggcacgcctccgggttgtcgggctggctgagctccgtgaccagccggccgcacccacctacgccgctttctgcttctgctgcaccggcagcggcggcgccggaggtggaggagtcggcgttgacgactgcgttggcttcgtctgttgaggagaagagggtagccgaggaggacgaggagagggcgaggcgggagtcccggaaggaggcggagatggagaagaaagagaaacagcaggcggagctggagaactatcacatgcagctggccctcgagatgagcgtgagggaggacccggaggcgatgcagatcgaggtggccaaacagatcagcctcggctcctgccccatccagagctcgcccgcagaggtcatcgccttccgatactggatttgttcgtgcttcacagagtttcaatgcccttagctatgacgacaaaatattggatggtttctatgacatttgtgccactggggatgagcttgcaatgtcaaccataccttctctgatggatctgcaagcactgccattttcacatggaggcaaaactgatgctgtattggtcgacagagcactggattctgagctcgtagctcttgagcagaaggctgttatcatggctgtagaatttcgctcgaaaaaatcagaatttgttgaccgctctttggttcagactctagctaatttagtttccaactacatgggtggaccagtcattgatccagaaagcatgctgttgaagtaccgaaatatgagcagtgcgttgaaagctgatataagaagtgcagttgtacctcttgggcagctaacagttggtttggctcgtcaccgtgcactgctttttaaggttttggcagatagccttgctgttccttgccgattagttaaaggaaggcagtacactggatcagatgatggagctttgaacattgtgaaatttaatgatggaagggagtgcattgttgatctcatgatagatcctggtactcttatttcatcagatggtgctgacctgggtagagaattggaagacagcttagtcgtagataatcaacatgttaacaaagatgacactagcactcagttactttcctctttcagtgaagcttcaagttccatgcacagttcatttgaaaatggatcgcttgaaaaaggatttatttgcaatgctgggcattttggtccatatgaagcaacaactgcccatagtgacaatgatgtgcttgggtctggggtatcaagttcatttgatgagctatcggtcagcacatatgcatgtgaaaacatacctattattcatgaatctaatacagatcataccatgactgaaaaaagcaaagataagtcgatcacatcaaataattcgtcatcatgttcgcctccatcttctgagataggcagtactcctgctgtacgaaggaaaaaggtcaaagacgtctcggagtatatgattagtgctgcaaaagagaaccctcagatagcagaaaggatccatgctgtgttacttgaaagtggtgttgtgccaccacctgacttgttttcagaagaatctaaggaacaaccaaaggacctgattgtttacgacacatctctgtttcaaacaacagatgaaatgataaggacaatgaatgagcttgaatccacagcacacgatggttgtgctggtcttggtccttcattgccacctgatcctggacatgagctccaaacaaagattgttccttatcggatgcctcctgacctcaagcctgtccagggattaggtgtttaccataagtttgatttccgggataacatcaatccctctatacctctctatgaaccaagtccagctcctcaggaaaatccattacaacttataaagcaaatgcctgttacagctgctgctgttgcaacagctgcagtggttgcatcttcaatggttgttgctgctgcgaaatctaacagcgatattaaactagatgtgccagttgcagcagctgccactgctgctgcagttgttgctactacagctgctgttaaccaacaatatgaatacttggatccgggttgtcaattgctttgcttgccaagttcatcaaataaattaatccaaaaaggtagacatgacttgttggatgatgatcagctggaaacaaatcatggacaggataatgcccttgagcgtgaaaaggatttggttcaagcaccccaggaagctgagcgaatctctgataggtcaactgggacagagagtgcaagatctgaaatttctcttgataaaatcgcagagtttgaaatccagtgggaagaacttacccttggagaacgagttgggctgggatctttcggagaagtgtatagaggtgaatggcatgaaacagaagtcgcagtcaagaaattcttgcaacaagatatttcaagtgatgctctggaagaatttagaactgaggtgggaataatgagaagactgcgtcatcctaatgttgttctttttatgggtgctgtcactcgtgttcctcatctttctatcgtgactgaatttctgccaaggggtagtttatttcggttaatccataggcccaataaccagttggatcaaaaaaggcgtttaaggatggcacttgatgtggcacgtggtatgaattatttacacaattgcaccccagtcatagttcaccgagacttgaaatctccaaatctacttgttgacaaaaattgggttgtgaaggtctgtgattttggtttatcacgtctgaaacatagtaccttcctttcgtcaagatccgcagctggaacagcggagtggatggcaccagaaatacttcgaaatgaaccatcagatgagaaatgtgacgtcttcagctatggggtcatattatgggagctctgtacattgctgcagccatgggaaggtatgaatcccatgcaggttgttggagctgttggttttcagcaacgacggcttgatattcctggtggtgtggatcctgctgtagcagagataataaggagatgctggcagactgatccaaggatgcggccatcattttcagagatcatggctactttgagaccattgttaaaaaacatgcctgccaaccaacctaccaggaagcgggcacaacaaacagatgattaagaatatattgtacgccaaatgcgtatttgatgaagaacaggtgaattttggtccttttgccttcagcgtttggttctccattggagccagcggaatgctgtctatatctatctgatgaaagccgacccaaataacacagatccatgaagccaaagaaaagaaagggaaaagaaaatttgtgaaagttcgtgcatactatttttgcagacacaatggttactggagtcagaagttgacatgtcatgttgtaacaggatcatcgtcttctgttcagttaggccttatttttgctagtcctcgaactaatggaaaactattccatctttaaggccccatcaaattgtaatgttttactatgaaaaggttggctcacccttgtgtatatcacgtctcaacaaatctgcttttaattgacaggtagattacaaaagaaaattatgccctttgtactaagaatgatcattctttgcggtaggaaaaatgttaaacctacttttgcaaacat

SEQ ID NO: 202700 - DNA, 2296 bp, Zea Mays
aacctggatcacctgcagtcgcctagcgcttttttgaaccttggagtagagaatgcggattttacggcttccgtcctgaaatataagagacagactaacttgaggtggcattctaagtctggagaaagtccaatctctccagttgatttgacatctagtgatgaagaacacagccatgatcctgattcttcttccataaaaaagtctaggaaaaaactaaagcagctagatgccacattagctgaaggttctgaacacgcttcagtctctgagatggacattcctttgtcagctatgtgcaagtcaccagaaagcacacattcgccgaattctttgctctctgagaagagcagtcctcaaggttcacatgtgatagtgaatttggttccaatgaatggacttcattgtgcttcttcagggcattcagcaccagtggacaaccaagcaatcctgtctgatatgggtgtttttgatggtgagcttcatgaatctgtatctgggagaagcgttgatgcatatgatatgcttcccattgctgaactaagaaagaaaatggcttcagctagaagaaattgtgctgtccaacatacagaggaacaacatgtgaaatcgctcagagtgaagaaatgtatatcgaatagtaaagacaaaaaaacgcgccctattcaagagcttatgggagaaattcagttgaagggaaacaagaatttctctagggactttgttttagctttgggcgtctctagggatggcccgactactttatctccagatagactggtgtcaatagggccaaaaaggtgctcaagtacaaaggttcttgcctgtaagaaattggctaagaggagaggatccaaagaactgtgcagtccaaatagctcattggatgtgactaggactgaccagcagggaggaagaaaggaagtggcagaagcaatgaaagaatgttccttagcattggagtgtccgaaatctgatgctcaagggcagcttgacagaactttggaggatgcaaagaatataactgaattatcaaatcaggagaacctcttatccatgctgcctcctggctttaaatcagtgtctaacaggaaaggtactaacatacatgatgctcaacttggggaagaaccagcggttatgaccaacaacagccttattgaaccgaatggaaatgatgacatgtgcacagaccatgctgctactaccaagttagctgaaaactacaatgtgatggaaacagctatcatgtctattgattgtccggctcaacaaccctgtggggaagtggatgagaggctttgttcgtcaagagctcacctgtgtggcatatagttgaagcaatgcatgtgtttaaagagttacctcaacaaccacatttcattccactccaagaagtccccccgacactacgcgaaggaatggcattaggtatgatggtgtcattcgcggacttggtgaaggttacaatggaagcaagcataggcaacgacatggaatggtttgaggacaagatcaggacaatctcccatctagaggcaaatggatttagtgtgcaatctatacagagcgccatgaccgaaatggtcaaggtcaaaactgagcacaccagttatcattgcgaaatcggcaagctgagttcaaagttagtggagaatatggcttcctcctccagagccggtgcactgcttgatgaaaaagatgaagctgcagcacggctcgaggaagaacttgtgagtattcgccaagaaagccagaaaatcgcaaaggagaaggaaaaaatagatgcagaggtcgtgagtatcaagacagcatgtagcgggtatgaggatttgtgcagcggtgtggaacgcaagtttaaggaagtcttggctgggctgcagcggaagaggctaacctgatgcgcaaggtgttgatgtcatttcgctgcttcaaagttctaattctgaccactgtttctgcttttgggctgtaggtcatctatgtatcacggtaggttcagatcgatgtgctgtgcttagtttgtgcaagtcattcggtaccttttatatatctgtatggtgatcatgatggcttagggagcctgatgaagatcgactcttgataattgttactgctatattagttggaccgtatttatttgcctgcggcataattagtttgagggcaatttgtttccgttcttgtcaactttgattctcctgacttctatcgtctgatgttatttgatccaacttgacataggattgtcttatccgatgtctcgcttgaaacctttgtaacaccctatccctac

SEQ ID NO: 202701 - DNA, 3071 bp, Zea Mays
gccagggggacctggagagatctgaattcccagcacactcctgcccgctcctccccgccgatggagatccccaccgctgtcatccaccgcctccagtccgctctccgtgaggccaccttcgccccttctgtagaagatgcacccgcccctcccttcccctccgtcgccgatgccgtcgcagccttcgactcgtgtgccgcctccgtgtcggcggagctccgatgcgtgcgctgcggggcctcgggagggctcctgcgcggtgtgcggtctgccctctgcacctactgcgggtgccccaggcgcggggaggaggctgaaggcggtggaagcggcggcgtcgccttccgtgacggcgtggcctaccagtggctgctcggctcgcttggactcgacggatccgagattgtagaattcgatactgacactacagcttcgaataaaagcaaggatgtaccaccaccaaacagtgggatgatcatatctgatctactggacttaaaaatcacatgcctccctgaaaataaggaaacatctccaagttccataacaaaggagcaatcatcttctgtggatacactaaatttatctgctgctaacttagattcatttttcattgaaagaaaagaagagatgacttctgcttctcttccacaaactcattttttggagcaggaaaataaaagaacagatagcaaaagccatgaatctagattggaagtgcatgctgcacctaaaagcttaattagttctcaaagaacaaatcagattgaagctactccagcatttgcaagttgggatgctgattttcagtctgctagttcagaaaatgctgccaaaaactccaagcaacctgatctatttaagagcacttctgtggccgagtcttttagtttcccagcttcagagattgccatcaaacctgtagtaagtactgaaagtaaaacaaatacgagaagtgccatcctagaacatcactcagaagttttggcttcagcaagtagcacattatttggtgatgacctttctgatcaaaaggttgtccaccatatctttgagagcagcaacgctcctgggttcactgaatcctctctccccatggattttgctaaaagtgatcagttacatggaagggacgatgatggattcaatgatgatgaagcttttgatgaatggcaagaatttacaacaagtggcaatcaaggcagcctatcaaatgcggaacatattgaggaacctttaaagagagatttgtctgagaatgatgtaatagatcccttgcgagtaggcagcaaggaatcacccaacaatgttattgaaaaatcctctaatgaatggcaaggttttgcttctgtgtctggtcaaggaagagattttgtgacatctgtggaacgatcaacaagtgaccacagactaaatttggtgggaccagttggagatgaagagacaatgagcagcatctcacaccaacattcttcagaaattaatcctgttgatgtatggcatgtgggcaatgtgaaggctcaaaatactgcagaaatggttaaggaaaaaaatgattcttttgacgattggcaagattctactaccaccggtcaagtccaggacacttcgttgaatcaaactggggacatgatggaggtctcaaaagccagtcacaaagaaacagacatggactcatggttcattggacattctagggagccagcaaatacgggtaccatgaatgcaaataacatgttggacgattggcaaggtttcactggttcagatcaagcacagcaaaattcatctagcactggtgcagaaatgataagtgtgccatttgagcagcatggtggaactgtttctgccccatcatgggcaaatggcagcagtaatgatgccgcaaaaacatcctcaacaagtatagaaagcgacccatttgatgtttggcaaaattttactaaatcaggtcacctgcaagaaaatatgtctagtcttgggagagaaccgagtagtctgtcgcctgaaccagctaaaggaaatgattccttggatttgtggattaccagcaacttcaaggaatctaaaagcaatgatgttgggagaactaatgcctcatctgatggatggcaggattttgccagttttgatcaagctcagagaattactaaagttcatgtggaaggacatgttgtaaaagatccttcaggggctgaaactttggacttatgggcctcaagtcatgttaatgaaaagaaccttgaacagataagtgaacataatgatctattcgatgactggcaggatttccaaaactccaatccacagcaaacaaccttacaagtttcttcagatgcttcattatttgatataaccttggcatcaaggcctgatgcttttggagagcaggaaattgggagtgttttgcaggtagcttcatccgaaaactcaaaggataaaaaggagggttctaatgaatcaaaagcatttccatctgatgaccacttgaaaagcacaagtggaatgcagcagatgggtgatgttgattcgctgtcttcattatggccagctaataaaccagagcctgcaaatacaaatgtggaacagttgcttgctcagatgcacgatctgtcctttatgctcaaggatgaactttctgtccctgataaacccatcgatcattcaaaaccctgaagtgacaacatcaaaaattgtgctctgttactatcagccaaggaagattgttgttgcaagtccaaccttttgggtgctggacgaattgcaacgaatatcccttgagtggaaaatgcaagtcaagtcacagaaaaccctgttgttccaacagtgccttttatcagagtattggtcagcagaggattgtatttgttttctctgttgcttcgttgcattgatcgtcagagactcagagtcgggttggttccttgactgtccctgagtgaggctgaaaaccacgttttatgtctgcctcttacatatgatgttggcttccagtaattctatagtactacatcattgacctccttgcctgagtaactcctcaacaccgacagtcttctttctaaaacgag

SEQ ID NO: 202702 - DNA, 2911 bp, Zea Mays
ctcaatgggaccgcgaggacctcgctttgcctcgctggagctgacggtgtggcagagtacacacagagagacagaggggagattgtagaattcgatactgacactacagcttcgaataaaagcaaggatgtaccaccaccaaacagtgggatgatcatatctgatctactggacttaaaaatcacatgcctccctgaaaataaggaaacatctccaagttccataacaaaggagcaatcatcttctgtggatacactaaatttatctgctgctaacttagattcatttttcattgaaagaaaagaagagatgacttctgcttctcttccacaaactcattttttggagcaggaaaataaaagaacagatagcaaaagccatgaatctagattggaagtgcatgctgcacctaaaagcttaattagttctcaaagaacaaatcagattgaagctactccagcatttgcaagttgggatgctgattttcagtctgctagttcagaaaatgctgccaaaaactccaagcaacctgatctatttaagagcacttctgtggccgagtcttttagtttcccagcttcagagattgccatcaaacctgtagtaagtactgaaagtaaaacaaatacgagaagtgccatcctagaacatcactcagaagttttggcttcagcaagtagcacattatttggtgatgacctttctgatcaaaaggttgtccaccatatctttgagagcagcaacgctcctgggttcactgaatcctctctccccatggattttgctaaaagtgatcagttacatggaagggacgatgatggattcaatgatgatgaagcttttgatgaatggcaagaatttacaacaagtggcaatcaaggcagcctatcaaatgcggaacatattgaggaacctttaaagagagatttgtctgagaatgatgtaatagatcccttgcgagtaggcagcaaggaatcacccaacaatgttattgaaaaatcctctaatgaatggcaaggttttgcttctgtgtctggtcaaggaagagattttgtgacatctgtggaacgatcaacaagtgaccacagactaaatttggtgggaccagttggagatgaagagacaatgagcagcatctcacaccaacattcttcagaaattaatcctgttgatgtatggcatgtgggcaatgtgaaggctcaaaatactgcagaaatggttaaggaaaaaaatgattcttttgacgattggcaagattctactaccaccggtcaagtccaggacacttcgttgaatcaaactggggacatgatggaggtctcaaaagccagtcacaaagaaacagacatggactcatggttcattggacattctagggagccagcaaatacgggtaccatgaatgcaaataacatgttggacgattggcaaggtttcactggttcagatcaagcacagcaaaattcatctagcactggtgcagaaatgataagtgtgccatttgagcagcatggtggaactgtttctgccccatcatgggcaaatggcagcagtaatgatgccgcaaaaacatcctcaacaagtatagaaagcgacccatttgatgtttggcaaaattttactaaatcaggtcacctgcaagaaaatatgtctagtcttgggagagaaccgagtagtctgtcgcctgaaccagctaaaggaaatgattccttggatttgtggattaccagcaacttcaaggaatctaaaagcaatgatgttgggagaactaatgcctcatctgatggatggcaggattttgccagttttgatcaagctcagagaattactaaagttcatgtggaaggacatgttgtaaaagatccttcaggggctgaaactttggacttatgggcctcaagtcatgttaatgaaaagaaccttgaacagataagtgaacataatgatctattcgatgactggcaggatttccaaaactccaatccacagcaaacaaccttacaagtttcttcagatgcttcattatttgatataaccttggcatcaaggcctgatgcttttggagagcaggaaattgggagtgttttgcaggtagcttcatccgaaaactcaaaggataaaaaggagggttctaatgaatcaaaagcatttccatctgatgaccacttgaaaagcacaagtggaatgcagcagatgggtgatgttgattcgctgtcttcattatggccagctaataaaccagagcctgcaaatacaaatgtggaacagttgcttgctcagatgcacgatctgtcctttatgctcaaggatgaactttctgtccctgataaacccatcgatcattcaaaaccctgaagtgacaacatcaaaaattgtgctctgttactatcagccaaggaagattgttgttgcaagtccaaccttttgggtgctggacgaattgcaacgaatatcccttgagtggaaaatgcaagtcaagtcacagaaaaccctgttgttccaacagtgccttttatcagagtattggtcagcagaggattgtatttgttttctctgttgcttcgttgcattgatcgtcagagactcagagtcgggttggttccttgactgtccctgagtgaggctgaaaaccacgttttatgtctgcctcttacatgtatgtaccattttgcggtctgtattttgtagagtcgaactgagctcaccaatcaatgaattccatttcatcagattatttaagctatataatataagttcgtccttggtactaggctgccttgtttgtaacatcttattacaatgtcttgtttgcagcagatgatgttggcttccagtaattctatagtactacatcattgacctccttgcctgagtaactcctcaacaccgacagtcttctttctaaaacgag

SEQ ID NO: 202703 - DNA, 2547 bp, Zea Mays
cagaaggtcacaagtgttgtagtgatcctcgcccgcgcgcttcgcacgtccccgccgtcgcgctcgcctccctcctctttgttgcctccgcgtcgacctccaccccgctctccgacgcgcttaccgtcgtctcggatttctggtgcactctcttctctacgacgcgagcaagggcggcgcttgccatggcatcgacgggaaccaggaggggagctgtttgagcggatgcccaccaggaacaatgtttcctagatcacgatgtttgggccacttttggaagaggtcagggatgacatgttttcaagcttggaggacatcaccaacgcaccatatgcagatctgctctctattaattcaatgaggaaaggaaaggggtcatagaaattagtcttggcagatggaggggaacgtctcaatgactgaggcacattttttcttgttagttagctcatggatttttatggtccaagaggagttgctgctatatgaatatgacaacacccattaatcaacataactatatgaatacaatctgaaaggaaggtcggtttggtcagaaacacatggaggtactgatggaggctatgaaacatataagagacatgccagtgaggagcaggagtagtttagtcggttcttgctttatgaagtggatgcaattagaaagacgtacgagcaggccaacatctcgcggtggctcgccctgggcaaccggacctgcccgaccacgatgcaggagctctgggacgacgccctcacccccaacgccactctctgacagctcatcgtcacctggttctcccgcctgtttatcttagatactgtttgaacgtatgggatgttggaggacagaagacaatcatgtcttactggagaaaattctttgagcagactaatgggttagtttggtttgctgatagttcacacataaggaggcttgatgattgccgtgctgaactccacaatctcttgaaagaagagagactagttggagcttcattgttgatttttgcaaataagcaagacatgcaaggagctctaaaaccaactggaatcgcgaagagtcactctccgacagctcatcgccgcttggttctcccgccggtacacaaggtttaagaagcgctccgcggacttccacggccgcgctgccgatctcgtccacagcctccggggcacggcgatgcccaggagacaggccctcgaggaagagcaatgtagagaagagaaaggtatctcgactgttccaaagcacaagtatgcatccaaagcctgttccccaaaagttttgaagacttaaacaatatgctgcatgaaaatctttactttattcacaacacacctgagatggactgggcttgggcagctaaccggttaattgagaaggatgaggcataaactccagacgatgctcctttaaattatttgccgcagaagaggctaattttgacaagccagttgatccagcaacttctccctgctataccagcgaccattttgagaggacaagctgtgtctacttacggaagtgcgacatacactctatcaatgttgacactaagggatgcatgcagcatggtagcatcattatcatcatcatataactcttgctcacctgtggaggatgaaaataacccatctgaacaaacaagtgctaagaaaatggaagacagagtatcaaaggttgtggaagtcttcgctggaagaatccagaagatggaaaatgactttataagtttgaacaagagggcctcgactaatcggacgactggacgattagtcgacctaatcgggtcggatgccctggtcgttccactaaaaccgactagaccgactaatcgcgattaatcgcgattagtcggacgacttgaaatcattgatcagtgattccctcacggttgtgtccttcacaaaggaaggatgtgaagccacactattatcaagcaacaaagccaaagttgtgtgacacaattataacaaaggaatcatcacccattagcacactaaaattggcgcatacagataacgcacctgcaaagtgggatcatttgaacatagttcagcaaagggccgacgcacttgagtcactcctcaagctctacgcaaagcttctggaggagaggctcgatgagctcgccgacgtttttcgaccatttggtgagagagctgtgtcatccggagagatgagcatacaatgatgtctgaccataagcctgatgactccaccgaagttttgagagtccccaacaatgcttttgtagcagcgattcgtttcaacatttttttgtttttcaaataccatttcgagagtgtaaataacttcaacggaattcaaaattgatgtacttaggtaggcctgagccctgtttatttttgatgtatatggtttgcatgtcaccaactgttgtgagcgatgattgattatttatcgtcttgttttatctgtctgtactcctttaatgcagcaccttcgtttgtcatgtgtcgtctcccctgtaagatgttgattaatattcattatatcattgtttattttttagcaatgaa

SEQ ID NO: 202704 - DNA, 2921 bp, Zea Mays
cagaaggtcacaagtgttgtagtgatcctcgcccgcgcgcttcgcacgtccccgccgtcgcgctcgcctccctcctctttgttgcctccgcgtcgacctccaccccgctctccgacgcgcttaccgtcgtctcggatttctggtgcactctcttctctacgacgcgagcaagggcggcgcttgccatggcatcgacgggaaccaggaggggagctgtttgagcggatgcccaccaggaacaatgtttcctagatcacgatgtttgggccacttttggaagaggtcagggatgacatgttttcaagcttggaggacatcaccaacgcaccatatgcagatctgctctctattaattcaatgaggaaaggaaaggggtcatagaaattagtcttggcagatggaggggaacgtctcaatgactgaggcacattttttcttgttagttagctcatggatttttatggtccaagaggagttgctgctatatgaatatgacaacacccattaatcaacataactatatgaatacaatctgaaaggaaggtcggtttggtcagaaacacatggaggtactgatggaggctatgaaacatataagagacatgccagtgaggagcaggagtagtttagtcggttcttgctttatgaagtggatgcaattagaaagacgtacgagcaggccaacatctcgcggtggctcgccctgggcaaccggacctgcccgaccacgatgcaggagctctgggacgacgccctcacccccaacgccactctctgacagctcatcgtcacctggttctcccgcctgtttatcttagatactgtttgaacgtatgggatgttggaggacagaagacaatcatgtcttactggagaaaattctttgagcagactaatgggttagtttggtttgctgatagttcacacataaggaggcttgatgattgccgtgctgaactccacaatctcttgaaagaagagagactagttggagcttcattgttgatttttgcaaataagcaagacatgcaaggagctctaaaaccaactggaatcgcgaagagtcactctccgacagctcatcgccgcttggttctcccgccggtacacaaggtttaagaagcgctccgcggacttccacggccgcgctgccgatctcgtccacagcctccggggcacggcgatgcccaggagacaggccctcgaggaagagcaatgtagagaagagaaaggtatctcgactgttccaaagcacaagtatgcatccaaagcctgttccccaaaaggtgcgtgaactttgttcttgattttgtcagactaaatgtgggtgaactttgtactgcagtttttgtttaaataaactttggactgtttaaattactgatgcatccaaccactgtttttctttactgtttgttgatacacgaccagatgcccagttgagttcacccaaaaggtttattacaccacgaaaaaatctgagatgaaatgatttttatttaaatgaactttgtactgcagtatttacagacatattttggcacccgatcgattactgtttttgttttactaatagctgctgctattactatcttttgggtgaagtgaatcagatttttgtttaaatgaactttgtactgtttaaattattgatgcatagttttgaagacttaaacaatatgctgcatgaaaatctttactttattcacaacacacctgagatggactgggcttgggcagctaaccggttaattgagaaggatgaggcataaactccagacgatgctcctttaaattatttgccgcagaagaggctaattttgacaagccagttgatccagcaacttctccctgctataccagcgaccattttgagaggacaagctgtgtctacttacggaagtgcgacatacactctatcaatgttgacactaagggatgcatgcagcatggtagcatcattatcatcatcatataactcttgctcacctgtggaggatgaaaataacccatctgaacaaacaagtgctaagaaaatggaagacagagtatcaaaggttgtggaagtcttcgctggaagaatccagaagatggaaaatgactttataagtttgaacaagagggcctcgactaatcggacgactggacgattagtcgacctaatcgggtcggatgccctggtcgttccactaaaaccgactagaccgactaatcgcgattaatcgcgattagtcggacgacttgaaatcattgatcagtgattccctcacggttgtgtccttcacaaaggaaggatgtgaagccacactattatcaagcaacaaagccaaagttgtgtgacacaattataacaaaggaatcatcacccattagcacactaaaattggcgcatacagataacgcacctgcaaagtgggatcatttgaacatagttcagcaaagggccgacgcacttgagtcactcctcaagctctacgcaaagcttctggaggagaggctcgatgagctcgccgacgtttttcgaccatttggtgagagagctgtgtcatccggagagatgagcatacaatgatgtctgaccataagcctgatgactccaccgaagttttgagagtccccaacaatgcttttgtagcagcgattcgtttcaacatttttttgtttttcaaataccatttcgagagtgtaaataacttcaacggaattcaaaattgatgtacttaggtaggcctgagccctgtttatttttgatgtatatggtttgcatgtcaccaactgttgtgagcgatgattgattatttatcgtcttgttttatctgtctgtactcctttaatgcagcaccttcgtttgtcatgtgtcgtctcccctgtaagatgttgattaatattcattatatcattgtttattttttagcaatgaa

SEQ ID NO: 202705 - DNA, 2546 bp, Zea Mays
gttgtagtgatcctcgcccgcgcgcttcgcacgtccccgccgtcgcgctcgcctccctcctctttgttgcctccgcgtcgacctccaccccgctctccgacgcgcttaccgtcgtctcggatttctggtgcactctcttctctacgacgcgagcaagggcggcgcttgccatggcatcgacgggaaccaggaggggagctgtttgagcggatgcccaccaggaacaatgtttcctagatcacgatgtttgggccacttttggaagaggtcagggatgacatgttttcaagcttggaggacatcaccaacgcaccatatgcagatctgctctctattaattcaatgaggaaaggaaaggggtcatagaaattagtcttggcagatggaggggaacgtctcaatgactgaggcacattttttcttgttagttagctcatggatttttatggtccaagaggagttgctgctatatgaatatgacaacacccattaatcaacataactatatgaatacaatctgaaaggaaggtcggtttggtcagaaacacatggaggtactgatggaggctatgaaacatataagagacatgccagtgaggagcaggagtagtttagtcggttcttgctttatgaagtggatgcaattagaaagacgtacgagcaggccaacatctcgcggtggctcgccctgggcaaccggacctgcccgaccacgatgcaggagctctgggacgacgccctcacccccaacgccactctctgacagctcatcgtcacctggttctcccgcctggttctgcattttgttttcttatctgtcaatcatgtttttccatattactgcaggcgggtctgattaattatttaaatgtagtttatcttagatactgtttgaacgtatgggatgttggaggacagaagacaatcatgtcttactggagaaaattctttgagcagactaatgggttagtttggtttgctgatagttcacacataaggaggcttgatgattgccgtgctgaactccacaatctcttgaaagaagagagactagttggagcttcattgttgatttttgcaaataagcaagacatgcaaggagctctaaaaccaactggaatcgcgaagagtcactctccgacagctcatcgccgcttggttctcccgccggtacacaaggtttaagaagcgctccgcggacttccacggccgcgctgccgatctcgtccacagcctccggggcacggcgatgcccaggagacaggccctcgaggaagagcaatgtagagaagagaaaggtatctcgactgttccaaagcacaagtatgcatccaaagcctgttccccaaaagacttaaacaatatgctgcatgaaaatctttactttattcacaacacacctgagatggactgggcttgggcagctaaccggttaattgagaaggttagccaactttgcgattctgctattttagttcttgtccatattggtccaagggatttatcttgatgctaaactaaattctggaataggatgaggcataaactccagacgatgctcctttaaattatttgccgcagaagaggctaattttgacaagccagttgatccagcaacttctccctgctataccagcgaccattttgagaggacaagctgtgtctacttacggaagtgcgacatacactctatcaatgttgacactaagggatgcatgcagcatggtagcatcattatcatcatcatataactcttgctcacctgtggaggatgaaaataacccatctgaacaaacaagtgctaagaaaatggaagacagagtatcaaaggttgtggaagtcttcgctggaagaatccagaagatggaaaatgactttataagtgattccctcacggttgtgtccttcacaaaggaaggatgtgaagccacactattatcaagcaacaaagccaaagttgtgtgacacaattataacaaaggaatcatcacccattagcacactaaaattggcgcatacagataacgcacctgcaaagtgggatcatttgaacatagttcagcaaagggccgacgcacttgagtcactcctcaagctctacgcaaagcttctggaggagaggctcgatgagctcgccgacgtttttcgaccatttggtgagagagctgtgtcatccggagagatgagcatacaatgatgtctgaccataagcctgatgactccaccgaagttttgagagtccccaacaatgcttttgtagcagcgattcgtttcaacatttttttgtttttcaaataccatttcgagagtgtaaataacttcaacggaattcaaaattgatgtacttaggtaggcctgagccctgtttatttttgatgtatatggtttgcatgtcaccaactgttgtgagcgatgattgattatttatcgtcttgttttatctgtctgtactcctttaatgcagcaccttcgtttgtcatgtgtcgtctcccctgtaagatgttgattaatattcattatatcattgtttattttttagcaatgaa

SEQ ID NO: 202706 - DNA, 2357 bp, Zea Mays
cgcccgcgcgcttcgcacgtccccgccgtcgcgctcgcctccctcctctttgttgcctccgcgtcgacctccaccccgctctccgacgcgcttaccgtcgtctcggatttctggtgcactctcttctctacgacgcgagcaagggcggcgcttgccatggcatcgacgggaaccaggaggggagctgtttgagcggatgcccaccaggaacaatgtttcctagatcacgatgtttgggccacttttggaagaggtcagggatgacatgttttcaagcttggaggacatcaccaacgcaccatatgcagatctgctctctattaattcaatgaggaaaggaaaggggtcatagaaattagtcttggcagatggaggggaacgtctcaatgactgaggcacattttttcttgttagttagctcatggatttttatggtccaagaggagttgctgctatatgaatatgacaacacccattaatcaacataactatatgaatacaatctgaaaggaaggtcggtttggtcagaaacacatggaggtactgatggaggctatgaaacatataagagacatgccagtgaggagcaggagtagtttagtcggttcttgctttatgaagtggatgcaattagaaagacgtacgagcaggccaacatctcgcggtggctcgccctgggcaaccggacctgcccgaccacgatgcaggagctctgggacgacgccctcacccccaacgccactctctgacagctcatcgtcacctgtttatcttagatactgtttgaacgtatgggatgttggaggacagaagacaatcatgtcttactggagaaaattctttgagcagactaatgggttagtttggtttgctgatagttcacacataaggaggcttgatgattgccgtgctgaactccacaatctcttgaaagaagagagactagttggagcttcattgttgatttttgcaaataagcaagacatgcaaggagctctaaaaccaactggaatcgcgaagagtcactctccgacagctcatcgccgcttggttctcccgccggtacacaaggtttaagaagcgctccgcggacttccacggccgcgctgccgatctcgtccacagcctccggggcacggcgatgcccaggagacaggccctcgaggaagagcaatgtagagaagagaaaggtatctcgactgttccaaagcacaagtatgcatccaaagcctgttccccaaaagttttgaagacttaaacaatatgctgcatgaaaatctttactttattcacaacacacctgagatggactgggcttgggcagctaaccggttaattgagaaggatgaggcataaactccagacgatgctcctttaaattatttgccgcagaagaggctaattttgacaagccagttgatccagcaacttctccctgctataccagcgaccattttgagaggacaagctgtgtctacttacggaagtgcgacatacactctatcaatgttgacactaagggatgcatgcagcatggtagcatcattatcatcatcatataactcttgctcacctgtggaggatgaaaataacccatctgaacaaacaagtgctaagaaaatggaagacagagtatcaaaggttgtggaagtcttcgctggaagaatccagaagatggaaaatgactttataagtgattccctcacggttgtgtccttcacaaaggaaggatgtgaagccacactattatcaagcaacaaagccaaagttgtgtgacacaattataacaaaggaatcatcacccattagcacactaaaattggcgcatacagataacgcacctgcaaagtgggatcatttgaacatagttcagcaaagggccgacgcacttgagtcactcctcaagctctacgcaaagcttctggaggagaggctcgatgagctcgccgacgtttttcgaccatttggtgagagagctgtgtcatccggagagatgagcatacaatgatgtctgaccataagcctgatgactccaccgaagttttgagagtccccaacaatgcttttgtagcagcgattcgtttcaacatttttttgtttttcaaataccatttcgagagtgtaaataacttcaacggaattcaaaattgatgtacttaggtaggcctgagccctgtttatttttgatgtatatggtttgcatgtcaccaactgttgtgagcgatgattgattatttatcgtcttgttttatctgtctgtactcctttaatgcagcaccttcgtttgtcatgtgtcgtctcccctgtaagatgttgattaatattcattatatcattgtttattttttagcaatgaa

SEQ ID NO: 202707 - DNA, 2385 bp, Zea Mays
cgcttcgcacgtccccgccgtcgcgctcgcctccctcctctttgttgcctccgcgtcgacctccaccccgctctccgacgcgcttaccgtcgtctcggatttctggtgcactctcttctctacgacgcgagcaagggcggcgcttgccatggcatcgacgggaaccaggcatcactctccctatctctcgggaggggagctgtttgagcggatgcccaccaggaacaatgtttcctagatcacgatgtttgggccacttttggaagaggtcagggatgacatgttttcaagcttggaggacatcaccaacgcaccatatgcagatctgctctctattaattcaatgaggaaaggaaaggggtcatagaaattagtcttggcagatggaggggaacgtctcaatgactgaggcacattttttcttgttagttagctcatggatttttatggtccaagaggagttgctgctatatgaatatgacaacacccattaatcaacataactatatgaatacaatctgaaaggaaggtcggtttggtcagaaacacatggaggtactgatggaggctatgaaacatataagagacatgccagtgaggagcaggagtagtttagtcggttcttgctttatgaagtggatgcaattagaaagacgtacgagcaggccaacatctcgcggtggctcgccctgggcaaccggacctgcccgaccacgatgcaggagctctgggacgacgccctcacccccaacgccactctctgacagctcatcgtcacctggttctcccgcctgtttatcttagatactgtttgaacgtatgggatgttggaggacagaagacaatcatgtcttactggagaaaattctttgagcagactaatgggttagtttggtttgctgatagttcacacataaggaggcttgatgattgccgtgctgaactccacaatctcttgaaagaagagagactagttggagcttcattgttgatttttgcaaataagcaagacatgcaaggagctctaaaaccaactggaatcgcgaagagtcactctccgacagctcatcgccgcttggttctcccgccggtacacaaggtttaagaagcgctccgcggacttccacggccgcgctgccgatctcgtccacagcctccggggcacggcgatgcccaggagacaggccctcgaggaagagcaatgtagagaagagaaaggtatctcgactgttccaaagcacaagtatgcatccaaagcctgttccccaaaagttttgaagacttaaacaatatgctgcatgaaaatctttactttattcacaacacacctgagatggactgggcttgggcagctaaccggttaattgagaaggatgaggcataaactccagacgatgctcctttaaattatttgccgcagaagaggctaattttgacaagccagttgatccagcaacttctccctgctataccagcgaccattttgagaggacaagctgtgtctacttacggaagtgcgacatacactctatcaatgttgacactaagggatgcatgcagcatggtagcatcattatcatcatcatataactcttgctcacctgtggaggatgaaaataacccatctgaacaaacaagtgctaagaaaatggaagacagagtatcaaaggttgtggaagtcttcgctggaagaatccagaagatggaaaatgactttataagtgattccctcacggttgtgtccttcacaaaggaaggatgtgaagccacactattatcaagcaacaaagccaaagttgtgtgacacaattataacaaaggaatcatcacccattagcacactaaaattggcgcatacagataacgcacctgcaaagtgggatcatttgaacatagttcagcaaagggccgacgcacttgagtcactcctcaagctctacgcaaagcttctggaggagaggctcgatgagctcgccgacgtttttcgaccatttggtgagagagctgtgtcatccggagagatgagcatacaatgatgtctgaccataagcctgatgactccaccgaagttttgagagtccccaacaatgcttttgtagcagcgattcgtttcaacatttttttgtttttcaaataccatttcgagagtgtaaataacttcaacggaattcaaaattgatgtacttaggtaggcctgagccctgtttatttttgatgtatatggtttgcatgtcaccaactgttgtgagcgatgattgattatttatcgtcttgttttatctgtctgtactcctttaatgcagcaccttcgtttgtcatgtgtcgtctcccctgtaagatgttgattaatattcattatatcattgtttattttttagcaatgaa

SEQ ID NO: 202708 - DNA, 2822 bp, Zea Mays
cgcttcgcacgtccccgccgtcgcgctcgcctccctcctctttgttgcctccgcgtcgacctccaccccgctctccgacgcgcttaccgtcgtctcggatttctggtgcactctcttctctacgacgcgagcaagggcggcgcttgccatggcatcgacgggaaccaggcatcactctccctatctctcgggaggggagctgtttgagcggatgcccaccaggaacaatgtttcctagatcacgatgtttgggccacttttggaagaggtcagggatgacatgttttcaagcttggaggacatcaccaacgcaccatatgcagatctgctctctattaattcaatgaggaaaggaaaggggtcatagaaattagtcttggcagatggaggggaacgtctcaatgactgaggcacattttttcttgttagttagctcatggatttttatggtccaagaggagttgctgctatatgaatatgacaacacccattaatcaacataactatatgaatacaatctgaaaggaaggtcggtttggtcagaaacacatggaggtactgatggaggctatgaaacatataagagacatgccagtgaggagcaggagtagtttagtcggttcttgctttatgaagtggatgcaattagaaagacgtacgagcaggccaacatctcgcggtggctcgccctgggcaaccggacctgcccgaccacgatgcaggagctctgggacgacgccctcacccccaacgccactctctgacagctcatcgtcacctggttctcccgcctggttctgcattttgttttcttatctgtcaatcatgtttttccatattactgcaggcgggtctgattaattatttaaatgtagtttatcttagatactgtttgaacgtatgggatgttggaggacagaagacaatcatgtcttactggagaaaattctttgagcagactaatgggttagtttggtttgctgatagttcacacataaggaggcttgatgattgccgtgctgaactccacaatctcttgaaagaagagagactagttggagcttcattgttgatttttgcaaataagcaagacatgcaaggagctctaaaaccaactggaatcgcgaagattttacttagttcaatgtgggagcaaaaggatatgccaaattgaatgtagtttcatcagttatgctctattatggatgttcagaggcatccaatttcagtgtgtactgcaatacttgggtccacctagtcactctccgacagctcatcgccgcttggttctcccgccggtacacaaggtttaagaagcgctccgcggacttccacggccgcgctgccgatctcgtccacagcctccggggcacggcgatgcccaggagacaggccctcgaggaagagcaatgtagagaagagaaaggtatctcgactgttccaaagcacaagtatgcatccaaagcctgttccccaaaagacttaaacaatatgctgcatgaaaatctttactttattcacaacacacctgagatggactgggcttgggcagctaaccggttaattgagaaggttagccaactttgcgattctgctattttagttcttgtccatattggtccaagggatttatcttgatgctaaactaaattctggaataggatgaggcataaactccagacgatgctcctttaaattatttgccgcagaagaggctaattttgacaagccagttgatccagcaacttctccctgctataccagcgaccattttgagaggacaagctgtgtctacttacggaagtgcgacatacactctatcaatgttgacactaagggatgcatgcagcatggtagcatcattatcatcatcatataactcttgctcacctgtggaggatgaaaataacccatctgaacaaacaagtgctaagaaaatggaagacagagtatcaaaggttgtggaagtcttcgctggaagaatccagaagatggaaaatgactttataagtttgaacaagagggcctcgactaatcggacgactggacgattagtcgacctaatcgggtcggatgccctggtcgttccactaaaaccgactagaccgactaatcgcgattaatcgcgattagtcggacgacttgaaatcattgatcagtgattccctcacggttgtgtccttcacaaaggaaggatgtgaagccacactattatcaagcaacaaagccaaagttgtgtgacacaattataacaaaggaatcatcacccattagcacactaaaattggcgcatacagataacgcacctgcaaagtgggatcatttgaacatagttcagcaaagggccgacgcacttgagtcactcctcaagctctacgcaaagcttctggaggagaggctcgatgagctcgccgacgtttttcgaccatttggtgagagagctgtgtcatccggagagatgagcatacaatgatgtctgaccataagcctgatgactccaccgaagttttgagagtccccaacaatgcttttgtagcagcgattcgtttcaacatttttttgtttttcaaataccatttcgagagtgtaaataacttcaacggaattcaaaattgatgtacttaggtaggcctgagccctgtttatttttgatgtatatggtttgcatgtcaccaactgttgtgagcgatgattgattatttatcgtcttgttttatctgtctgtactcctttaatgcagcaccttcgtttgtcatgtgtcgtctcccctgtaagatgttgattaatattcattatatcattgtttattttttagcaatgaa

SEQ ID NO: 202709 - DNA, 2799 bp, Zea Mays
cgcttcgcacgtccccgccgtcgcgctcgcctccctcctctttgttgcctccgcgtcgacctccaccccgctctccgacgcgcttaccgtcgtctcggatttctggtgcactctcttctctacgacgcgagcaagggcggcgcttgccatggcatcgacgggaaccaggaggggagctgtttgagcggatgcccaccaggaacaatgtttcctagatcacgatgtttgggccacttttggaagaggtcagggatgacatgttttcaagcttggaggacatcaccaacgcaccatatgcagatctgctctctattaattcaatgaggaaaggaaaggggtcatagaaattagtcttggcagatggaggggaacgtctcaatgactgaggcacattttttcttgttagttagctcatggatttttatggtccaagaggagttgctgctatatgaatatgacaacacccattaatcaacataactatatgaatacaatctgaaaggaaggtcggtttggtcagaaacacatggaggtactgatggaggctatgaaacatataagagacatgccagtgaggagcaggagtagtttagtcggttcttgctttatgaagtggatgcaattagaaagacgtacgagcaggccaacatctcgcggtggctcgccctgggcaaccggacctgcccgaccacgatgcaggagctctgggacgacgccctcacccccaacgccactctctgacagctcatcgtcacctggttctcccgcctggttctgcattttgttttcttatctgtcaatcatgtttttccatattactgcaggcgggtctgattaattatttaaatgtagtttatcttagatactgtttgaacgtatgggatgttggaggacagaagacaatcatgtcttactggagaaaattctttgagcagactaatgggttagtttggtttgctgatagttcacacataaggaggcttgatgattgccgtgctgaactccacaatctcttgaaagaagagagactagttggagcttcattgttgatttttgcaaataagcaagacatgcaaggagctctaaaaccaactggaatcgcgaagattttacttagttcaatgtgggagcaaaaggatatgccaaattgaatgtagtttcatcagttatgctctattatggatgttcagaggcatccaatttcagtgtgtactgcaatacttgggtccacctagtcactctccgacagctcatcgccgcttggttctcccgccggtacacaaggtttaagaagcgctccgcggacttccacggccgcgctgccgatctcgtccacagcctccggggcacggcgatgcccaggagacaggccctcgaggaagagcaatgtagagaagagaaaggtatctcgactgttccaaagcacaagtatgcatccaaagcctgttccccaaaagacttaaacaatatgctgcatgaaaatctttactttattcacaacacacctgagatggactgggcttgggcagctaaccggttaattgagaaggttagccaactttgcgattctgctattttagttcttgtccatattggtccaagggatttatcttgatgctaaactaaattctggaataggatgaggcataaactccagacgatgctcctttaaattatttgccgcagaagaggctaattttgacaagccagttgatccagcaacttctccctgctataccagcgaccattttgagaggacaagctgtgtctacttacggaagtgcgacatacactctatcaatgttgacactaagggatgcatgcagcatggtagcatcattatcatcatcatataactcttgctcacctgtggaggatgaaaataacccatctgaacaaacaagtgctaagaaaatggaagacagagtatcaaaggttgtggaagtcttcgctggaagaatccagaagatggaaaatgactttataagtttgaacaagagggcctcgactaatcggacgactggacgattagtcgacctaatcgggtcggatgccctggtcgttccactaaaaccgactagaccgactaatcgcgattaatcgcgattagtcggacgacttgaaatcattgatcagtgattccctcacggttgtgtccttcacaaaggaaggatgtgaagccacactattatcaagcaacaaagccaaagttgtgtgacacaattataacaaaggaatcatcacccattagcacactaaaattggcgcatacagataacgcacctgcaaagtgggatcatttgaacatagttcagcaaagggccgacgcacttgagtcactcctcaagctctacgcaaagcttctggaggagaggctcgatgagctcgccgacgtttttcgaccatttggtgagagagctgtgtcatccggagagatgagcatacaatgatgtctgaccataagcctgatgactccaccgaagttttgagagtccccaacaatgcttttgtagcagcgattcgtttcaacatttttttgtttttcaaataccatttcgagagtgtaaataacttcaacggaattcaaaattgatgtacttaggtaggcctgagccctgtttatttttgatgtatatggtttgcatgtcaccaactgttgtgagcgatgattgattatttatcgtcttgttttatctgtctgtactcctttaatgcagcaccttcgtttgtcatgtgtcgtctcccctgtaagatgttgattaatattcattatatcattgtttattttttagcaatgaa

SEQ ID NO: 202710 - DNA, 2411 bp, Zea Mays
cgcttcgcacgtccccgccgtcgcgctcgcctccctcctctttgttgcctccgcgtcgacctccaccccgctctccgacgcgcttaccgtcgtctcggatttctggtgcactctcttctctacgacgcgagcaagggcggcgcttgccatggcatcgacgggaaccaggcatcactctccctatctctcgggaggggagctgtttgagcggatgcccaccaggaacaatgtttcctagatcacgatgtttgggccacttttggaagaggtcagggatgacatgttttcaagcttggaggacatcaccaacgcaccatatgcagatctgctctctattaattcaatgaggaaaggaaaggggtcatagaaattagtcttggcagatggaggggaacgtctcaatgactgaggcacattttttcttgttagttagctcatggatttttatggtccaagaggagttgctgctatatgaatatgacaacacccattaatcaacataactatatgaatacaatctgaaaggaaggtcggtttggtcagaaacacatggaggtactgatggaggctatgaaacatataagagacatgccagtgaggagcaggagtagtttagtcggttcttgctttatgaagtggatgcaattagaaagacgtacgagcaggccaacatctcgcggtggctcgccctgggcaaccggacctgcccgaccacgatgcaggagctctgggacgacgccctcacccccaacgccactctctgacagctcatcgtcacctggttctcccgcctggttctgcattttgttttcttatctgtcaatcatgtttttccatattactgcaggcgggtctgattaattatttaaatgtagtttatcttagatactgtttgaacgtatgggatgttggaggacagaagacaatcatgtcttactggagaaaattctttgagcagactaatgggttagtttggtttgctgatagttcacacataaggaggcttgatgattgccgtgctgaactccacaatctcttgaaagaagagagactagttggagcttcattgttgatttttgcaaataagcaagacatgcaaggagctctaaaaccaactggaatcgcgaagagtcactctccgacagctcatcgccgcttggttctcccgccggtacacaaggtttaagaagcgctccgcggacttccacggccgcgctgccgatctcgtccacagcctccggggcacggcgatgcccaggagacaggccctcgaggaagagcaatgtagagaagagaaaggtatctcgactgttccaaagcacaagtatgcatccaaagcctgttccccaaaagcgaccattttgagaggacaagctgtgtctacttacggaagtgcgacatacactctatcaatgttgacactaagggatgcatgcagcatggtagcatcattatcatcatcatataactcttgctcacctgtggaggatgaaaataacccatctgaacaaacaagtgctaagaaaatggaagacagagtatcaaaggttgtggaagtcttcgctggaagaatccagaagatggaaaatgactttataagtttgaacaagagggcctcgactaatcggacgactggacgattagtcgacctaatcgggtcggatgccctggtcgttccactaaaaccgactagaccgactaatcgcgattaatcgcgattagtcggacgacttgaaatcattgatcagtgattccctcacggttgtgtccttcacaaaggaaggatgtgaagccacactattatcaagcaacaaagccaaagttgtgtgacacaattataacaaaggaatcatcacccattagcacactaaaattggcgcatacagataacgcacctgcaaagtgggatcatttgaacatagttcagcaaagggccgacgcacttgagtcactcctcaagctctacgcaaagcttctggaggagaggctcgatgagctcgccgacgtttttcgaccatttggtgagagagctgtgtcatccggagagatgagcatacaatgatgtctgaccataagcctgatgactccaccgaagttttgagagtccccaacaatgcttttgtagcagcgattcgtttcaacatttttttgtttttcaaataccatttcgagagtgtaaataacttcaacggaattcaaaattgatgtacttaggtaggcctgagccctgtttatttttgatgtatatggtttgcatgtcaccaactgttgtgagcgatgattgattatttatcgtcttgttttatctgtctgtactcctttaatgcagcaccttcgtttgtcatgtgtcgtctcccctgtaagatgttgattaatattcattatatcattgtttattttttagcaatgaa

SEQ ID NO: 202711 - DNA, 2747 bp, Zea Mays
cgcttcgcacgtccccgccgtcgcgctcgcctccctcctctttgttgcctccgcgtcgacctccaccccgctctccgacgcgcttaccgtcgtctcggatttctggtgcactctcttctctacgacgcgagcaagggcggcgcttgccatggcatcgacgggaaccaggcatcactctccctatctctcgggaggggagctgtttgagcggatgcccaccaggaacaatgtttcctagatcacgatgtttgggccacttttggaagaggtcagggatgacatgttttcaagcttggaggacatcaccaacgcaccatatgcagatctgctctctattaattcaatgaggaaaggaaaggggtcatagaaattagtcttggcagatggaggggaacgtctcaatgactgaggcacattttttcttgttagttagctcatggatttttatggtccaagaggagttgctgctatatgaatatgacaacacccattaatcaacataactatatgaatacaatctgaaaggaaggtcggtttggtcagaaacacatggaggtactgatggaggctatgaaacatataagagacatgccagtgaggagcaggagtagtttagtcggttcttgctttatgaagtggatgcaattagaaagacgtacgagcaggccaacatctcgcggtggctcgccctgggcaaccggacctgcccgaccacgatgcaggagctctgggacgacgccctcacccccaacgccactctctgacagctcatcgtcacctggttctcccgcctggttctgcattttgttttcttatctgtcaatcatgtttttccatattactgcaggcgggtctgattaattatttaaatgtagtttatcttagatactgtttgaacgtatgggatgttggaggacagaagacaatcatgtcttactggagaaaattctttgagcagactaatgggttagtttggtttgctgatagttcacacataaggaggcttgatgattgccgtgctgaactccacaatctcttgaaagaagagagactagttggagcttcattgttgatttttgcaaataagcaagacatgcaaggagctctaaaaccaactggaatcgcgaagagtcactctccgacagctcatcgccgcttggttctcccgccggtacacaaggtttaagaagcgctccgcggacttccacggccgcgctgccgatctcgtccacagcctccggggcacggcgatgcccaggagacaggccctcgaggaagagcaatgtagagaagagaaaggtatctcgactgttccaaagcacaagtatgcatccaaagcctgttccccaaaaggtgcgtgaactttgttcttgattttgtcagactaaatgtgggtgaactttgtactgcagtttttgtttaaataaactttggactgtttaaattactgatgcatccaaccactgtttttctttactgtttgttgatacacgaccagatgcccagttgagttcacccaaaaggtttattacaccacgaaaaaatctgagatgaaatgatttttatttaaatgaactttgtactgcaatttttgtttaaatgaactttgtactgtttaaattattgatgcatagttttgaagacttaaacaatatgctgcatgaaaatctttactttattcacaacacacctgagatggactgggcttgggcagctaaccggttaattgagaaggatgaggcataaactccagacgatgctcctttaaattatttgccgcagaagaggctaattttgacaagccagttgatccagcaacttctccctgctataccagcgaccattttgagaggacaagctgtgtctacttacggaagtgcgacatacactctatcaatgttgacactaagggatgcatgcagcatggtagcatcattatcatcatcatataactcttgctcacctgtggaggatgaaaataacccatctgaacaaacaagtgctaagaaaatggaagacagagtatcaaaggttgtggaagtcttcgctggaagaatccagaagatggaaaatgactttataagtgattccctcacggttgtgtccttcacaaaggaaggatgtgaagccacactattatcaagcaacaaagccaaagttgtgtgacacaattataacaaaggaatcatcacccattagcacactaaaattggcgcatacagataacgcacctgcaaagtgggatcatttgaacatagttcagcaaagggccgacgcacttgagtcactcctcaagctctacgcaaagcttctggaggagaggctcgatgagctcgccgacgtttttcgaccatttggtgagagagctgtgtcatccggagagatgagcatacaatgatgtctgaccataagcctgatgactccaccgaagttttgagagtccccaacaatgcttttgtagcagcgattcgtttcaacatttttttgtttttcaaataccatttcgagagtgtaaataacttcaacggaattcaaaattgatgtacttaggtaggcctgagccctgtttatttttgatgtatatggtttgcatgtcaccaactgttgtgagcgatgattgattatttatcgtcttgttttatctgtctgtactcctttaatgcagcaccttcgtttgtcatgtgtcgtctcccctgtaagatgttgattaatattcattatatcattgtttattttttagcaatgaa

SEQ ID NO: 202712 - DNA, 2577 bp, Zea Mays
cgcttcgcacgtccccgccgtcgcgctcgcctccctcctctttgttgcctccgcgtcgacctccaccccgctctccgacgcgcttaccgtcgtctcggatttctggtgcactctcttctctacgacgcgagcaagggcggcgcttgccatggcatcgacgggaaccaggcatcactctccctatctctcgggaggggagctgtttgagcggatgcccaccaggaacaatgtttcctagatcacgatgtttgggccacttttggaagaggtcagggatgacatgttttcaagcttggaggacatcaccaacgcaccatatgcagatctgctctctattaattcaatgaggaaaggaaaggggtcatagaaattagtcttggcagatggaggggaacgtctcaatgactgaggcacattttttcttgttagttagctcatggatttttatggtccaagaggagttgctgctatatgaatatgacaacacccattaatcaacataactatatgaatacaatctgaaaggaaggtcggtttggtcagaaacacatggaggtactgatggaggctatgaaacatataagagacatgccagtgaggagcaggagtagtttagtcggttcttgctttatgaagtggatgcaattagaaagacgtacgagcaggccaacatctcgcggtggctcgccctgggcaaccggacctgcccgaccacgatgcaggagctctgggacgacgccctcacccccaacgccactctctgacagctcatcgtcacctggttctcccgcctggttctgcattttgttttcttatctgtcaatcatgtttttccatattactgcaggcgggtctgattaattatttaaatgtagtttatcttagatactgtttgaacgtatgggatgttggaggacagaagacaatcatgtcttactggagaaaattctttgagcagactaatgggttagtttggtttgctgatagttcacacataaggaggcttgatgattgccgtgctgaactccacaatctcttgaaagaagaggataaaggtttacctatctagggagtgttctattgttgatccttactgtattgattttaacagagactagttggagcttcattgttgatttttgcaaataagcaagacatgcaaggagctctaaaaccaactggaatcgcgaagagtcactctccgacagctcatcgccgcttggttctcccgccggtacacaaggtttaagaagcgctccgcggacttccacggccgcgctgccgatctcgtccacagcctccggggcacggcgatgcccaggagacaggccctcgaggaagagcaatgtagagaagagaaaggtatctcgactgttccaaagcacaagtatgcatccaaagcctgttccccaaaaggatgaggcataaactccagacgatgctcctttaaattatttgccgcagaagaggctaattttgacaagccagttgatccagcaacttctccctgctataccagcgaccattttgagaggacaagctgtgtctacttacggaagtgcgacatacactctatcaatgttgacactaagggatgcatgcagcatggtagcatcattatcatcatcatataactcttgctcacctgtggaggatgaaaataacccatctgaacaaacaagtgctaagaaaatggaagacagagtatcaaaggttgtggaagtcttcgctggaagaatccagaagatggaaaatgactttataagtttgaacaagagggcctcgactaatcggacgactggacgattagtcgacctaatcgggtcggatgccctggtcgttccactaaaaccgactagaccgactaatcgcgattaatcgcgattagtcggacgacttgaaatcattgatcagtgattccctcacggttgtgtccttcacaaaggaaggatgtgaagccacactattatcaagcaacaaagccaaagttgtgtgacacaattataacaaaggaatcatcacccattagcacactaaaattggcgcatacagataacgcacctgcaaagtgggatcatttgaacatagttcagcaaagggccgacgcacttgagtcactcctcaagctctacgcaaagcttctggaggagaggctcgatgagctcgccgacgtttttcgaccatttggtgagagagctgtgtcatccggagagatgagcatacaatgatgtctgaccataagcctgatgactccaccgaagttttgagagtccccaacaatgcttttgtagcagcgattcgtttcaacatttttttgtttttcaaataccatttcgagagtgtaaataacttcaacggaattcaaaattgatgtacttaggtaggcctgagccctgtttatttttgatgtatatggtttgcatgtcaccaactgttgtgagcgatgattgattatttatcgtcttgttttatctgtctgtactcctttaatgcagcaccttcgtttgtcatgtgtcgtctcccctgtaagatgttgattaatattcattatatcattgtttattttttagcaatgaa

SEQ ID NO: 202713 - DNA, 2839 bp, Zea Mays
cgcttcgcacgtccccgccgtcgcgctcgcctccctcctctttgttgcctccgcgtcgacctccaccccgctctccgacgcgcttaccgtcgtctcggatttctggtgcactctcttctctacgacgcgagcaagggcggcgcttgccatggcatcgacgggaaccaggcatcactctccctatctctcgggaggggagctgtttgagcggatgcccaccaggaacaatgtttcctagatcacgatgtttgggccacttttggaagaggtcagggatgacatgttttcaagcttggaggacatcaccaacgcaccatatgcagatctgctctctattaattcaatgaggaaaggaaaggggtcatagaaattagtcttggcagatggaggggaacgtctcaatgactgaggcacattttttcttgttagttagctcatggatttttatggtccaagaggagttgctgctatatgaatatgacaacacccattaatcaacataactatatgaatacaatctgaaaggaaggtcggtttggtcagaaacacatggaggtactgatggaggctatgaaacatataagagacatgccagtgaggagcaggagtagtttagtcggttcttgctttatgaagtggatgcaattagaaaggccaacatctcgcggtggctcgccctgggcaaccggacctgcccgaccacgatgcaggagctctgggacgacgccctcacccccaacgccactctctgacagctcatcgtcacctggttctcccgcctggttctgcattttgttttcttatctgtcaatcatgtttttccatattactgcaggcgggtctgattaattatttaaatgtagtttatcttagatactgtttgaacgtatgggatgttggaggacagaagacaatcatgtcttactggagaaaattctttgagcagactaatgggttagtttggtttgctgatagttcacacataaggaggcttgatgattgccgtgctgaactccacaatctcttgaaagaagaggataaaggtttacctatctagggagtgttctattgttgatccttactgtattgattttaacagagactagttggagcttcattgttgatttttgcaaataagcaagacatgcaaggagctctaaaaccaactggaatcgcgaaggtaagcgaacttcagtcatttattatatgcattagagacatgttttcctgtctgtgacatcatttttaacttgtactgtgttttttcggtcctcatggttgccaagattttacttagttcaatgtgggagcaaaaggatatgccaaattgaatgtagtttcatcagttatgctctattatggatgttcagaggcatccaatttcagtgtgtactgcaatacttgggtccacctagtcactctccgacagctcatcgccgcttggttctcccgccggtacacaaggtttaagaagcgctccgcggacttccacggccgcgctgccgatctcgtccacagcctccggggcacggcgatgcccaggagacaggccctcgaggaagagcaatgtagagaagagaaaggtatctcgactgttccaaagcacaagtatgcatccaaagcctgttccccaaaagttttgaagacttaaacaatatgctgcatgaaaatctttactttattcacaacacacctgagatggactgggcttgggcagctaaccggttaattgagaaggttagccaactttgcgattctgctattttagttcttgtccatattggtccaagggatttatcttgatgctaaactaaattctggaataggatgaggcataaactccagacgatgctcctttaaattatttgccgcagaagaggctaattttgacaagccagttgatccagcaacttctccctgctataccagcgaccattttgagaggacaagctgtgtctacttacggaagtgcgacatacactctatcaatgttgacactaagggatgcatgcagcatggtagcatcattatcatcatcatataactcttgctcacctgtggaggatgaaaataacccatctgaacaaacaagtgctaagaaaatggaagacagagtatcaaaggttgtggaagtcttcgctggaagaatccagaagatggaaaatgactttataagtgattccctcacggttgtgtccttcacaaaggaaggatgtgaagccacactattatcaagcaacaaagccaaagttgtgtgacacaattataacaaaggaatcatcacccattagcacactaaaattggcgcatacagataacgcacctgcaaagtgggatcatttgaacatagttcagcaaagggccgacgcacttgagtcactcctcaagctctacgcaaagcttctggaggagaggctcgatgagctcgccgacgtttttcgaccatttggtgagagagctgtgtcatccggagagatgagcatacaatgatgtctgaccataagcctgatgactccaccgaagttttgagagtccccaacaatgcttttgtagcagcgattcgtttcaacatttttttgtttttcaaataccatttcgagagtgtaaataacttcaacggaattcaaaattgatgtacttaggtaggcctgagccctgtttatttttgatgtatatggtttgcatgtcaccaactgttgtgagcgatgattgattatttatcgtcttgttttatctgtctgtactcctttaatgcagcaccttcgtttgtcatgtgtcgtctcccctgtaagatgttgattaatattcattatatcattgtttattttttagcaatgaa

SEQ ID NO: 202714 - DNA, 2563 bp, Zea Mays
cgcttcgcacgtccccgccgtcgcgctcgcctccctcctctttgttgcctccgcgtcgacctccaccccgctctccgacgcgcttaccgtcgtctcggatttctggtgcactctcttctctacgacgcgagcaagggcggcgcttgccatggcatcgacgggaaccaggcatcactctccctatctctcgggaggggagctgtttgagcggatgcccaccaggaacaatgtttcctagatcacgatgtttgggccacttttggaagaggtcagggatgacatgttttcaagcttggaggacatcaccaacgcaccatatgcagatctgctctctattaattcaatgaggaaaggaaaggggtcatagaaattagtcttggcagatggaggggaacgtctcaatgactgaggcacattttttcttgttagttagctcatggatttttatggtccaagaggagttgctgctatatgaatatgacaacacccattaatcaacataactatatgaatacaatctgaaaggaaggtcggtttggtcagaaacacatggaggtactgatggaggctatgaaacatataagagacatgccagtgaggagcaggagtagtttagtcggttcttgctttatgaagtggatgcaattagaaagacgtacgagcaggccaacatctcgcggtggctcgccctgggcaaccggacctgcccgaccacgatgcaggagctctgggacgacgccctcacccccaacgccactctctgacagctcatcgtcacctggttctcccgcctggttctgcattttgttttcttatctgtcaatcatgtttttccatattactgcaggcgggtctgattaattatttaaatgtagtttatcttagatactgtttgaacgtatgggatgttggaggacagaagacaatcatgtcttactggagaaaattctttgagcagactaatgggttagtttggtttgctgatagttcacacataaggaggcttgatgattgccgtgctgaactccacaatctcttgaaagaagagagactagttggagcttcattgttgatttttgcaaataagcaagacatgcaaggagctctaaaaccaactggaatcgcgaaggtttaagaagcgctccgcggacttccacggccgcgctgccgatctcgtccacagcctccggggcacggcgatgcccaggagacaggccctcgaggaagagcaatgtagagaagagaaaggtatctcgactgttccaaagcacaagtatgcatccaaagcctgttccccaaaagttttgaagacttaaacaatatgctgcatgaaaatctttactttattcacaacacacctgagatggactgggcttgggcagctaaccggttaattgagaaggatgaggcataaactccagacgatgctcctttaaattatttgccgcagaagaggctaattttgacaagccagttgatccagcaacttctccctgctataccagcgaccattttgagaggacaagctgtgtctacttacggaagtgcgacatacactctatcaatgttgacactaagggatgcatgcagcatggtagcatcattatcatcatcatataactcttgctcacctgtggaggatgaaaataacccatctgaacaaacaagtgctaagaaaatggaagacagagtatcaaaggttgtggaagtcttcgctggaagaatccagaagatggaaaatgactttataagtttgaacaagagggcctcgactaatcggacgactggacgattagtcgacctaatcgggtcggatgccctggtcgttccactaaaaccgactagaccgactaatcgcgattaatcgcgattagtcggacgacttgaaatcattgatcagtgattccctcacggttgtgtccttcacaaaggaaggatgtgaagccacactattatcaagcaacaaagccaaagttgtgtgacacaattataacaaaggaatcatcacccattagcacactaaaattggcgcatacagataacgcacctgcaaagtgggatcatttgaacatagttcagcaaagggccgacgcacttgagtcactcctcaagctctacgcaaagcttctggaggagaggctcgatgagctcgccgacgtttttcgaccatttggtgagagagctgtgtcatccggagagatgagcatacaatgatgtctgaccataagcctgatgactccaccgaagttttgagagtccccaacaatgcttttgtagcagcgattcgtttcaacatttttttgtttttcaaataccatttcgagagtgtaaataacttcaacggaattcaaaattgatgtacttaggtaggcctgagccctgtttatttttgatgtatatggtttgcatgtcaccaactgttgtgagcgatgattgattatttatcgtcttgttttatctgtctgtactcctttaatgcagcaccttcgtttgtcatgtgtcgtctcccctgtaagatgttgattaatattcattatatcattgtttattttttagcaatgaa

SEQ ID NO: 202715 - DNA, 2520 bp, Zea Mays
cgcttcgcacgtccccgccgtcgcgctcgcctccctcctctttgttgcctccgcgtcgacctccaccccgctctccgacgcgcttaccgtcgtctcggatttctggtgcactctcttctctacgacgcgagcaagggcggcgcttgccatggcatcgacgggaaccaggcatcactctccctatctctcgggaggggagctgtttgagcggatgcccaccaggaacaatgtttcctagatcacgatgtttgggccacttttggaagaggtcagggatgacatgttttcaagcttggaggacatcaccaacgcaccatatgcagatctgctctctattaattcaatgaggaaaggaaaggggtcatagaaattagtcttggcagatggaggggaacgtctcaatgactgaggcacattttttcttgttagttagctcatggatttttatggtccaagaggagttgctgctatatgaatatgacaacacccattaatcaacataactatatgaatacaatctgaaaggaaggtcggtttggtcagaaacacatggaggtactgatggaggctatgaaacatataagagacatgccagtgaggagcaggagtagtttagtcggttcttgctttatgaagtggatgcaattagaaagacgtacgagcaggccaacatctcgcggtggctcgccctgggcaaccggacctgcccgaccacgatgcaggagctctgggacgacgccctcacccccaacgccactctctgacagctcatcgtcacctgtttatcttagatactgtttgaacgtatgggatgttggaggacagaagacaatcatgtcttactggagaaaattctttgagcagactaatgggttagtttggtttgctgatagttcacacataaggaggcttgatgattgccgtgctgaactccacaatctcttgaaagaagagagactagttggagcttcattgttgatttttgcaaataagcaagacatgcaaggagctctaaaaccaactggaatcgcgaagagtcactctccgacagctcatcgccgcttggttctcccgccggtacacaaggtttaagaagcgctccgcggacttccacggccgcgctgccgatctcgtccacagcctccggggcacggcgatgcccaggagacaggccctcgaggaagagcaatgtagagaagagaaaggtatctcgactgttccaaagcacaagtatgcatccaaagcctgttccccaaaagttttgaagacttaaacaatatgctgcatgaaaatctttactttattcacaacacacctgagatggactgggcttgggcagctaaccggttaattgagaaggatgaggcataaactccagacgatgctcctttaaattatttgccgcagaagaggctaattttgacaagccagttgatccagcaacttctccctgctataccagcgaccattttgagaggacaagctgtgtctacttacggaagtgcgacatacactctatcaatgttgacactaagggatgcatgcagcatggtagcatcattatcatcatcatataactcttgctcacctgtggaggatgaaaataacccatctgaacaaacaagtgctaagaaaatggaagacagagtatcaaaggttgtggaagtcttcgctggaagaatccagaagatggaaaatgactttataagtttgaacaagagggcctcgactaatcggacgactggacgattagtcgacctaatcgggtcggatgccctggtcgttccactaaaaccgactagaccgactaatcgcgattaatcgcgattagtcggacgacttgaaatcattgatcagtgattccctcacggttgtgtccttcacaaaggaaggatgtgaagccacactattatcaagcaacaaagccaaagttgtgtgacacaattataacaaaggaatcatcacccattagcacactaaaattggcgcatacagataacgcacctgcaaagtgggatcatttgaacatagttcagcaaagggccgacgcacttgagtcactcctcaagctctacgcaaagcttctggaggagaggctcgatgagctcgccgacgtttttcgaccatttggtgagagagctgtgtcatccggagagatgagcatacaatgatgtctgaccataagcctgatgactccaccgaagttttgagagtccccaacaatgcttttgtagcagcgattcgtttcaacatttttttgtttttcaaataccatttcgagagtgtaaataacttcaacggaattcaaaattgatgtacttaggtaggcctgagccctgtttatttttgatgtatatggtttgcatgtcaccaactgttgtgagcgatgattgattatttatcgtcttgttttatctgtctgtactcctttaatgcagcaccttcgtttgtcatgtgtcgtctcccctgtaagatgttgattaatattcattatatcattgtttattttttagcaatgaa

SEQ ID NO: 202716 - DNA, 2894 bp, Zea Mays
cgcttcgcacgtccccgccgtcgcgctcgcctccctcctctttgttgcctccgcgtcgacctccaccccgctctccgacgcgcttaccgtcgtctcggatttctggtgcactctcttctctacgacgcgagcaagggcggcgcttgccatggcatcgacgggaaccaggcatcactctccctatctctcgggaggggagctgtttgagcggatgcccaccaggaacaatgtttcctagatcacgatgtttgggccacttttggaagaggtcagggatgacatgttttcaagcttggaggacatcaccaacgcaccatatgcagatctgctctctattaattcaatgaggaaaggaaaggggtcatagaaattagtcttggcagatggaggggaacgtctcaatgactgaggcacattttttcttgttagttagctcatggatttttatggtccaagaggagttgctgctatatgaatatgacaacacccattaatcaacataactatatgaatacaatctgaaaggaaggtcggtttggtcagaaacacatggaggtactgatggaggctatgaaacatataagagacatgccagtgaggagcaggagtagtttagtcggttcttgctttatgaagtggatgcaattagaaagacgtacgagcaggccaacatctcgcggtggctcgccctgggcaaccggacctgcccgaccacgatgcaggagctctgggacgacgccctcacccccaacgccactctctgacagctcatcgtcacctgtttatcttagatactgtttgaacgtatgggatgttggaggacagaagacaatcatgtcttactggagaaaattctttgagcagactaatgggttagtttggtttgctgatagttcacacataaggaggcttgatgattgccgtgctgaactccacaatctcttgaaagaagagagactagttggagcttcattgttgatttttgcaaataagcaagacatgcaaggagctctaaaaccaactggaatcgcgaagagtcactctccgacagctcatcgccgcttggttctcccgccggtacacaaggtttaagaagcgctccgcggacttccacggccgcgctgccgatctcgtccacagcctccggggcacggcgatgcccaggagacaggccctcgaggaagagcaatgtagagaagagaaaggtatctcgactgttccaaagcacaagtatgcatccaaagcctgttccccaaaaggtgcgtgaactttgttcttgattttgtcagactaaatgtgggtgaactttgtactgcagtttttgtttaaataaactttggactgtttaaattactgatgcatccaaccactgtttttctttactgtttgttgatacacgaccagatgcccagttgagttcacccaaaaggtttattacaccacgaaaaaatctgagatgaaatgatttttatttaaatgaactttgtactgcagtatttacagacatattttggcacccgatcgattactgtttttgttttactaatagctgctgctattactatcttttgggtgaagtgaatcagatttttgtttaaatgaactttgtactgtttaaattattgatgcatagttttgaagacttaaacaatatgctgcatgaaaatctttactttattcacaacacacctgagatggactgggcttgggcagctaaccggttaattgagaaggatgaggcataaactccagacgatgctcctttaaattatttgccgcagaagaggctaattttgacaagccagttgatccagcaacttctccctgctataccagcgaccattttgagaggacaagctgtgtctacttacggaagtgcgacatacactctatcaatgttgacactaagggatgcatgcagcatggtagcatcattatcatcatcatataactcttgctcacctgtggaggatgaaaataacccatctgaacaaacaagtgctaagaaaatggaagacagagtatcaaaggttgtggaagtcttcgctggaagaatccagaagatggaaaatgactttataagtttgaacaagagggcctcgactaatcggacgactggacgattagtcgacctaatcgggtcggatgccctggtcgttccactaaaaccgactagaccgactaatcgcgattaatcgcgattagtcggacgacttgaaatcattgatcagtgattccctcacggttgtgtccttcacaaaggaaggatgtgaagccacactattatcaagcaacaaagccaaagttgtgtgacacaattataacaaaggaatcatcacccattagcacactaaaattggcgcatacagataacgcacctgcaaagtgggatcatttgaacatagttcagcaaagggccgacgcacttgagtcactcctcaagctctacgcaaagcttctggaggagaggctcgatgagctcgccgacgtttttcgaccatttggtgagagagctgtgtcatccggagagatgagcatacaatgatgtctgaccataagcctgatgactccaccgaagttttgagagtccccaacaatgcttttgtagcagcgattcgtttcaacatttttttgtttttcaaataccatttcgagagtgtaaataacttcaacggaattcaaaattgatgtacttaggtaggcctgagccctgtttatttttgatgtatatggtttgcatgtcaccaactgttgtgagcgatgattgattatttatcgtcttgttttatctgtctgtactcctttaatgcagcaccttcgtttgtcatgtgtcgtctcccctgtaagatgttgattaatattcattatatcattgtttattttttagcaatgaa

SEQ ID NO: 202717 - DNA, 2691 bp, Zea Mays
gaaaccgctcccttcgcacgccgaccctagctcccagatccacattcgcctccgcctcagatccctacagcgtgatgcgagggaacaacaaccgcgcgacctccccatcctgagcacctcaaatccgatgcccctccccaagccattccctcggccgcgacagcgacgacaacgagcgtggcccccctctaccacctctgcctttccatttgtggcctccgcaccgccccaacgttgacccctccgtcctccccctctactcccagcgcagcgccgccgcgcctgcgctatcccacccgatggatgtgctgccgcctctgcagcacgccccgtcgctaccgaccccgcccagccatgcatttggagttcacaatatgaagacatggtttatccaccggacgacgaggatggtgcgtggatggcgagggaggacctccactggacctactccgcacctcttcctgtctaccgaggccgagcacatggagccaacgactacaaaatcataaggaggggagctgtttgagcggatgcccaccaggaacaatgtttcctagatcacgatgtttgggccacttttggaagaggtcagggatgacatgttttcaagcttggaggacatcaccaacgcaccatatgcagatctgctctctattaattcaatgaggaaaggaaaggggtcatagaaattagtcttggcagatggaggggaacgtctcaatgactgaggcacattttttcttgttagttagctcatggatttttatggtccaagaggagttgctgctatatgaatatgacaacacccattaatcaacataactatatgaatacaatctgaaaggaaggtcggtttggtcagaaacacatggaggtactgatggaggctatgaaacatataagagacatgccagtgaggagcaggagtagtttagtcggttcttgctttatgaagtggatgcaattagaaagacgtacgagcaggccaacatctcgcggtggctcgccctgggcaaccggacctgcccgaccacgatgcaggagctctgggacgacgccctcacccccaacgccactctctgacagctcatcgtcacctgtttatcttagatactgtttgaacgtatgggatgttggaggacagaagacaatcatgtcttactggagaaaattctttgagcagactaatgggttagtttggtttgctgatagttcacacataaggaggcttgatgattgccgtgctgaactccacaatctcttgaaagaagagagactagttggagcttcattgttgatttttgcaaataagcaagacatgcaaggagctctaaaaccaactggaatcgcgaagagtcactctccgacagctcatcgccgcttggttctcccgccggtacacaaggtttaagaagcgctccgcggacttccacggccgcgctgccgatctcgtccacagcctccggggcacggcgatgcccaggagacaggccctcgaggaagagcaatgtagagaagagaaaggtatctcgactgttccaaagcacaagtatgcatccaaagcctgttccccaaaagttttgaagacttaaacaatatgctgcatgaaaatctttactttattcacaacacacctgagatggactgggcttgggcagctaaccggttaattgagaaggatgaggcataaactccagacgatgctcctttaaattatttgccgcagaagaggctaattttgacaagccagttgatccagcaacttctccctgctataccagcgaccattttgagaggacaagctgtgtctacttacggaagtgcgacatacactctatcaatgttgacactaagggatgcatgcagcatggtagcatcattatcatcatcatataactcttgctcacctgtggaggatgaaaataacccatctgaacaaacaagtgctaagaaaatggaagacagagtatcaaaggttgtggaagtcttcgctggaagaatccagaagatggaaaatgactttataagtgattccctcacggttgtgtccttcacaaaggaaggatgtgaagccacactattatcaagcaacaaagccaaagttgtgtgacacaattataacaaaggaatcatcacccattagcacactaaaattggcgcatacagataacgcacctgcaaagtgggatcatttgaacatagttcagcaaagggccgacgcacttgagtcactcctcaagctctacgcaaagcttctggaggagaggctcgatgagctcgccgacgtttttcgaccatttggtgagagagctgtgtcatccggagagatgagcatacaatgatgtctgaccataagcctgatgactccaccgaagttttgagagtccccaacaatgcttttgtagcagcgattcgtttcaacatttttttgtttttcaaataccatttcgagagtgtaaataacttcaacggaattcaaaattgatgtacttaggtaggcctgagccctgtttatttttgatgtatatggtttgcatgtcaccaactgttgtgagcgatgattgattatttatcgtcttgttttatctgtctgtactcctttaatgcagcaccttcgtttgtcatgtgtcgtctcccctgtaagatgttgattaatattcattatatcattgtttattttttagcaatgaa

SEQ ID NO: 202718 - DNA, 3212 bp, Zea Mays
aaaccgctcccttcgcacgccgaccctagctcccagatccacattcgcctccgcctcagatccctacagcgtgatgcgagggaacaacaaccgcgcgacctccccatcctgagcacctcaaatccgatgcccctccccaagccattccctcggccgcgacagcgacgacaacgagcgtggcccccctctaccacctctgcctttccatttgtggcctccgcaccgccccaacgttgacccctccgtcctccccctctactcccagcgcagcgccgccgcgcctgcgctatcccacccgatggatgtgctgccgcctctgcagcacgccccgtcgctaccgaccccgcccagccatgcatttggagttcacaatatgaagacatggtttatccaccggacgacgaggatggtgcgtggatggcgagggaggacctccactggacctactccgcacctcttcctgtctaccgaggccgagcacatggagccaacgactacaaaatcataaggaggggagctgtttgagcggatgcccaccaggaacaatgtttcctagatcacgatgtttgggccacttttggaagaggtcagggatgacatgttttcaagcttggaggacatcaccaacgcaccatatgcagatctgctctctattaattcaatgaggaaaggaaaggggtcatagaaattagtcttggcagatggaggggaacgtctcaatgactgaggcacattttttcttgttagttagctcatggatttttatggtccaagaggagttgctgctatatgaatatgacaacacccattaatcaacataactatatgaatacaatctgaaaggaaggtcggtttggtcagaaacacatggaggtactgatggaggctatgaaacatataagagacatgccagtgaggagcaggagtagtttagtcggttcttgctttatgaagtggatgcaattagaaagacgtacgagcaggccaacatctcgcggtggctcgccctgggcaaccggacctgcccgaccacgatgcaggagctctgggacgacgccctcacccccaacgccactctctgacagctcatcgtcacctgtttatcttagatactgtttgaacgtatgggatgttggaggacagaagacaatcatgtcttactggagaaaattctttgagcagactaatgggttagtttggtttgctgatagttcacacataaggaggcttgatgattgccgtgctgaactccacaatctcttgaaagaagagagactagttggagcttcattgttgatttttgcaaataagcaagacatgcaaggagctctaaaaccaactggaatcgcgaagagtcactctccgacagctcatcgccgcttggttctcccgccggtacacaaggtttaagaagcgctccgcggacttccacggccgcgctgccgatctcgtccacagcctccggggcacggcgatgcccaggagacaggccctcgaggaagagcaatgtagagaagagaaaggtatctcgactgttccaaagcacaagtatgcatccaaagcctgttccccaaaaggtgcgtgaactttgttcttgattttgtcagactaaatgtgggtgaactttgtactgcagtttttgtttaaataaactttggactgtttaaattactgatgcatccaaccactgtttttctttactgtttgttgatacacgaccagatgcccagttgagttcacccaaaaggtttattacaccacgaaaaaatctgagatgaaatgatttttatttaaatgaactttgtactgcagtatttacagacatattttggcacccgatcgattactgtttttgttttactaatagctgctgctattactatcttttgggtgaagtgaatcagatttttgtttaaatgaactttgtactgtttaaattattgatgcatagttttgaagacttaaacaatatgctgcatgaaaatctttactttattcacaacacacctgagatggactgggcttgggcagctaaccggttaattgagaaggatgaggcataaactccagacgatgctcctttaaattatttgccgcagaagaggctaattttgacaagccagttgatccagcaacttctccctgctataccagcgaccattttgagaggacaagctgtgtctacttacggaagtgcgacatacactctatcaatgttgacactaagggatgcatgcagcatggtagcatcattatcatcatcatataactcttgctcacctgtggaggatgaaaataacccatctgaacaaacaagtgctaagaaaatggaagacagagtatcaaaggttgtggaagtcttcgctggaagaatccagaagatggaaaatgactttataagtttgaacaagagggcctcgactaatcggacgactggacgattagtcgacctaatcgggtcggatgccctggtcgttccactaaaaccgactagaccgactaatcgcgattaatcgcgattagtcggacgacttgaaatcattgatcagtgattccctcacggttgtgtccttcacaaaggaaggatgtgaagccacactattatcaagcaacaaagccaaagttgtgtgacacaattataacaaaggaatcatcacccattagcacactaaaattggcgcatacagataacgcacctgcaaagtgggatcatttgaacatagttcagcaaagggccgacgcacttgagtcactcctcaagctctacgcaaagcttctggaggagaggctcgatgagctcgccgacgtttttcgaccatttggtgagagagctgtgtcatccggagagatgagcatacaatgatgtctgaccataagcctgatgactccaccgaagttttgagagtccccaacaatgcttttgtagcagcgattcgtttcaacatttttttgtttttcaaataccatttcgagagtgtaaataacttcaacggaattcaaaattgatgtacttaggtaggcctgagccctgtttatttttgatgtatatggtttgcatgtcaccaactgttgtgagcgatgattgattatttatcgtcttgttttatctgtctgtactcctttaatgcagcaccttcgtttgtcatgtgtcgtctcccctgtaagatgttgattaatattcattatatcattgtttattttttagcaatgaa

SEQ ID NO: 202719 - DNA, 616 bp, Zea Mays
  misc_feature (616)..(616): n is a, c, g, or t
gagcactgcattgcggtctgcgcttacaaatgtgttgtctttgggcatgggtcgtgctgtctttgctggattattctacgattttagatttgcagctttgggtccgatacagtgctcatcaaggctcactaaatggagtctcacaatggcgaggccaatgacttgcctccaccacctcctctgattgctggtgttgaaccacttaaagctgatgaaacaaagatgccattgaaacctaggagtctggtccagagaaatggatttggcagaaaggggcagccaataaagctgataacaaatcacttcaaagtttctcttgtgaatgctgaagaatttttctaccattactatgtcaatttgaagtatgaagatgatacaccggttgatcgcaaagggtcaggaaggaaagtgattgaaaaactgcagcaaacttatgctgctgaacttgcaaataaagattttgcctatgatggtgagaagagcctgttcacaattggtgctcttcctcaagttaaaaatgagtttactgtcgtggttgaagatttttcaactggaaagactcctgcaaacggcagtccaggaaatgacagtcctcccggaagtgaccggaaaaggn

SEQ ID NO: 202720 - DNA, 617 bp, Zea Mays
aaaatagcaaatttctcagatgatgtcgttattctggagcagcggagccgagccctggcccaacatcgtcccacaggaagcggcggtggcgaaggtgttcgggtctaggtccgtggagcgctacgggccgcgcctcaccctgctggaagctaccatgaggaccgacgatgccggtggcagcgccttcgtgaagctcgtgaagcaagggagcgccgccctcctcaacgcctacgcgaggagagggttccctttcgactcctgggaggtgaaggccctgctgctggaggcgctggtgtccgaggatgccgctgtggtccaggcggagcggtttgagcaggccaacgagtcctgcgtttgatcttcgatggatgaagatgcaacgatggtgccgctgtagtatcgtgttcctggttggtcaccacttctgtgactttggcgttgaggtttctgaagccgcaactctgtccaagtcggcatgtttctctagatgccgggctttgtgtaatgctgtgtgcactgatgtgtagtaggttgtaatctacggaccgtgattttttttttactatttcaatggtaatggaagttctatgttgtcgcacgcaccgtcgtgttcgtca

SEQ ID NO: 202721 - DNA, 892 bp, Zea Mays
gtgttcaggagaacaaggaaggacttgagctcttgaaaactgcaattgagaaggctggatacactggcaaggttgtcatcggaatggatgttgctgcttcggagttttacagtgacaaggaccaaacctatgacctcaactttaaggaggagaataatgatggttcacagaagatatctggcgatagcttaaagaatgtatacaaatcttttgtgagcgaataccccattgtttcgattgaagatccttttgaccaggatgactgggttcactatgctaagatgactgaagaaattggagagcaagtgcagattgttggtgatgaccttctcgtcaccaaccccactagggttgctaaggctatcaaggagaaatcatgcaatgcccttctgctcaaggttaaccaaatcggatctgtgactgagagtattgaggctgtgaagatgtcaaagcgtgcgggctggggtgtgatgactagtcataggagtggtgagactgaggacactttcattgctgatctggcagttggtttgtccacgggtcagattaagactggagcaccctgcagatcagagcgtcttgccaaatacaaccagcttcttaggattgaagaagagcttggcgctattgctgtctacgcaggtgccaaattccgtgcacctgtggagccctactaaacgggcgggatgcaagtgcttttatgtctgcacaagtcctgtgaaactgtttactgcgacctgcagattttactcttggagtgccctgagtagattttagcaataatatccaacatgtaacatgttacggacatgtacccaaacgtgatccagttttagttaatgtgctccatgcttgacgtttttaaaaaataagaatcccttagaaaaataaa

SEQ ID NO: 202722 - DNA, 1979 bp, Zea Mays
atgccattccgtggtcccgaacgacgccctcgctcgtgcactctctggtctctttctcttcgcctgaccctgagcacagcgccacagacacaacaacctcggactcgggagtacgtgtagctaggcccgatcggtcgagactgagtgcctgccgtgccgagacaggatgaccaaagccaaactggccttctggctcggatggattgctctcctgcaaggctgcatggtgaaatcatctctcccgtacgagtacgactactctgcaagcatcgagtgcttgccggagccgctggagccgcagtacggcgggggcgtcctccgcaacgccgacttcagcgcgggcctgcggggctggtccgccttcggctacggcagcatcgccgagagcacgtcggcggcgggcaacgggttcgccgtcgcgctcaaccggacgcggccgtaccagagcgtcagccagaaggtgtacctgcaggccgacacgcactacaccctctccgcgtggttgcaggtcagcgacggaggcgccgacgtgcgggccgtcgtcaagaccgtcggtgacttcgtccacgccggcggcggcgtcgccaaggccgggtgctggtccatgctcaagggcggcctcaccgccgcgtcttcgggtcctgccgagctctacttcgagagcaacgctacggtggacctgtgggtggacagcgtctcgctcaagcccttctccaaggacgagtggacggcgcaccgcgccgagtccgtgtccgcggcgcgcaagaaggcggtgaggctccaggcgacggactccgcggggaatccgctggagggcgcggcggtgtccctggacgcggtccggaccaacttcccgctgggcgcggccgtgagccggtacatcctcaccaactcggcgtaccagacgtggttcgcgtcccggttcgcggtggccaccttcgagaacgagatgaagtggtacagcacggagcctgcgccgggccaagaggactacacggtcccggacgccatgatggcgttcgccaagtccaacggcatcgccgtgcgcggccacaacgtgttctgggaccagcccagccagcagccccggtgggtgcagtcgctgccgtacccgcagctgctggcggcggcgtcgcgccgcatccgctccgtagtgtcgcgctacgccggccaggtcatcggctgggacgtcgtcaacgagaacctgcacttcaacttctacgagggccgcttcggctgggacgcgtccaccgccttctacgccgccgcgcgcctgctggacgccggctccgcgctcatgttcatgaacgagttcaacaccgtggagcagccgggcgacatggccgcgctgccggcgaggtacctgcagcgcctgcagcagatcatcgccgcctacccggagaacggcgccgggatggccatcggcctcgagggccacttcaccaccaaccccaacatcccgtacatgcgcgccgccctcgacaccctcgcccaggccggcatccccgtctggctcaccgaggggtgctacgtcatgtgcctcaccgacaacagcttcaacaacctgccgcagggggacgtcgtggaccgcctcatcgccgagtggcgggcgactccgcgggccggctccacggacgcgcagggctacttcgaggccgagctcgtccacggcgagtataaggtcaccgtcagccacccggcgctcaacagctccatctcccggagcgtcaaggtggagctgggctcagggagtgaccactacttcattgacatgcaggtctagaccaactggttcatcagttgctaggtgtaatgtaatgtaagattacctgctgttgtcacagaactgtgaaagcttagaagcttagtcattcgtgtgtaccagttttcaccttggataattgcaacggaaggcaaaggagaacaccgtttttaatcccgatctccaagattattccaaagtaaaatgttccattttc

SEQ ID NO: 202723 - DNA, 1253 bp, Zea Mays
ggattatcctcttcaacctcctgggtaactaaaaattccccggcatctcgtgctgtcttctctctctcctttccccttccccggctccccgcggcccgcaccgctgtgttgtgctggttggttccgtcgcgtcgcttgcttagatcagatctctccttctctccccggatcccgactgcctccctcccccttccacctcaggctagccgagagagatctcggcaccgccgcccgttgccatggcggcggccaacgcccccatcgccatgcgcgaggcgctcacgttcgtcaccttcacccacgtcaccatggagtcggagaagtacatctgcgtccgcgagacctccccgcagaacagcgtcgtcatcatcgacatggccatgcccatgcagccgctccgacggcccatcaccgccgactccgccctcatgaaccccaacaccaggatcctcgccctcaaagcccaaatacctggaacaacacaggatcacctccaaatattcaacatcgaggctaagactaaggtcaagtcccaccagatgccggagcaggttgtattctggaaatggatcactcccaaattgttgggtttagtgacacaaacatctgtttaccactggtcgattgaaggtgattctgagcccttgaagatgtttgataggacagctaatctggcaaacaatcagatcatcaactatcgatgtgacccagcggagaagtggcttgtacttattggaattgcacctggagccccagagaggccacaactggtgaagggaaatatgcaacttttttctgtcgatcaacagcgtagccaggcacttgaagcccacgcagcatcttttgcaacatttaaggttgttggtaatgagaatccatcaactcttatttgtttcgcctcaaagacaactaatgctggacagatcacttcaaagttgcatgttattgaactgggtgcacagccagggaaacctggtttttctaagaaacaagccgacctcttcttccccccagatttccaggatgattttcctgtagctatgcaggtttcacaaaagtatgggcttatctatgtaattactaagcttggccttttgtttgtatatgacttggaaactgccgcggcagtttacagaaatagaatcagtccagaccctatattcttgacggcggaatcttcctctactggtggattttatgccatcaacagaagagggcaggttttacatgccacagttaatgatgcaactgtt

SEQ ID NO: 202724 - DNA, 3593 bp, Zea Mays
gagcaattggagctcgaactggagatgcgtagagagttaagggagtagatgctgcaactcttgtggcctacgctcgagctgaagccagattagtggtggctacttggagtagacatgaagaaaaggtcaacatgctatacctatttggagaatatgttctaagcgcagatgctaaaggtaatgtattcatgtgggccttcagaggagcagaaccaaacattgaaccagttggaagcatatcattaggagacaagttcaccccaacgtgtatcatgcatcctgatacttatctgaataaggtaattgttggtagcgaagaaggcttcttgcagctgtggaatatcagcacaaaaaagaaactgtatgatttcaatggttggaactcacctgttcggtgttgtgtctcttctcctgtcctggatgtagttgctgtcggatgttctgatgggtcagttcatgttcataatatgattgccaaggtcgcagttgtgttccatgatgtgaatgtggcacattcttcacatcagtatgttgccactggaatgccgacaaaggcagctctaaagatcagtgtcgaaactccagttgattgtgcaactgttgttgtccaaggagtcttaaatgcagatgctgaaagtgaaaagctatggaagaaaaaagatgtaattcaaaagtaagtgcacttgtcttcttaggtccatttttaacagtgaatattttcatgtttcaatgttgttcaatattatctataacatatctgttatagtacacggaggctacaaaatgcactggcacataaaattaatcatgtcaaacacatccacacaatctatctccaaaattcaatcaacaatatatagtgtacatagtttactgaagaatgtaaggtttagtgggaagggagacaggaatactaagaaatccagactcaaagaaacagggaaaagaaaaaggatgcagagtttacaacgagtaaactcgagcgcttttattcggagatgatgcagagctctctgtggggttatccaaagttaatatatgtgttttgtttaatttatgcccttattagtcattcttttgaaattactacctctactcttttttcatttgatgctttggaaattgacatggtctttaaagcatatcttcagtttctactttctctaagcatttgttgttaaaccctaacgagaatgtagtcatctagaaatgtttgacattacaaatctactaatgttatttctatgtcgaaaataatgattttttgtctgaatcatctctatctctactccttcgtgctggacgacgaggactcgttcgtgtggcccgcgatgacggacctgtcgttccctctcctggaggttggaggaagaggtgggtgggggacgcgaggcctctttctaccctgctgctgcacaaacccacgagagaatgtttggacgcgactggaagaagatcgaggagcatgtcggcaccaagacgacggtccagatacggagccacgcccagaaatacttcctcaaggtccagaagcttgggctggctgctgggctgccgccgatgtacccgaggcaccacttcgccatgcagcagcagcagcagagctcggtggccggtggtagcagcgcggccgccatgccgctgctacacggccggcaacctacttgtgcgtcggtcgccatgccaggtctggccgagcccgacgccgttgcccatcacggttccatcggctggagcagccccagtgtggtcgtccccgcggccagcagcgccgcaagtggtagccagttcatcggggcgccgagcttgtgcgacaccagcatagactgggctggcggcggcggcggcagcggtagcccaagtgaagcgccagcgatgggcgccgtgcaggactaacagcagatcgagctcccgttgtcacccgaggacgtgtcgtttgcgcaggtgtacaggttcgtcggcgacatgttcgacgcggacgcgccggtcccggtggaagcccacctgcagaagctgaaggagatggacaacatcacaaccaagacagtcctgctggtgctgcggaacctcgagaacaacctgtcggcgccccagttcgagcctgtgagaaggctgctatcgatgtatgatccgacaagagccctgtttggccagttgtagagcgcaaacaccttgagacaagctggcaagtgggagctgcagcctgcagctaacacgcacggatggacggacgttttttttctctagttgtttgttcgacgaacgaggcaaggaggaggctgaaacgcagcagaatagatgggttacacagacaccgatgcgcctggtttttctggagcaagccataacacattcttttgccgtatctagataaaagcctaatccataaagaatacttacgtttaccaattactcccatgtaccgattgttaaggagtggagtagtacacgtccttctagcgtcttttctttctttttcttttttggggtaaaattcgcgttgtctattcagatggaacttacgagattgtccgatacaagcaaggtgtgtgtctggtcatctgaatctgttttggcaacaaggatccacgtctgaactggacaggcgtgtgccagaacaacaatgaatcaatttgcgcacatttttcacaccaaacttgttcggtgagcttgatcgactctccactccagacgcattcaacatgtgccgtattgctcgaccagaaccaggatgtctgatgctaggggggactgtatcaaagcgttgttctggtcctggccctgttgggaaggcaatcaagctgaacgaagagaaaacagaggccctgcagctggaaaaggcatgtgttgtcgcttccctgattcaggtcatcaacacacaaaaagcgtcgggcgttcggcgaagattgtattatgggcccgttcctatcatgggccgaactaatctggatgctgggaccgatttggttgccaaaacccaaaagtacccacttagcaatttcaaggatgacatgttacactttaggaaaaaattggctgctatattactattttcagatataaacaagagaaaggggtgtccgttatataagtatgacaaagaagtcgatgctggaagctcctctgatgttcagatattagatagtcccacaaatcctaagaagatgaaactactttgtgtatcttaagatagcgaagtattgatggaagatgatgatggccccatcactcaagcagacttagaaaggtggtttgttcatgattgggataaaagaactcctataaaaatatcgatcgatgagtgcactaatgaatttttactgagtggcctttccacaaaggaaatgccagtgaccaaagccgatttaatagatgttctatgtgattacatcatgacaattcaagatgatatgacattagagtaagtgcttattattttatctattttataggtaccaactacgtagagttttgatatagacttttgtcatgctgcattacaggataacatggatgcgaagtttcaacccttttaagatagaaatatccgtcaaaaacctgcaaaacgtattaagggtaaatctagatatgac

SEQ ID NO: 202725 - DNA, 1007 bp, Zea Mays
tttaacaaaacccaggcctcaatcctatatactgcaacgatgaacctcacgatacgccacatggctcaaattaatatctttattcgttttttctacctacacccccaatccaggccgcacggcttcgatcgacaaatgccgtttgctagctggtggtttcttctcctttcagggcacctagaagcgacaatgctgcagaagttgcagctgcgaagagaagcttatcagttttatcatcaagaaccgatttcacaagggtcaggcgtcctgctagatttacttgctttcctcttcttcggcctactgaagcagccacaccagaactctttaattcttcatgcttttacggatctggtttgttcatatgtccgagtgaatcttcttttatctagcaaggtaaacaggcagggcaacatatctagaatggctgacatgtacctgaccggacggtcattacacgctaagaacaataatgtgcgagctactgaatttacaatcaagcaagggtggttgcatactggtgatattggatactttgatgaggggggtcagcttttcgtagttgatagacttaaagaactgattaagtacaaaggttttcagattgcacctgccgagcttgaagggctacttctgtctcatctagaaattatggatgctgttgttatcccgttacccaatgctaaagctggtgaagttcctattgcctacatcgtaaggtcccccgacagttctttgactgaagttgatgttcagaaatttattgaaaagcaggttacgaccacgagtcctacagggacacacaaattagccaatccaaaaggagaggtggccacagcaagagctgccgcagcatgtaacaccataatggtaactttctgttttttatgcgagtgatgaaggggtgtctctggtgatgtattctaagtttctaattttcaactttatttttcttctgagtttgacatataaatagaaaaaaattgcctgaggaagatatgttagct

SEQ ID NO: 202726 - DNA, 4237 bp, Zea Mays
cgcgccactcgacatctcaacccacactggcccactcctgtcttgaacatctcccgtccccatcgtcctcgtcgcatccagcactctgcactcatgcgtttcctcccctcctaagccaaaccccgaatcctccgtcgcccagcagccgccggtgacggcgacgctgggcaatggggactgaggtagcagccgtagtggatctccgggcgctgacacagtcggatctcgtggccctagctgccgcatcgccctacgccgtcgactcccgccggggccggcgccggcgccgcgatagcgagttcctctctcccccgaagatcgaccgcgccgttttcaacgagagcgcaggttcccgcaaacaaaccttctcccgtcgccgcgtcgccaccaacatatcccacaaactaacgcccaccaccaccggggcctcctccttatctacgccagctgcccccaccgaggaggaccccgacaaccgcctcattgtgttctacctccaacgcctcttcgcgcgtgacgacccctcgtaccctgctccgcctacgattccaccccgaccgcaaaccctagccgcgcccgcgataacagcacctgcaccgcccgcgccgtctctgccgccgccgtctgctgcggcggcagaccccgatagggtagtgctgaatccaaagggtttggtggttgacctggtgagactcgccgatcttgtggatccgtatggggaagagctacgtcagcgtacggcaggattggggtcagagtccgagctgctgggattcatgaacgcgctggaagggcaatggggaagccggaggcgtcggaggaagtttgtgaatgctggcatgttcggtgaccacctgccctgtgggtggaaactgctgcttgggctcaagcgaaaggagcgtgtcgcatggattaattgccgccgttatgtgagccccaaaggacatcagtttgctacttgcaaagaagtatcttcctacctcttgtcccttcttggatatcaggaggcaaagccaactgcctctcagattaacaatgcaggagtgcatgacctacatgttaattctgtaggtcttcaccagcaaaccatctcaattgaggaaaagcaaattgcagtgccagttaattcagttgcattgtttaattcctctggtgattctcatcaacaaaaacttcagaaggatgaagctccaatagaagtgaatgcaaaggagtgccggaaatgcaatttgacgtttcatgaccagagcgcctatatgcaacatcagttgtcctttcaccaaaggaaagctaaaaggcgcagggttagtaaatctggagaattgggtaccaacatagatggaaactacgagaagactcagcagaagacctctggagaggtatctggcaattttggccacagcgctgcaaatgtaaggtatgaaggtctgagtccagcagaactgttagatggtcgaccatccttgatggcagtgccatgtggatctcaggagatcactatcttgcctcaacagggaaaagaaccttgtgtgttgcctcaacagggaaaagaaccgtctgtgttgcctcaaccgggaaaagaaccgtctgtgttgcctcaacagggaaaagaaccttctatgttgcctcaacaggggaaagaaccttctgtgttgcctcaacagggaaaagaaccttctgtgttgcctcaacagggaaaagaaccttctgagttgcctcagcagggaaaagaatcttcaggagatatctctgtgaatcagaaggaccctcttaaggagatgaatggctttcctgaacaggaaaaaggacttgttgctggagaacttgtctctgcacatcataaggaccctctaatggatattacagatgcatttgaaatgataaaaaaacatcctgccagagagccttcctctgggcatcatctggatactgtcgacaattctgatgatcataaaacccacgatgaagcatgtgacaatgttgtaacttctctttctattgatgctgaaaggaaattgggtgtttgcaactccatgaatgttcatgagaatatcagcttaaaagatccagaactttccaatgcagattattcccaaaagttcaataggtctgatgaaacttgtgatgtacataaagaggtttcttcaactgtgaatgatcctgatgaaagaaaatgcacagatgattcaacgaggtgtactaatatgtcctgtgatctactgcatggcaaaattgtcagttctcctgaagaacatgattttagtaaccagctagaaagtaacccactttcagtatctaggaatgagcctgatcttaattcaattggtacggaagtggatggtggcaatataacttgcaatgcggaaaaccccagaagcttcaaaagtgagaaatctgctgagctcaagattatggattgcgaaatgacttcttttaaagacagtgaaataaaaaatgatgtcagagtaagggatgtaaatctcaattcatgtttggattcaatatcttctcctatttctggtggaaacaatgaaacatctgatactcctgatgatgctattcgatcatccattatcgcccaatgcttcggtactacctctaatgatgacacggcttgtaaggatggaaactttgccaaccagaacgacacctgtaagggtgaaaattttgtcaaccagaaaaatgtcacaatgtaccaatctaatttgaccatggaacctatacctcgagctcaaataaatgtggattgtttcacttcttcctgttcaatgactcctgaaatcaaggactatggcaacagaggtgaagatcgtgcgaaagaagcactagtgaactcacaaaacatgacaagtaatgaaactggttttgatgctgaagcttataacagtgatatcttcaatggtactatcacagaaagtagtcttgcccagttgagtaatgtcattagtatgaaaaatgcttttgcaaactgttactcattatctgacctaaacacacttactggtggtactgcaactgatgatattgatatgcacaatattaggagttcttttgtcagctctaccagtcgcactgaaccaaatgagcactgcacgttggattttgatatcaagggttccatgcttgaggcattggaaaaatctgacagtgacttagataatcaatacaatgatgcaggcccttcttgtgactcactacctgctactgggacaagtgggactattgatgattttatgtccatgcaaaccaattttggtagctttacttctttggttcgtgctgttgaagatgttccactgagcaggattattcaagatcagatgtatccaagctttgagcaacagctaaggatggcctcggctggagctccgccttatgggaccatcggcaggcatgaccctatacctgtaccagagccaacattgatgctaggttatgcaccgcagctaggtaactgcccccctccgttccagttgggctggggtccgtcttattcgaagatggttggcatgctccaatctgtgtgcgtgtggtgcaatagcccattccagcatttcggcaccgtcgctgagcagcaggcagattcacttggttacatttgcccgtcgtgcaagggaaagttttctggtcatcttggcatcaacggtccatctatttgaaatcagtttcttgtaacctgaactggtgctgctgccccaccatcaatttatagtctagttgatatgaatcgttttgtacttgtagtatgtatcctttaactcgtggctagtggtggaaacaggtttattcgaatcttacatttttggttattaaaactcaaccatcaagcagttgttgcgaacaaggaagctaagttgttggatacatacaagactgtgctctcaagagatactggtgggtactctgctgaagaaaagaccaattggcctgaagactaaattgtccatcttcaattgcaccaagagaaaggatctccattgcactggtggctggtgcatgtttgaggcttggatgatggcagaagtgtcatgtttttttatgttgaaccttgtttctaaatagtaagtctagacaattgttctgtttgaaatctgaatgaattgtggctggttgttggtggactggattacaggcaaaagtgtcatgttttttctatctttaaccttgtgtataatatagtaaaggacggatgattgctctatttgaaatatggagtaatggttgctagttgcctgac

SEQ ID NO: 202727 - DNA, 1713 bp, Zea Mays
cacacgtcctacactgcgagcgcgaggcaagaggagggggagaaggcgacgcggcgcgatcatgcgagcgacggcgggcgtttgagctaacccgcgccaccccccttcctcggagtcggagcgagtcgaggaacggctcgtctgcctctcccgttctccttcctctcctccccagaagatccgatccatcatcgaggactcgccgggaagaatcaaggatatatagataatatacaaacaaaggttcctccagagcccagagcaggagggaagtcaccggccgtcggcggggaggagatgtcggacggcgcgggctcccggacgggcgtcgctggcgcgctgggcctctcggtcacctcgtcggtggccatcgtcatctgcaacaagtacctcatcagcactctaggcttcttcttcgcgacgacgctgacgagctggcacctcatggtgaccttcttcacgctgtacgttgcgcagcggctgcgcttcttcgagccaaagccgatcgacgcgcgcaccgtcatctccttcggcctgctcaacggcatctccattggcctcctcaacctctgcctcgggttcaactctgttggcttctaccagatgaccaagctggccatcatacccttcaccatagtcttggaaaccctctttctgagcaagaagttcagccagagcatcaaggcctccctcatggttctgctgctgggagtcgggatcgcgtcggtcacggatctccagctcaacctcctcggctcgatcatcgccgtgctcaccatcgctgcgacatgcgtcgggcagattctgaccaaccaaatccagaggaggctgaaggtttcgtcgacgcagctgctgtaccagtcgtcgccgtaccagtccgcggtgctgctcgtcaccgggcctttcgtggacaagctcctcaccaagcgtgacgtcttcgcgttcagctacaccacccaagtcgtggtgttcatcctgctgtcgtgctcgatcgcggtgtgcgtaaacttcagcacgttcctggtgatcggcacgacgtcgcccgtgacgtaccaggtgctgggccacctcaagacgtgtttggtgctctccttcggctacatcatcctcaaagaccccttcagcgcgcgcaacgtggtgggcatcctcatcgccatcttcggcatgggcctctactcctactactccgtcgtcgagagcaggaagaagaccgaggacgctagctcgctgccggtcgccgcgcagatgagcgagaaggactcggcgccactcctcggcgccaagagctcgccgcggacagagaacaaggccgaggaaaccttcgactacatgccgaggacggccaagagcgcgttcaccggccggtgagcgcgtagcttgtaaggagtacgtatctttctagagttgtgggtagacgacgagcaacaaggcgggaatgtgttagtgaaagatgtaacggcggcaagtgacattccaattatcatttttgcgatttctcctctagggtggtctgcgtggtcatggtttaccagagcataaacagcagaatgtgtggtctactggtcttgaccgagcttgaaatagtagattggattggtgataatacaactatacaagacgtgcgaaatgtgtaaggtttgtgcccgttaggccatgttcgggtggggattagaggaaattaaaattccttctgttcaattttaaataaaaaat

SEQ ID NO: 202728 - DNA, 1909 bp, Zea Mays
atcagagagtaggactagggacttgtgtacactggtctggatggaatcataccgtggccctcgtggcctcgtgggtgggacaccacacgtcctacactgcgagcgcgaggcaagaggagggggagaaggcgacgcggcgcgatcatgcgagcgacggcgggcgtttgagctgttcgccacctacccctccctccttcctttcatttttctggaagacttcttcggcctcacgcatctcctcctccaatccaattcacaaacacacacgggcaatcaattagcagaacccgcgccaccccccttcctcggagtcggagcgagtcgaggaacggctcgtctgcctctcccgttctccttcctctcctccccagaagatccgatccatcatcgaggactcgccgggaagaatcaaggatatatagataatatacaaacaaaggttcctccagagcccagagcaggagggaagtcaccggccgtcggcggggaggagatgtcggacggcgcgggctcccggacgggcgtcgctggcgcgctgggcctctcggtcacctcgtcggtggccatcgtcatctgcaacaagtacctcatcagcactctaggcttcttcttcggtcacgacgacgctgacgagctggcacctcatggtgaccttcttcacgctgtacgttgcgcagcggctgcgcttcttcgagccaaagccgatcgacgcgcgcaccgtcatctccttcggcctgctcaacggcatctccattggcctcctcaacctctgcctcgggttcaactctgttggcttctaccagatgaccaagctggccatcatacccttcaccatagtcttggaaaccctctttctgagcaagaagttcagagcatcaaggcctccctcatggttctgctgctgggagtcgggatcgcgtcggtcacggatctccagctcaacctcctcggctcgatcatcgccgtgctcaccatcgctgcgacatgcgtcgggcagattctgaccaaccaaatccagaggaggctgaaggtttcgtcgacgcagctgctgtaccagtcgtcgccgtaccagtccgcggtgctgctcgtcaccgggcctttcgtggacaagctcctcaccaagcgtgacgtcttcgcgttcagctacaccacccaagtcgtggtgttcatcctgctgtcgtgctcgatcgcggtgtgcgtaaacttcagcacgttcctggtgatcggcacgacgtcgcccgtgacgtaccaggtgctgggccacctcaagacgtgtttggtgctctccttcggctacatcatcctcaaagaccccttcagcgcgcgcaacgtggtgggcatcctcatcgccatcttcggcatgggcctctactcctactactccgtcgtcgagagcaggaagaagaccgaggacgctagctcgctgccggtcgccgcgcagatgagcgagaaggactcggcgccactcctcggcgccaagagctcgccgcggacagagaacaaggccgaggaaaccttcgactacatgccgaggacggccaagagcgcgttcaccggccggtgagcgcgtagcttgtaaggagtacgtatctttctagagttgtgggtagacgacgagcaacaaggcgggaatgtgttagtgaaagatgtaacggcggcaagtgacattccaattatcatttttgcgatttctcctctagggtggtctgcgtggtcatggtttaccagagcataaacagcagaatgtgtggtctactggtcttgaccgagcttgaaatagtagattggattggtgataatacaactatacaagacgtgcgaaatgtgtaaggtttgtgcccgttaggccatgttcgggtggggattagaggaaattaaaattccttctgttcaattttaaataaaaaat

SEQ ID NO: 202729 - DNA, 2063 bp, Zea Mays
aaccggcccagcacgaaacgaaccaatcgcgtaccaccccctcccttccactcccatcgtcgtttctctctctccggcggctgcgcggcggcttggatcacatcctcgtcggagctaccatggctgggaagcttattgcaaacctgattgtcatgggctctacgattataggaagagctatgcttcaggcatatcgtaaagcacttgataatgcaaataaaactggtgtggcccatgaggcaataaacaatattcgtagagcaagcaaaacaatgaccgaacaggaagcgaggcagatactgggtgtctcagagaattcgacgtgggaagagatcgtacagcgatacgataacttgtttgaaaggaacggcaaatctgggagcttttacctccaatcgaaggttcaccgggccaaggagtgcctagaaacagtgtaccaaaagaacaaacaagatgagcctcctaactgaaatcccgccccttgagtctgctgttgacattcttttccccctcataagagaactgtacataccaacaacggtcgctgctgttgtaccagtagtatgcaatgcggaaccaataagctttgtgtgcagcgactgaaactcctacatgtcaggagggaagtcaccggccgtcggcggggaggagatgtcggacggcgcgggctcccggacgggcgtcgctggcgcgctgggcctctcggtcacctcgtcggtggccatcgtcatctgcaacaagtacctcatcagcactctaggcttcttcttcgcgacgacgctgacgagctggcacctcatggtgaccttcttcacgctgtacgttgcgcagcggctgcgcttcttcgagccaaagccgatcgacgcgcgcaccgtcatctccttcggcctgctcaacggcatctccattggcctcctcaacctctgcctcgggttcaactctgttggcttctaccagatgaccaagctggccatcatacccttcaccatagtcttggaaaccctctttctgagcaagaagttcagagcatcaaggcctccctcatggttctgctgctgggagtcgggatcgcgtcggtcacggatctccagctcaacctcctcggctcgatcatcgccgtgctcaccatcgctgcgacatgcgtcgggcagattctgaccaaccaaatccagaggaggctgaaggtttcgtcgacgcagctgctgtaccagtcgtcgccgtaccagtccgcggtgctgctcgtcaccgggcctttcgtggacaagctcctcaccaagcgtgacgtcttcgcgttcagctacaccacccaagtcgtggtgttcatcctgctgtcgtgctcgatcgcggtgtgcgtaaacttcagcacgttcctggtgatcggcacgacgtcgcccgtgacgtaccaggtgctgggccacctcaagacgtgtttggtgctctccttcggctacatcatcctcaaagaccccttcagcgcgcgcaacgtggtgggcatcctcatcgccatcttcggcatgggcctctactcctactactccgtcgtcgagagcaggaagaagaccgaggacgctagctcgctgccggtcgccgcgcagatgagcgagaaggactcggcgccactcctcggcgccaagagctcgccgcggacagagaacaaggccgaggaaaccttcgactacatgccgaggacggccaagagcgcgttcaccggccggtgagcgcgtagcttgtaaggagtacgtatctttctagagttgtgggtagacgacgagcaacaaggcgggaatgtgttagtgaaagatgtaacggcggcaagtgacattccaattatcatttttgcgatttctcctctagggtggtctgcgtggtcatggtttaccagagcataaacagcagaatgtgtggtctactggtcttgaccgagcttgaaatagtagattggattggtgataatacaactatacaagacgtgcgaaatgtgtaaggtttgtgcccgttaggccatgttcgggtggggattagaggaaattaaaattccttctgttcaattttaaataaaaaat

SEQ ID NO: 202730 - DNA, 1748 bp, Zea Mays
cggcactcgactccgcacgctgccagaccggcgacgagcggcggcggaagggagggacgggtcattggcgtgtgctccttggcagaaaatggcgatgatggtggatccccccaatggcatggcaagtcaaggaaagcattactatactatgtggcagacactgtttgagatcgacaccaagtacgtgccgatcaagcccatcggaagaggagcttacggaatcgtttgctcatctgttaaccgcgagaccaatgaaaaagtcgcgataaaaaagataaacaacgtctttgacaaccgtgtggatgcgctaaggacgctgagagagctgaaactccttcggcacctgaggcacgagaatgttattgctctcaaggacataatgatgcctgcgcatagaaggagcttcaaggacgtttacttggtttatgagctcatggacactgatctgcatcaaataattaagtcatctcaaccactatccaatgaccactgccagtatttcctttttcagctgctccgaggcctgaagtacctccattcagccgggatactccacagagacctaaagccagggaacctcctggtcaacgcaaactgtgacctgaagatatgcgacttcgggctcgcccgcacgaacaacaccaagggccagttcatgacggagtacgtggtgacccgctggtacagggcacccgagctgctgctctgctgcgacaactacggcacgtccattgacgtctggtctgtggggtgcatattcgcggagctgcttggccgcaagccgatcttcccaggaaccgagtgcctgaaccagctcaagctcatcgtcaacgtcctcggcaccatgggcgaggccgacctcgcgttcatcgacaacccgaaggcccgcaagtacatcaagtcccttccgtacgccccgggcgcccccttcaccggcatgtaccctcaggcgcaccctctcgccatcgacctgctgcagaagatgctcgtgttcgacccgtccaagaggatcagcgtcaccgaggcgctggagcacccgtacatgtctccgctctatgacccgagcgcgaaccctcccgcgcaggtgccgatcgacctcgacatcgacgagaacctcggcgtcgacatgatcagggagatgatgtggcaggagatgatccactaccaccccgaggtcctcacgagaatcagcatgtgagtatgtgatgtgaccagacaggcagcaatgaaacatgtggacagaggtctgctgcgccaggatcatcacatgttcgcccttcttacgagcttaactgcgattacggcaccgagtcgaggtatcactacatgtatcggaaccgtcaggcggtctcttgtgtaaatatgcgctgaataagatgtgtggcaatctcttgttttttggttgtacatggacctcgctgttgtacgagtctgtgaagtggaaccctggtactaagacctgtaatttcagaccctaatctgttgtatggaaatctgaaggccttgactcccatctgtttgtgtcacacccagatttaaaacctgtttgtatcacacccggatttaaaacccggaagaacatcacatacaatttgagataaatatcataaatgtcattattacataacaaaagtcttataagaggataaataataataaaacaaactaaatattattttctcggtgccacaaagctgactaggagacgccacctagatcaactcgtaagctttattgcagggcggctc

SEQ ID NO: 202731 - DNA, 1766 bp, Zea Mays
cttagctcggggagccgcgtccgactatggtggagtccaatcaacgctgcctgccgcgggaattggcgctccagtgaggtcattggcgtgtgctccttggcagaaaatggcgatgatggtggatccccccaatggcatggcaagtcaaggaaagcattactatactatgtggcagacactgtttgagatcgacaccaagtacgtgccgatcaagcccatcggaagaggagcttacggaatcgtttgctcatctgttaaccgcgagaccaatgaaaaagtcgcgataaaaaagataaacaacgtctttgacaaccgtgtggatgcgctaaggacgctgagagagctgaaactccttcggcacctgaggcacgagaatgttattgctctcaaggacataatgatgcctgcgcatagaaggagcttcaaggacgtttacttggtttatgagctcatggacactgatctgcatcaaataattaagtcatctcaaccactatccaatgaccactgccagtatttcctttttcagctgctccgaggcctgaagtacctccattcagccgggatactccacagagacctaaagccagggaacctcctggtcaacgcaaactgtgacctgaagatatgcgacttcgggctcgcccgcacgaacaacaccaagggccagttcatgacggagtacgtggtgacccgctggtacagggcacccgagctgctgctctgctgcgacaactacggcacgtccattgacgtctggtctgtggggtgcatattcgcggagctgcttggccgcaagccgatcttcccaggaaccgagtgcctgaaccagctcaagctcatcgtcaacgtcctcggcaccatgggcgaggccgacctcgcgttcatcgacaacccgaaggcccgcaagtacatcaagtcccttccgtacgccccgggcgcccccttcaccggcatgtaccctcaggcgcaccctctcgccatcgacctgctgcagaagatgctcgtgttcgacccgtccaagaggatcagcgtcaccgaggcgctggagcacccgtacatgtctccgctctatgacccgagcgcgaaccctcccgcgcaggtgccgatcgacctcgacatcgacgagaacctcggcgtcgacatgatcagggagatgatgtggcaggagatgatccactaccaccccgaggtcctcacgagaatcagcatgtgagtatgtgatgtgaccagacaggcagcaatgaaacatgtggacagaggtctgctgcgccaggatcatcacatgttcgcccttcttacgagcttaactgcgattacggcaccgagtcgaggtatcactacatgtatcggaaccgtcaggcggtctcttgtgtaaatatgcgctgaataagatgtgtggcaatctcttgttttttggttgtacatggacctcgctgttgtacgagtctgtgaagtggaaccctggtactaagacctgtaatttcagaccctaatctgttgtatggaaatctgaaggccttgactcccatctgtttgtgtcacacccagatttaaaacctgtttgtatcacacccggatttaaaacccggaagaacatcacatacaatttgagataaatatcataaatgtcattattacataacaaaagtcttataagaggataaataataataaaacaaactaaatattattttctcggtgccacaaagctgactaggagacgccacctagatcaactcgtaagctttattgcagggcggctc

SEQ ID NO: 202732 - DNA, 1099 bp, Zea Mays
gcccttctgagtctgccgtaccttcgatggaagagatttgctgttgttgcagcactgtgcatattagcagttcgtgcagtgattgttcagctggccttttttctccacattcagacttttgttttcaggagaccggcagtgttttctaggccattattatttgcaactggatttatgacgttcttctctgttgtaatagcactattcaaggatatacctgacatcgaaggggaccgcatattcgggatccgatccttcagcgtccggttagggcaaaagaaggtcttttggatctgcgttggcttgcttgagatggcctacagcgttgcgatactgatgggagctacctcttcctgtttgtggagcaaaacagcaaccatcgctggccattccatacttgccgcgatcctatggagctgcgcgcgatcggtggacttgacgagcaaagccgcaataacgtccttctacatgttcatctggaagctgttctacgcggagtacctgctcatccctctggtgcggtgagcgcgaggcgaggtggtggcagacggatcggcgtcggcggggcggcaaacaactccacgggagaacttgagtgccggaagtaaactcccgtttgaaagttgaagcgtgcaccaccggcaccgggcagagagagacacggtggctggatggatacggatggcccccccaataaattcccccgtgcatggtaccccacgctgcttgatgatatcccatgtgtccgggtgaccggacctgatcgtctctagagagattggttgcacaacgtccaacatagcccgtaggtattgctaccactgctagtatgatactccttcctagtccttgccagcaccagtgacccaaacttggtcggctgagctcagcgctcagcagctttacgtgcatctgcgccttgacttgtgcagtgggcgtcgctagcatgaatgatgtatggtgcgtcacggcctgacggttcgtcagtctgggccgtgttttgtgtccgaggaagatcgtctgtcagagatctggattgcctcgctgctagatgcgttgcggtggccggtgggtgaatttgtgcggctctgcatcgtag

SEQ ID NO: 202733 - DNA, 1736 bp, Zea Mays
aagaccgcgatgcttgtgatgcgcgaatcattttctaccaccatgttgttccatacaacgaaatggtgaaggacgaatttgcttttctagccaaaggacccaaggtcctaccttgcatcaccatcagaaattcttcgaatggaaatcctcctattgtaggatatcacatcggtcattaaatacttctgttaatgcttcggggcaacagctgcagtctgaacctgaaacacatgattctacaaccatctggagggcaatatcatcttctctagatgcattttacagattttcccggccacatactgtcataggaacagcattaagcatagtctcagtttcccttctagctgtccagagcttgtctgatatatcacctttgttcctcactggtttgctggaggcagtggtagctgcccttttcatgaatatctatattgttggactgaaccagttattcgacattgagatagacaaggttaacaagccaactcttccattggcatctggggaatacacccttgcaactggggttgcaatagtttcggtctttgccgctatgagctttggccttggatgggctgttggatcacaacctctgttttgggctcttttcataagctttgttcttgggactgcatattcaatcaatctgccgtaccttcgatggaagagatttgctgttgttgcagcactgtgcatattagcagttcgtgcagtgattgttcagctggccttttttctccacattcagacttttgttttcaggagaccggcagtgttttctaggccattattatttgcaactggatttatgacgttcttctctgttgtaatagcactattcaaggatatacctgacatcgaaggggaccgcatattcgggatccgatccttcagcgtccggttagggcaaaagaaggtcttttggatctgcgttggcttgcttgagatggcctacagcgttgcgatactgatgggagctacctcttcctgtttgtggagcaaaacagcaaccatcgctggccattccatacttgccgcgatcctatggagctgcgcgcgatcggtggacttgacgagcaaagccgcaataacgtccttctacatgttcatctggaagctgttctacgcggagtacctgctcatccctctggtgcggtgagcgcgaggcgaggtggtggcagacggatcggcgtcggcggggcggcaaacaactccacgggagaacttgagtgccggaagtaaactcccgtttgaaagttgaagcgtgcaccaccggcaccgggcagagagagacacggtggctggatggatacggatggcccccccaataaattcccccgtgcatggtaccccacgctgcttgatgatatcccatgtgtccgggtgaccggacctgatcgtctctagagagattggttgcacaacgtccaacatagcccgtaggtattgctaccactgctagtatgatactccttcctagtccttgccagcaccagtgacccaaacttggtcggctgagctcagcgctcagcagctttacgtgcatctgcgccttgacttgtgcagtgggcgtcgctagcatgaatgatgtatggtgcgtcacggcctgacggttcgtcagtctgggccgtgttttgtgtccgaggaagatcgtctgtcagagatctggattgcctcgctgctagatgcgttgcggtggccggtgggtgaatttgtgcggctctgcatcgtag

SEQ ID NO: 202734 - DNA, 1941 bp, Zea Mays
cttcactcatcacttccacttatgtgcacacattgccgtgccgtgcggtgcgtgaaaggcacggggccgccggccggactcttctgacttggcaaccgccgcgcagcgcgacgagcgccacctgcttgctgccgcgtgcctgcgtgcgtgtgcgtccaccactgaccccgcgcccgcccgccgcccctgcccctccactccacttgctcactcgtcggctcgtcgcggcccgcttcccccccggccaagggatggacgcgcttcgcctacggccgtccctcctccccgtgcggcccggcgcggcccgcccgcgagatcattttctaccaccatgttgttccatacaacgaaatggtgaaggacgaatttgcttttctagccaaaggacccaaggtcctaccttgcatcaccatcagaaattcttcgaatggaaatcctcctattgtaggatatcacatcggtcattaaatacttctgttaatgcttcggggcaacagctgcagtctgaacctgaaacacatgattctacaaccatctggagggcaatatcatcttctctagatgcattttacagattttcccggccacatactgtcataggaacagcattaagcatagtctcagtttcccttctagctgtccagagcttgtctgatatatcacctttgttcctcactggtttgctggaggcagtggtagctgcccttttcatgaatatctatattgttggactgaaccagttattcgacattgagatagacaagagctttggccttggatgggctgttggatcacaacctctgttttgggctcttttcataagctttgttcttgggactgcatattcaatcaatctgccgtaccttcgatggaagagatttgctgttgttgcagcactgtgcatattagcagttcgtgcagtgattgttcagctggccttttttctccacattcagacttttgttttcaggagaccggcagtgttttctaggccattattatttgcaactggatttatgacgttcttctctgttgtaatagcactattcaaggatatacctgacatcgaaggggaccgcatattcgggatccgatccttcagcgtccggttagggcaaaagaaggtcttttggatctgcgttggcttgcttgagatggcctacagcgttgcgatactgatgggagctacctcttcctgtttgtggagcaaaacagcaaccatcgctggccattccatacttgccgcgatcctatggagctgcgcgcgatcggtggacttgacgagcaaagccgcaataacgtccttctacatgttcatctggaagctgttctacgcggagtacctgctcatccctctggtgcggtgagcgcgaggcgaggtggtggcagacggatcggcgtcggcggggcggcaaacaactccacgggagaacttgagtgccggaagtaaactcccgtttgaaagttgaagcgtgcaccaccggcaccgggcagagagagacacggtggctggatggatacggatggcccccccaataaattcccccgtgcatggtaccccacgctgcttgatgatatcccatgtgtccgggtgaccggacctgatcgtctctagagagattggttgcacaacgtccaacatagcccgtaggtattgctaccactgctagtatgatactccttcctagtccttgccagcaccagtgacccaaacttggtcggctgagctcagcgctcagcagctttacgtgcatctgcgccttgacttgtgcagtgggcgtcgctagcatgaatgatgtatggtgcgtcacggcctgacggttcgtcagtctgggccgtgttttgtgtccgaggaagatcgtctgtcagagatctggattgcctcgctgctagatgcgttgcggtggccggtgggtgaatttgtgcggctctgcatcgtag

SEQ ID NO: 202735 - DNA, 1598 bp, Zea Mays
cgacgttgctcctccattctctctcaagtctcgcctcattcttatctgcattgcccatccccgcactcctctcctcctagcgacccgatcacccacacgcgaacgccatgggagaagccctgataggcaggctggaggcggcggtatcccggctggaggcactcagcgctggggcgcgcggcggcctgtcctacactgcatcagcgcaggaggacccggcgatcgtggccttcgacgatcttatcgccagcgcgctcggcagagtgtccgcggccgccggcaagatcggggcggacgtcgcagaggtgacgagattggtggagaatgcgttcttggttgggaaagaccttcttgccaggaccagccagacacaaaaaccaacaatggagtcagtgacgacttttatggggcctctgaacgaagcgatcttggaggccaacgcattggtggagcggacgagctcgatctatgccaaccatctaaaagcagcagccggtagcctggccgctttggcatggattggttacaccggcaaaggctgcggtatgcctcttccgattgctcatgtagaagagagctggcaaatggcagagttctacagcaataaggtacttgtggaatacaaaaataaggaccctgatcatgtggagtgggcaaaagccctaaaagagctgtacattcccaatttacgtgactacgtgaagaggtattacccattgggtccttcgtggcaaccgccaggaagcgcagccaacaaggcaccttcagctccgtctgttcctcctccatgtctttccatctcttcagcctcgtcgtcccaaccaaaatctggaatgtcagctgtctttgctgaaatcagctctgggaaaccagtgacacaaggcctcaggaaggtaactgatgacatgaagagcaaaaatagaacagacagaacaggtgttgtggctgctgaaggaaaagagactcgcaattcacctccctttagttcaactaaaggtcctgctaaactggagctccaaatgggccgcaaatgggtagttgagcatcatgttgggaacaagagcttgaccattgaaggttgtgataccaaacagtcggtgtatgtatacggatgcaaggattgtgtgctgcaagtcaaagggaaagtgaacaacataacaatcgacaagtgcaccaaagtgggagtcttgttcaagggggttgtagcggcttgtgaaattgtgaactgtagcagtgcagaggtccaatgtgagggctcagttccgactatatcaatagacaacacatctggctgccaactttacttaagcaaggaatctttagaggcatctataacaacagctaaatcaagtgaaatcaatgctcttgttccagatgcaaacagtgacggtgactgggccgagcattccttgccccagcagtacattcacgcgttcaaagacggacaatttacgacatctccagtgtctcattctggggcttgattgtctgcacggctgccatttcttatttccttttgtttacatcagctagcttattacctgccatctggacttatattttgtagttagcaagaactcaggggcatcaacacgatg

SEQ ID NO: 202736 - DNA, 2714 bp, Zea Mays
ggcgcctcctctttaactctcctcgcctccgttaccgtcttccccctttccacctccccccaccccgctgtgctcatccatcgaccgcgacgagcccccgcccgccgattcgactacgtttattttttttatttcatttgatttgattgcaaagcaccgcagcagcaggaggaggggaagggagggatcgttggaccgtcgttcggctggatggtggaggcggttcgtcgatttgagggcaccgggtttcttggacctgcgtaggtaaaaaacaccagccccatttccctctcggccggcggatggacgcgagggaggtgtgaagcctggtcgctaactgatgctcgtggagagattcggaggagaggagcgcgccgtgcggaggcggtggaggaggaagcgccgacgatttggacagcgcagcgacggaaggggagcagcaggcggacgaggagcgagccgccaggaggacgacggccgccgccgccgccgccgccatgggcgagtcgctgctcaccgcgctctccatggacaccgccacagcccaccacccgcaccagggcccctccaccttcctctccatggacaccgcctcccacgacgacttcgacctcttcctccagccacaggggcccttccgccgctgcctacatgccgcggcggtcgccccccctgacatcaaccttcccctagccgccgacccgtctccgccacctctggcgtcgctcgacgccaacgttgacatgctagatgtcggcctcggcggctcgcagcactacgactcggattcgcccgctgccgctgggccagtctcggccccggcagcagcagcgaccaccatggtcgccgtgtcccacaccaagggctccggttccagtgctgcgcgcaagtgtgtcaagaggaatgttagcatctggggagcgtggttcttcttcacccactacttcaagccagtcatgtctgcggacaaggctggcaaagcgaaggcagccaccaccaccggcgggaacggcaatagcgccacactggacgctttcctggtgcagcacgacatggagaacatctacatgtgggtgtttaaggagcgtccggagaatgccctggggaagatgcagctgaggagcttcatgaatgggcactcacgccttggggagccacagttcccattcagcgcagacaaagggtttgtgcgctcacaccggatgcagcgcaagcactaccgtggcctctctaacccacagtgtcttcatgggatcgaaatcgtgagggcgccaaatttggcgggtgtacctgaggctgatttaaagaggtggatgcagctcactgggagggacgccaatttctcggtcccaactgaggcgagtgattttgagtcctggaggaatctgccgagcacagactttgagctcgagaggccagcaaccgcggctcctgcaaagagcagttcacatggacaccacaagaagttgctgaacggttctggccttaacctctcgacgcaaccatccaatcacagttctggggatggcatggagatcacagccacctgtaacaagcgcaggaaggattcctcaccgaccgcaatggaagaggactgcagcaattcgaattcggacaaggcccaagacatggatgtgatccacaccttcgagccatcatggatgaatgacttctcaggtgtgatgcgccatgcttctggaccagtaaccgctgcaaaaacaatatacgaggacagcaagggctacttgatcatcgttagcctgcctttcgctgattttcagaaggttggcggatcctgctcctgagcattgcccgccgggagagtttgtccgggagatcccactccctacccgaatccctgaagacgccactctggaagcgtactgcgatgaaacagggacagggctggagattattgtcccgaagttccgcgttggccctgaagaacacgaagtgcatgtgtccatgaggccaccctcgtcctggtgccaatgaaacctgtttccaagcttgcggggggagacacacatacggtgtggaggtttgccgtaaggctaaggctactgcacaacaaatgcagctcagttttgctaattttgatgggaaacagtccttgattgattgaagcattctggtagttggccgccgcagcgtttggaacattttaggaaatatgctacgggtcgcaaggaacatgcttgcattacttagttcttgtatggggatacacctagtgtgttacatttcgtttccgttgtgtcgaaagactggttgtctgctcgatgtgctgcaatccgtgcatcgcccacccgtcacgagcaacaatctgtttgtgttgtacacagaatggcaactggatgtataggggcatttatagtcattttccatagattgaggtttgctttgtgggcatcgtgtaaaattcgtctcagattgatggaaactaggaagaaaaagaagatggcagtgtctttaggatttggcgaagttgtaatggggattaggcggtgctgtagcattctgtctagtttccaggaatttgtagaagacaaatgtaaatctgttgttccgtcatcaatatagaaaagtggtctgtgtctaccagcaaatgccttgtgtacgatcttaaccatccagcacgttttgtgccgtactttaatgaggcagagcccacgggtgttgttgcgttctggtctcaactcatgagatcattc

SEQ ID NO: 202737 - DNA, 1866 bp, Zea Mays
atgggcaagaaattttcttatatctgtgaaggcagacctaagacaaattcgggtttattcatgcaatccctctttctgcattgtatcggtagatgctggcttcctggaagagcatatttctgaactgaacccactgcacacttaccgataatcctttttgtggtcacagctgaactattttccacttaattttgcgctatactacatttactatctgtatgagtgccaaccatacaagccgcagttcaatatttaggccccgtttcaatctcacgggataaactttagcttcctgctaaactttagctatatgaattgaggtgctaaagtttagtttcaatttccaccattagctctcctgtttagattacaaatgactaaaagtagctaaaaaaaagctgctaaagtttatctcgcgagattggaacagggccttacttgtctcttggtaaggcgcatatttgagccaatatctgttgcacgctggaactattctttaacacattaaatattttatccttttggaaacataggagtgcaggcaactgaaagatttcgttgttatggcgaagcaaaatggactgcagctcgtgcctgcacttgtcaaaaggatgctggataaaggcatgtttttgtttggctatatgaatttgatcgacgacaacggggacaagtaggtcgaggaattgatcgcattgcagaacaaacgagtaaaatttgcatgtgacaagttatttgcaaatatcaagcagaaagatatatgcacatgaacttggtcccttctcacaccatagaccctcaggccgcttctctcgtcaatacctcgacaacactcctcgccctcctcgcccttgcggtggccagtggactggcggccgacggcttggaccaccgtgtggacttgaatgggacaactggcgatatggttgattttcaatctacaggagatgcagggaatggcgcaaccatcaccgagatgggcaacccggttcctgagccatcctacgaggaagctgttctttcagtagaagaggctagattatggagtgttgatactgtgaattgcttagatttcgatgtctggaccacaattgttgaggagacggacaaaaatgttgagggtgatgactgatgagttcgagcttgacagcatcaagaaattgtcaagggagtatgcagaagcaaaggaactggcccttgcagcccctatcacctggacagaggaaagccaaactgtagaagttgaagatgctaagcacctccttcagagtgtgagaggctgttgggcgacaagatggacgaagtcgtcaaagaatgggatgtccagaaggactgaaggaggggttctaccagaggacaggattatcctcatcccctggcgaccagctcatggcggtcgacaacgatgaatcaggagctcaatgtcacgaggatggatcccgtggcgatcagctcatggcggtcgacaatgatgaatcgggagtacaggatcacgaggacgaccatgacgacggctttgccgagttagaactgctgctagagtgaagaacatctacaagtctgtaaactcttactaccgccgtatatccatgtaatcatcgcgcccagagatgaaatcctcgctcgtctttactaggctctcctttttagttgccagaccttctgttcatctacactggttgcagttactgtacattgaaatagtccagtgcgccagcctatgcagaggaggggaaaaaaagaggtgagcttgagtaaaaatgtagatgaacagtgacaagaaaaaacgctggttgcagtaactgtacatttgaaacggtagtgtgccagagtaaaaaaatgtagatggacagtgacgaaaaaaaa

SEQ ID NO: 202738 - DNA, 1934 bp, Zea Mays
atgggcaagaaattttcttatatctgtgaaggcagacctaagacaaattcgggtttattcatgcaatccctctttctgcattgtatcggtagatgctggcttcctggaagagcatatttctgaactgaacccactgcacacttaccgataatcctttttgtggtcacagctgaactattttccacttaattttgcgctatactacatttactatctgtatgagtgccaaccatacaagccgcagttcaatatttaggccccgtttcaatctcacgggataaactttagcttcctgctaaactttagctatatgaattgaggtgctaaagtttagtttcaatttccaccattagctctcctgtttagattacaaatgactaaaagtagctaaaaaaaagctgctaaagtttatctcgcgagattggaacagggccttacttgtctcttggtaaggcgcatatttgagccaatatctgttgcacgctggaactattctttaacacattaaatattttatccttttggaaacataggagtgcaggcaactgaaagatttcgttgttatggcgaagcaaaatggactgcagctcgtgcctgcacttgtcaaaaggatgctggataaaggcatgtttttgtttggctatatgaatttgatcgacgacaacggggacaagtaggtcgaggaattgatcgcattgcagaacaaacgagtaaaatttgcatgtgacaagttatttgcaaatatcaagcagaaagatatatgcacatgaacttggtcccttctcacaccatagaccctcaggccgcttctctcgtcaatacctcgacaacactcctcgccctcctcgcccttgcggtggccagtggactggcggccgacggcttggaccaccggtacaagatgtacaagcagacaagctcatcccgctgaacggcaacaatggcccctttcacaatcccagtgtggacttgaatgggacaactggcgatatggttgattttcaatctacaggagatgcagggaatggcgcaaccatcaccgagatgggcaacccggttcctgagccatcctacgaggaagctgttctttcagtagaagaggctagattatggagtgttgatactgtgaattgcttagatttcgatgtctggaccacaattgttgaggagacggacaaaaatgttgagggtgatgactgatgagttcgagcttgacagcatcaagaaattgtcaagggagtatgcagaagcaaaggaactggcccttgcagcccctatcacctggacagaggaaagccaaactgtagaagttgaagatgctaagcacctccttcagagtgtgagaggctgttgggcgacaagatggacgaagtcgtcaaagaatgggatgtccagaaggactgaaggaggggttctaccagaggacaggattatcctcatcccctggcgaccagctcatggcggtcgacaacgatgaatcaggagctcaatgtcacgaggatggatcccgtggcgatcagctcatggcggtcgacaatgatgaatcgggagtacaggatcacgaggacgaccatgacgacggctttgccgagttagaactgctgctagagtgaagaacatctacaagtctgtaaactcttactaccgccgtatatccatgtaatcatcgcgcccagagatgaaatcctcgctcgtctttactaggctctcctttttagttgccagaccttctgttcatctacactggttgcagttactgtacattgaaatagtccagtgcgccagcctatgcagaggaggggaaaaaaagaggtgagcttgagtaaaaatgtagatgaacagtgacaagaaaaaacgctggttgcagtaactgtacatttgaaacggtagtgtgccagagtaaaaaaatgtagatggacagtgacgaaaaaaaa

SEQ ID NO: 202739 - DNA, 2058 bp, Zea Mays
atgggcaagaaattttcttatatctgtgaaggcagacctaagacaaattcgggtttattcatgcaatccctctttctgcattgtatcggtagatgctggcttcctggaagagcatatttctgaactgaacccactgcacacttaccgataatcctttttgtggtcacagctgaactattttccacttaattttgcgctatactacatttactatctgtatgagtgccaaccatacaagccgcagttcaatatttaggccccgtttcaatctcacgggataaactttagcttcctgctaaactttagctatatgaattgaggtgctaaagtttagtttcaatttccaccattagctctcctgtttagattacaaatgactaaaagtagctaaaaaaaagctgctaaagtttatctcgcgagattggaacagggccttacttgtctcttggtaaggcgcatatttgagccaatatctgttgcacgctggaactattctttaacacattaaatattttatccttttggaaacataggagtgcaggcaactgaaagatttcgttgttatggcgaagcaaaatggactgcagctcgtgcctgcacttgtcaaaaggatgctggataaaggcatgtttttgtttggctatatgaatttgatcgacgacaacggggacaagtaggtcgaggaattgatcgcattgcagaacaaacgagtaaaatttgcatgtgacaagttatttgcaaatatcaagcagaaagatatatgcacatgaacttggtcccttctcacaccatagaccctcaggccgcttctctcgtcaatacctcgacaacactcctcgccctcctcgcccttgcggtggccagtggactggcggccgacggcttggaccaccggtacaagatgtacaagcagacaagctcatcccgctgaacggcaacaatggcccctttcacaatcccagtgtggacttgaatgggacaactggcgatatggttgattttcaatctacaggagatgcagggaatggcgcaaccatcaccgagatgggcaacccggttcctgagccatcctacgaggaagctgttctttcagtagaagaggctagattatggagtgttgatactgtgaattgcttagatttcgatgtctggaccacaattgttgaggagacggacaaaaatgttgagaggtgctggatagggcgtccgaaggggcgctgcctgatgtagcaacgtcacacctgttcaccgcacatgttctgacttttggcgagcggcaccacacatattcttatatctagggatgaaaacgggtgatgactgatgagttcgagcttgacagcatcaagaaattgtcaagggagtatgcagaagcaaaggaactggcccttgcagcccctatcacctggacagaggaaagccaaactgtagaagttgaagatgctaagcacctccttcagagtgtgagaggctgttgggcgacaagatggacgaagtcgtcaaagaatgggatgtccagaaggactgaaggaggggttctaccagaggacaggattatcctcatcccctggcgaccagctcatggcggtcgacaacgatgaatcaggagctcaatgtcacgaggatggatcccgtggcgatcagctcatggcggtcgacaatgatgaatcgggagtacaggatcacgaggacgaccatgacgacggctttgccgagttagaactgctgctagagtgaagaacatctacaagtctgtaaactcttactaccgccgtatatccatgtaatcatcgcgcccagagatgaaatcctcgctcgtctttactaggctctcctttttagttgccagaccttctgttcatctacactggttgcagttactgtacattgaaatagtccagtgcgccagcctatgcagaggaggggaaaaaaagaggtgagcttgagtaaaaatgtagatgaacagtgacaagaaaaaacgctggttgcagtaactgtacatttgaaacggtagtgtgccagagtaaaaaaatgtagatggacagtgacgaaaaaaaa

SEQ ID NO: 202740 - DNA, 2029 bp, Zea Mays
atgggcaagaaattttcttatatctgtgaaggcagacctaagacaaattcgggtttattcatgcaatccctctttctgcattgtatcggtagatgctggcttcctggaagagcatatttctgaactgaacccactgcacacttaccgataatcctttttgtggtcacagctgaactattttccacttaattttgcgctatactacatttactatctgtatgagtgccaaccatacaagccgcagttcaatatttaggccccgtttcaatctcacgggataaactttagcttcctgctaaactttagctatatgaattgaggtgctaaagtttagtttcaatttccaccattagctctcctgtttagattacaaatgactaaaagtagctaaaaaaaagctgctaaagtttatctcgcgagattggaacagggccttacttgtctcttggtaaggcgcatatttgagccaatatctgttgcacgctggaactattctttaacacattaaatattttatccttttggaaacataggagtgcaggcaactgaaagatttcgttgttatggcgaagcaaaatggactgcagctcgtgcctgcacttgtcaaaaggatgctggataaaggcatgtttttgtttggctatatgaatttgatcgacgacaacggggacaagtaggtcgaggaattgatcgcattgcagaacaaacgagtaaaatttgcatgtgacaagttatttgcaaatatcaagcagaaagatatatgcacatgaacttggtcccttctcacaccatagaccctcaggccgcttctctcgtcaatacctcgacaacactcctcgccctcctcgcccttgcggtggccagtggactggcggccgacggcttggaccaccggtacaagatgtacaagcagacaagctcatcccgctgaacggcaacaatggcccctttcacaatcccaggagatgcagggaatggcgcaaccatcaccgagatgggcaacccggttcctgagccatcctacgaggaagctgttctttcagtagaagaggctagattatggagtgttgatactgtgaattgcttagatttcgatgtctggaccacaattgttgaggagacggacaaaaatgttgagaggtgctggatagggcgtccgaaggggcgctgcctgatgtagcaacgtcacacctgttcaccgcacatgttctgacttttggcgagcggcaccacacatattcttatatctagggatgaaaacggtcggaaacagtatttattcgggtgatgactgatgagttcgagcttgacagcatcaagaaattgtcaagggagtatgcagaagcaaaggaactggcccttgcagcccctatcacctggacagaggaaagccaaactgtagaagttgaagatgctaagcacctccttcagagtgtgagaggctgttgggcgacaagatggacgaagtcgtcaaagaatgggatgtccagaaggactgaaggaggggttctaccagaggacaggattatcctcatcccctggcgaccagctcatggcggtcgacaacgatgaatcaggagctcaatgtcacgaggatggatcccgtggcgatcagctcatggcggtcgacaatgatgaatcgggagtacaggatcacgaggacgaccatgacgacggctttgccgagttagaactgctgctagagtgaagaacatctacaagtctgtaaactcttactaccgccgtatatccatgtaatcatcgcgcccagagatgaaatcctcgctcgtctttactaggctctcctttttagttgccagaccttctgttcatctacactggttgcagttactgtacattgaaatagtccagtgcgccagcctatgcagaggaggggaaaaaaagaggtgagcttgagtaaaaatgtagatgaacagtgacaagaaaaaacgctggttgcagtaactgtacatttgaaacggtagtgtgccagagtaaaaaaatgtagatggacagtgacgaaaaaaaa

SEQ ID NO: 202741 - DNA, 760 bp, Zea Mays
ccgcacacggcagtacggtccacacagacacagcgcggagccgccacttctcttctcagcgctcccaatctggcggcggcggcacgccggcacccacccggttccaaggctaagagtgttgctattcctaatatggtttatgaaatggatgaacttgaggctcttgcaagaaatatttcatttgaggatgaagacctagatgatgatgatcatgatgatggacctgaggcatcgttgtaagcttgttgatgaagatctagatgataataacgtaccatgaatgctatgaatgtttcttattgtacttgctccgtaatgttttgtgaccttgcgaacttgggacttgtggctttgtgaactttatgatgaacttgttatattgtgtacttgtgttctttgtgatcaacttatcatattgtgaacttgtgatctatgttatcaatttgtaatattgtgaacttgtgatatttgtgatcaaactattatattgtgaacttgtggtctttgtgatcaattttttatattgtgaattgtgaacttgtggtctttgtgatatttgtaaactttgttgtattctgaacttgttatattgacatatggttaccgattgtatttaaggttccgaccggtaccgatgtattttctgtaccgaactttcgattccgatgtttccgaaataccgatatcgtttctgtttccgaagttaccgtttccgatttcgtttccgataaaaaaaatatggaaacggtaacggttttag

SEQ ID NO: 202742 - DNA, 1572 bp, Zea Mays
atggtacttcccgtgcgccacgtttctagcgtccccttcttccttcttccccgagccgcgtcaaaggaaccaaacctgacccggccttcccgcgcaccaatgggtccttggacggcggggcccgcggcctcggcgagatcgaggaggtgggcgctgcggccaccgtagccgtcgaacagtccccctcgcagtcctcgtccccgtcggcgtcgtcgccggcggcggcgatgtcatcgtgcgggcagtacatgctacaccgggtgcgcaagctggacaccctagcgggcgtcgccatcaagtatggtgtcgaggtagccgacattaagaggctgaacggcctctcaactgatctccagatgtttgcacacaagacactgcggattccactcccagggaggcaccctccgtcgtcttaccagcagaatggttcatatgagagtgacgacagggaatgtactccacgtcgcattcatgatgatatcttggaatcaatattgaaaacaccaaattccaaagtttcgccagctatgagtcttctgcagggatactatggccttgaaccacctccaaagagagatcaaacaagtgagggcactgagatggcagttcacagtaaaggcaaatctgcttttttggatgttgagccgtggctggagccaccaaattccgaccccttccctcttcagaataggaaaaacagaagcttgatgataggttcttttcttgatggtggtactgatgagaacggtgacagtgaaaggttcataagacggcgccagaaagctgatggtgagctgttaccgagggaggaaaatggtggtgactttctggcaagcgttggaaaaggcttggctctgaggccaaagtctagcaatcgaccagacatgaacaagagccagcagaatctttttgcaatggcggagcctttgtttggcaatggtttgcaaactgtaaggaaatcatccagcactccggagttccaggagccagagaccaacaccagttcatccatatggtcagcgagcaagtggagcataaatacagatgcttttgctcttcctctcccgatccctcgttttgacaacattccaaagcccattgctgcttggagaaacaagccggctcgcgactaataaactgctacgcgcatgatttttcctgaactccaggaggcccagaaagcgggaagtgttcatgaaggagctttacattaggttggcaccagcctctacagctttggaagcagagcagagcaggactgtagtattggcccctgctagctagaacattccgaagatcagacgcatggcgtctatgtttccagacggcatctagactaggtttacatgattctcgtgttatattgggcatgttgcgccaagagtagcaacgttaatattcggtcatataaattatagatgctagatgacatagaggagatatatttgaggaggatatattttttttctgtacacaatgagaaaatgtagagcatcaaagggcggttatatatgtgttgtatgtgtgattccataccctaatatagaggtggttggcttcgtttaactccag

SEQ ID NO: 202743 - DNA, 958 bp, Zea Mays
taaaaaggccagctgtgcataactagtgaactgctcaaattatatggtagaaatggcttgggttaaagatgtttacggtataagcacagcagaagtgatggaactattggaacatttcctggctatgaatccagataacgatggacgtgtgaaagctgaagatttctgggctcattttggtctggattgcagtcctctgtgcaagaagatatttcactatttcgatttagacattaaggggttgattacgttccgtcagttcttggttgggtgcgcgcacctgaggaagcaaccactgttccagggttcctgcgagaccgcctttgagaagtgccggggtcctgaaacgtctgagatctccagggcacagctagctgatctcttgcggttaagcatggtgccaccttctgatgataagatgctggagctgttcaagacgttcgatgtagatggcgacgagaagatcagcagggacgacttcatggcgtgtcttgggaggttcccgttcctgatcgcgttctttgctgccctgatcaatggggaagtgtacatcgagatagtctgaatgaatgcctgaggcaaagcgatgccgcgtaaaaggctggagctgccagtgccaggcgtaggcaggggatccctccgtttatgcaatgtggatacccaccgggtgctcctccactttgagaccaaagcaactgtagtattgggtattgggttgcatcaagtggctgaccagtgtagtgcgtcgattttgtttagttgcttcgttcgaattattattggccatttaccgaatctgttgagatacgcgctggactagtagattgtcgatggaactcagaacgcaaatagaaagcatctgtaatctgaactaactgagaaaacatttttttttggctctctaacctgctgaagttgtgttttcttgctagctgtagcacttcggccagttgtccgc

SEQ ID NO: 202744 - DNA, 1587 bp, Zea Mays
ttgattcaaaacttcagcatgtaccattggatcagaaagaaaggaaggcccgctcctagggaactcgcacctattgttgtttccaaccatatctcgtacatagaacccatattcttcttctatgaattattcccaaccatagtttcgtccgactctcatgatgccctaccatttgttggaacaattattcgagcgatgcaggttatatatgttgatagattctcacctgcttctcggaaggctgctgtaaatgaaataaagagaaaggcagcttgcaatagcttcccgcgggtcctgttattccctgaaggcaccacaacaaatgggagattcctgatttcgttccaacatggtgcgttcatacctggctaccctgttcaacctgttgttgtccattatccacatgtgcactttgatcaatcatggggaaatatatcgttattaaagctcatgttcaagatgttcacacagtttcataatttcatggaggtagagtaccttcctgttgtctaccctcctgagatcaagcaagagaatgcccttcattttgcagaggataccagctatgctatggcacgtgccctgaatgccttgccgacttattattcatatggcgattctatgattatggcacgagcagtagaagctggaaaggtgaactgctcaaattatatggtagaaatggcttgggttaaagatgtttacggtataagcacagcagaagtgatggaactattggaacatttcctggctatgaatccagataacgatggacgtgtgaaagctgaagatttctgggctcattttggtctggattgcagtcctctgtgcaagaagatatttcactatttcgatttagacattaaggggttgattacgttccgtcagttcttggttgggtgcgcgcacctgaggaagcaaccactgttccagggttcctgcgagaccgcctttgagaagtgccggggtcctgaaacgtctgagatctccagggcacagctagctgatctcttgcggttaagcatggtgccaccttctgatgataagatgctggagctgttcaagacgttcgatgtagatggcgacgagaagatcagcagggacgacttcatggcgtgtcttgggaggttcccgttcctgatcgcgttctttgctgccctgatcaatggggaagtgtacatcgagatagtctgaatgaatgcctgaggcaaagcgatgccgcgtaaaaggctggagctgccagtgccaggcgtaggcaggggatccctccgtttatgcaatgtggatacccaccgggtgctcctccactttgagaccaaagcaactgtagtattgggtattgggttgcatcaagtggctgaccagtgtagtgcgtcgattttgtttagttgcttcgttcgaattattattggccatttaccgaatctgttgagatacgcgctggactagtagattgtcgatggaactcagaacgcaaatagaaagcatctgtaatctgaactaactgagaaaacatttttttttggctctctaacctgctgaagttgtgttttcttgctagctgtagcacttcggccagttgtccgc

SEQ ID NO: 202745 - DNA, 3515 bp, Zea Mays
gttgaggtgagcagaaccgagctacctggtggaggctggcacctagctaatccacaggaggaagagaggagaacgggagcctttttgatgacaagaacggaggcgtcaggcgtgtgattaacaagcaggttctgaagagagtgttacctgcatctgcatggaagagggaggagacccgcagcttccgagcatctccgtggcacgcaccacgtccgaaggcgcgggggccgtcgacttggatctccttgagcagctactgtccggcgacaacggttggctcgaggtggtctcgcgctcgcccaactcggtagcgtttcctccaccctcggccttcttctcggctgacgcgacggccaccacagtgacgacgacggcggcgccggccgcgaacgccagctggttgattcagacgggcggcgcgagcaccccctccgtgcgggagcggttcagccaggccctgtcctacatccgtgatacgcagagcgacggcgacgtcctcgtgcagctctgggtgccggtcaaccgcgatgacgggaagctggtgctgaccaccagcggtcagccgttcacgctcgaccaccgctccgacagcctcatccggttcagggaggtgtccaccaagtaccagttcccagccgacgttaggtcaggggagtcaccagggttgccagggagggtcttcatcggcaggctccctgagtggtcgccggacatcaggtgcttcaccagctacgagtacgccagggtgacagatgcaaagtacctcgatgtccacggcaccatggggctgccagtgttcgagaaaagaagttacagttgcctgggcgttatcgagctgatcatgacaaagcagaagctcaacttcacctctgagctcaacaccatctgcagtgctctacaggcagttaatctcagaagtacagaagtttcgagcattccacgcaaaaagtttagcactgcttcctacaaagatgctttaccagagatactggaggtcctgagggcagcctgcttgacccacaagctgccattagctcagacatgggtcacatgtactcaacaagggaaacgaggcagccgacattctgacgagaactacaggtactgcatttccaccatcgacgaagcatgctttgtgaatgaagccgagatgcggggcttccatgaggcctgctccgaacaccatctgctgcgtggcgagggggtggcagggaaggccctcacgacaaaccagccatgcttcctgccggacattggatcctcaactaaattggaataccccttgtctcaccatgctaagatcttcaggttaaaaggtgcagtggcgatccgactgcggtgcacacgcactgggatagcagacttcgtgctggaattctttcttccaacagattgtgaagcactggaggagcagaagacagtgctggactccttgtcaggcaccatgcgaagtgtttgccagaccctacgtgtggtcacagatagagagatggaaggcgaagcggcgctggaaatgaacgagctgaactcttttactcctcctgagaaggacaaagatgagttgtcctttggaggcaattcagcagatcgtagaggggcctcttggacaagtctggcaggaacttcacagcaagaacccgagttagctgcattgcggatgcatggaacgttctcacctgtggggcagggtccatctctatctggtgttcaggcaactgctgaaggcagtaagacaaaaaggcgcacaaaggccgagaagaccgttagtttgcaggttcttcggcagtacttcgctggtagcctcaaagatgcagcgagaagccttggagtgtgtcccacgaccctcaaaagaatatgcaggcaacatggtataacccgctggccatcacgaaagatcaagaaggtagaccactctctaagaaagctccaacagatcattgattcggttcatggtgcagagacagctttccagctaaacaccctgtacaaggatctcacagacacctcaatatcatctgacaacaatttgtcaggaagtgtcacggttcctccaactaaccagagcaatctcaccgacttcaacaagcaccaaccccacaagtcaagtagcaatatgccatcaacttcacactcacactcctcatgcagccacggttctcagtcaagcccctcgtgtagcgttggtgcaacagaacatgcacaacagggtataattgatctgatgaagtcagaaaatcctgtgaaagacagctctattcagactatgcaaacagaaaacacttcattatatgagcatttctcagttcatgaggctccaattgatcttctacaggatgttactgaaaaggctaatggtgcacatcattcttctcgaagcctgtcatcccccaaccccaagcagaacacagatgcaaatatgagagtaaaggcaacatttggctcagaaaaggtgagattccgactaaacccagagtgcaattttcaaggactgaagcatgagctagcgaaacgtttgagtatagtagacacaaaccccttggttttaaagtacttggatgatgattcagaatgggtcttgatgacatgtgatgcagatctgcaggagtgccttcatgtatacaaactagcagatatccaaacaatcaaaatttcagttcatttagctgttagtccagctacaagggtcacagctggtcacactggtttgtcatgacaacagtatgagcctcaccactttgtgaggtttaatcaaattcaaccaggatcacatggttttgtgcaggggaaaccaaagattccaggagtccagggttggtagctgtgcaatactgcaatgtactatgtaccaccacgtcccagttctactgttagatcaattagtcttgtttctgatgctcaggttaggaactaatgatcaaacaagaatacttgacaatgagagagtcaagaaatcaggataaacagaagtaagcatgcattgcttgtaaatacttattgatgaacctgaatctctgaatgacaatgcaattgattgaattaatagggtgacgtatctacaaatcagatttgctccaactccaagtatgttttgtttctttgagtgctgatgtgcaacaatcattgatggcttctttctgataattgatcagctacaattgtcccttaagatcacagcattccttcatcgcctgagcgatcagcatgctctgttcaatgcacatgaaattctgcttctgaaattgtaattttctgcagcaaggattagatctagaataggatgataggatacttagtttgttcaatatgtttgtccattgcaaaaaaaaataaaaaatgaatggtacactgaattatgggcctctttgaaagaacgtctgctgctgtagacattatagattgttttcctttaagaagcttccatttgtgaaccgtttggtatgtcaattgccaagtatcaatatagagattagattatgccactattataataaccagaatatggaagcacagatgtg

SEQ ID NO: 202746 - DNA, 3941 bp, Zea Mays
atcaatctctttcgctgcttgctttccattgaaaatgatgtgttctcccacaccctgcaacctgaaggcaacatgcctagcacaaaattctcccaaggattcccatggtttcctagcccaagatgtgcatggagccttgcttcttgatctccagcagaacagaagtgaagcactgtggccttgcatgcccaagttttgttgttagcgttaccaagatcatagctaccactgatgcagtgcgttcgcgatgaactgtgtagagcaggttctgaagagagtgttacctgcatctgcatggaagagggaggagacccgcagcttccgagcatctccgtggcacgcaccacgtccgaaggcgcgggggccgtcgacttggatctccttgagcagctactgtccggcgacaacggttggctcgaggtggtctcgcgctcgcccaactcggtagcgtttcctccaccctcggccttcttctcggctgacgcgacggccaccacagtgacgacgacggcggcgccggccgcgaacgccagctggttgattcagacgggcggcgcgagcaccccctccgtgcgggagcggttcagccaggccctgtcctacatccgtgatacgcagagcgacggcgacgtcctcgtgcagctctgggtgccggtcaaccgcgatgacgggaagctggtgctgaccaccagcggtcagccgttcacgctcgaccaccgctccgacagcctcatccggttcagggaggtgtccaccaagtaccagttcccagccgacgttaggtcaggggagtcaccagggttgccagggagggtcttcatcggcaggctccctgagtggtcgccggacatcaggtgcttcaccagctacgagtacgccagggtgacagatgcaaagtacctcgatgtccacggcaccatggggctgccagtgttcgagaaaagaagttacagttgcctgggcgttatcgagctgatcatgacaaagcagaagctcaacttcacctctgagctcaacaccatctgcagtgctctacaggcagttaatctcagaagtacagaagtttcgagcattccacgcaaaaaggtgagcagaaaataaattatacactcgttgtatcgcagctttgaaaaatttggcaaatatctcatttttacaaagataagaatcgcaggacctctatattccaatttaatgtaggcatgtatgaaaatctactttaaattgcatgtttgtgaaaaaaaaactttggacgtttcaatttacctaccctagctcaaatataaagcaagtgtataagatattgagacatgaaacggcgatgcttatatatgctcacatgacttcatggccactcttattgattgtccaccagtttagcactgcttcctacaaagatgctttaccagagatactggaggtcctgagggcagcctgcttgacccacaagctgccattagctcagacatgggtcacatgtactcaacaagggaaacgaggcagccgacattctgacgagaactacaggtactgcatttccaccatcgacgaagcatgctttgtgaatgaagccgagatgcggggcttccatgaggcctgctccgaacaccatctgctgcgtggcgagggggtggcagggaaggccctcacgacaaaccagccatgcttcctgccggacattggatcctcaactaaattggaataccccttgtctcaccatgctaagatcttcaggttaaaaggtgcagtggcgatccgactgcggtgcacacgcactgggatagcagacttcgtgctggaattctttcttccaacagattgtgaagcactggaggagcagaagacagtgctggactccttgtcaggcaccatgcgaagtgtttgccagaccctacgtgtggtcacagatagagagatggaaggcgaagcggcgctggaaatgaacgagctgaactcttttactcctcctgagaaggacaaagatgagttgtcctttggaggcaattcagcagatcgtagaggggcctcttggacaagtctggcaggaacttcacagcaagaacccgagttagctgcattgcggatgcatggaacgttctcacctgtggggcagggtccatctctatctggtgttcaggcaactgctgaaggcagtaagacaaaaaggcgcacaaaggccgagaagaccgttagtttgcaggttcttcggcagtacttcgctggtagcctcaaagatgcagcgagaagccttggagtgtgtcccacgaccctcaaaagaatatgcaggcaacatggtataacccgctggccatcacgaaagatcaagaaggtagaccactctctaagaaagctccaacagatcattgattcggttcatggtgcagagacagctttccagctaaacaccctgtacaaggatctcacagacacctcaatatcatctgacaacaatttgtcaggaagtgtcacggttcctccaactaaccagagcaatctcaccgacttcaacaagcaccaaccccacaagtcaagtagcaatatgccatcaacttcacactcacactcctcatgcagccacggttctcagtcaagcccctcgtgtagcgttggtgcaacagaacatgcacaacagggtataattgatctgatgaagtcagaaaatcctgtgaaagacagctctattcagactatgcaaacagaaaacacttcattatatgagcatttctcagttcatgaggctccaattgatcttctacaggatgttactgaaaaggctaatggtgcacatcattcttctcgaagcctgtcatcccccaaccccaagcagaacacagatgcaaatatgagagtaaaggcaacatttggctcagaaaaggtgagattccgactaaacccagagtgcaattttcaaggactgaagcatgagctagcgaaacgtttgagtatagtagacacaaaccccttggttttaaagtacttggatgatgattcagaatgggtcttgatgacatgtgatgcagatctgcaggagtgccttcatgtatacaaactagcagatatccaaacaatcaaaatttcagttcatttagctgttagtccagctacaagggtcacagctggtcacactggtttgtcatgacaacagtatgagcctcaccactttgtgaggtttaatcaaattcaaccaggatcacatggttttgtgcaggggaaaccaaagattccaggagtccagggttggtagctgtgcaatactgcaatgtactatgtaccaccacgtcccagttctactgttagatcaattagtcttgtttctgatgctcaggttaggaactaatgatcaaacaagaatacttgacaatgagagagtcaagaaatcaggataaacagaagtaagcatgcattgcttgtaaatacttattgatgaacctgaatctctgaatgacaatgcaattgattgaattaatagggtgacgtatctacaaatcagatttgctccaactccaagtatgttttgtttctttgagtgctgatgtgcaacaatcattgatggcttctttctgataattgatcagctacaattgtcccttaagatcacagcattccttcatcgcctgagcgatcagcatgctctgttcaatgcacatgaaattctgcttctgaaattgtaattttctgcagcaaggattagatctagaataggatgataggatacttagtttgttcaatatgtttgtccattgcaaaaaaaaataaaaaatgaatggtacactgaattatgggcctctttgaaagaacgtctgctgctgtagacattatagattgttttcctttaagaagcttccatttgtgaaccgtttggtatgtcaattgccaagtatcaatatagagattagattatgccactattataataaccagaatatggaagcacagatgtg

SEQ ID NO: 202747 - DNA, 1342 bp, Zea Mays
tgtgtaaaggtgattcgatcggccgctagaagcggttcgggagtccggactggaccgaagttgccgctgctccacgccttctcaattcgctatttctctctcccacacgagcgaacacgccggtgagaaactggcagcgcggcactcgctcgtctgcccattgccctgccgtgtcgccgcagattgatccggtccgatccatcaccgtggcgtagcccagctccgccttgtcgtcgtgggcgcgttcatggcggtccgaactatcaaggtgaccaacgtgcctctctcggcgaccgcggagaacatgaaggagttcttctccttctccggcgagatcgagtacgtcgagatgcgaagggactcggagacgtctcaggttgcttatgtcaccttcaaggagttccatggagccgatacagctctgctgctctctggatcaagcatgtgtggcgatgtttccgtgaacatcgcgccggtggaagactacgaactgccaccggaagcgtactcccatgcaggagcaaggtctccgggtccgggaacgccgacgggggaggccgtgaagaaggcggaggaggtggtgagcaccatgctggccaggggcttcgtgctgagcaaggacgcgctgcggcgcgcacagtccttcgacggccggcaccagcagctgctgtccacggccacggcgcgggtggcgtcgctggaccgccgcctgggcctcagcgacaagttcagcctcggcacggccgcggcccgcggcgcggcgcgcggcgtcgacgagcgcttccaggtcacggagcgcgcctggggggccttctcggcggccggggaggtcgtggccggcagcccctacgcgtcccgcggcgccgcctgggtgtcggcggccgtcggcgccgtcgcccgggccgcgtccgacgtcggcgccatgaccatggagaaggtgggcagggccgaggaggagggggaggcctcggcggcggagcatggtcactacgcgtcgtcccgtgtcgacgtgcacgacggacagggcggaggtgcagctcagcacggtgaccataataaggcaatgtgataaaagtagcagcgcgcacgagtataaatccataaacgttttttttttttgaaaaataagatagaaatgtaactgcatgcatctgtccgattattttgacacaataaattctatatccttatcggtttgaaataagttcagattaattttggcccaaaaaaagatgtttatatatacattctaatcgttttttttctgaatacaaatagagtagatcttctgcattttagagagagaaaatggcacgaaattttattaaacggtttcaatgga

SEQ ID NO: 202748 - DNA, 2619 bp, Zea Mays
ccacctttctcccactgcctcgtattctattcccctccctcgccatctccgccgtcgttgccttctccaatccactagtcgacaacgcacgcgcgcaccttctcccgcggcggcgacccccgcggcgtcgtcctagggttaggattcaggcgacttccctcccttccgtgtcgcggcgaacgcgtgggagataatacgccctatgtcgtctgacccttcgcgccacctcccgtcgccggtggctccgccggacgcggcggaggtggatacccattccgccgagccgccagaggtgatgcaccggacgagagccgtcgacttccttggacgacgcacgcccatcgtctaccagaacgacaacgggccctgcccgctcctcgccatctgtaacgtgctgctgctgaagaatgtgatcagcatgaaccctgacgcggaggaggtgtcgcagcagaggttgctctcgctcgtggcggagcgcctcatcgatccaaacatcgctggacaggtcaaggatgaggagtatgttaacaaccgggagcagaacatcgcggatgcgattgatcttctcccgtgcctcacgacaggcattgatgtgaacgtgatgttcaggaagtgcgattgatgacttcgagttcacccgagaacgtgctatatttgatcttctggatatcccgctatatcatggatggattgtggaccctcaggatactgaaactgctactgctattggatcgaagtcctacaatgctcttgcttccggacttgttgaattcaagtcaggtaaaccaacagaagaaaataaacctgtggaggaagaaactgttgattttgctgccgcaacagctgcagctttaaagattccgtctcccagtgtttctcttgggagatcatttgatgaacatagtctctcaaactcagttgaaccacataaaaggcgaggtgaccttgaggaagaagaggaattgatgagggtcctcacattgtccaaaggagaaagtggggatgcagttgatggagaagtttctcttgacacctcacatagtcattcattgtccaacatggatacaccacaaactgagaatcttcagtcagaaacacctgagttagtaggggcagcaaaagaagaggaacatggtaatcacactgtgagtgatgatggctccatcctaccagtcataaatggtgttgttaatggtagtgaagctgtgaccaaagaatctcaaaaaactttgacatctaaagaaccagaggctagtggaataaagaatatgttaccaggggaccttaatatactcgttcaatcttcagaatgtactcccaattgtcagtctcatgaatcctttgctactagtgacccccagcctgctgttcctactcttgttgaaggtggtaaagaaaacaatagagaacagttcgatgcacaaattcatggccaatctaatgatactgaggttgcttgtgactcgacgactgcaacttgtgaagctgttccaggtcatgctaaaacagaactggatgtgaaaagtgattctttagaaaattctgagcctctacctttaagcattcaggaatatgaaccaatataccaaggtgaagagcacatacttggcaccacaaatatggtgtatgaaaatcaagaaccagtgtatgagggggaggtggttcttgctaagcagcttgacaagatggaggaaagcagtccttccgtggatgacaaggccacagaacatcattgggagttgatcgataattttctgtggtccactgctaaccagctgactgtctatggtctcttctgcttacaagaggaacttaaggaaaatgagctttgtgtcttcttccggaataaccacttcaacactatgttcaagtacaacggaagtctatatctcctagcaactgatcaaggttttataagccaaactgatttggtatggcagaggttggatgaggtgaatggagatgggggttttcttactagcaacttcacaccatttaaggctgaaactccaagaaatgattcatggaatgaacagcaagctatgacgagtactgctgattatcttgctcaatttgacaactccacttctggaaactctgatctggagctagctatagcacttcaacagcaagagtttgagcggcaaccacaaaggttccaagctccaccaccacagcagcagcaacaacaaccaccacctcagacgcagcaccaaccagctcaatctggccgaccaggacttgttgttggtccaaggatgtccaatgtgccgcctccgtcaagaagtgaatccaagaaagagaggtgcatcgtgatgtaaaaataccttcaacagaaaagtagtagaaaaaaagaagagataagagacgcatggcattatactgtaaagaaatggtttcttctgcgtttagtcacctcgagccatcccccatttgagcttctttggttttacgtcgcctgatgtatgtaaataacttcaataaataaagtgtaggaacagatgctgtcaaagtgatggccctcatgcaatgtgattttatttgtcgctcttgcaattgattgattctgttcgttcatcaaccacaatacttgtacatcatccattttcgtccgttctg

SEQ ID NO: 202749 - DNA, 2496 bp, Zea Mays
ccacctttctcccactgcctcgtattctattcccctccctcgccatctccgccgtcgttgccttctccaatccactagtcgacaacgcacgcgcgcaccttctcccgcggcggcgacccccgcggcgtcgtcctagggttaggattcaggcgacttccctcccttccgtgtcgcggcgaacgcgtgggagataatacgccctatgtcgtctgacccttcgcgccacctcccgtcgccggtggctccgccggacgcggcggaggtggatacccattccgccgagccgccagaggtgatgcaccggacgagagccgtcgacttccttggacgacgcacgcccatcgtctaccagaacgacaacgggccctgcccgctcctcgccatctgtcaaggatgaggagtatgttaacaaccgggagcagaacatcgcggatgcgattgatcttctcccgtgcctcacgacaggcattgatgtgaacgtgatgttcaggaagattgatgacttcgagttcacccgagaacgtgctatatttgatcttctggatatcccgctatatcatggatggattgtggaccctcaggatactgaaactgctactgctattggatcgaagtcctacaatgctcttgcttccggacttgttgaattcaagtcaggtaaaccaacagaagaaaataaacctgtggaggaagaaactgttgattttgctgccgcaacagctgcagctttaaagattccgtctcccagtgtttctcttgggagatcatttgatgaacatagtctctcaaactcagttgaaccacataaaaggcgaggtgaccttgaggaagaagaggaattgatgagggtcctcacattgtccaaaggagaaagtggggatgcagttgatggagaagtttctcttgacacctcacatagtcattcattgtccaacatggatacaccacaaactgagaatcttcagtcagaaacacctgagttagtaggggcagcaaaagaagaggaacatggtaatcacactgtgagtgatgatggctccatcctaccagtcataaatggtgttgttaatggtagtgaagctgtgaccaaagaatctcaaaaaactttgacatctaaagaaccagaggctagtggaataaagaatatgttaccaggggaccttaatatactcgttcaatcttcagaatgtactcccaattgtcagtctcatgaatcctttgctactagtgacccccagcctgctgttcctactcttgttgaaggtggtaaagaaaacaatagagaacagttcgatgcacaaattcatggccaatctaatgatactgaggttgcttgtgactcgacgactgcaacttgtgaagctgttccaggtcatgctaaaacagaactggatgtgaaaagtgattctttagaaaattctgagcctctacctttaagcattcaggaatatgaaccaatataccaaggtgaagagcacatacttggcaccacaaatatggtgtatgaaaatcaagaaccagtgtatgagggggaggtggttcttgctaagcagcttgacaagatggaggaaagcagtccttccgtggatgacaaggccacagaacatcattgggagttgatcgataattttctgtggtccactgctaaccagctgactgtctatggtctcttctgcttacaagaggaacttaaggaaaatgagctttgtgtcttcttccggaataaccacttcaacactatgttcaagtacaacggaagtctatatctcctagcaactgatcaaggttttataagccaaactgatttggtatggcagaggttggatgaggtgaatggagatgggggttttcttactagcaacttcacaccatttaaggctgaaactccaagaaatgattcatggaatgaacagcaagctatgacgagtactgctgattatcttgctcaatttgacaactccacttctggaaactctgatctggagctagctatagcacttcaacagcaagagtttgagcggcaaccacaaaggttccaagctccaccaccacagcagcagcaacaacaaccaccacctcagacgcagcaccaaccagctcaatctggccgaccaggacttgttgttggtccaaggatgtccaatgtgccgcctccgtcaagaagtgaatccaagaaagagaggtgcatcgtgatgtaaaaataccttcaacagaaaagtagtagaaaaaaagaagagataagagacgcatggcattatactgtaaagaaatggtttcttctgcgtttagtcacctcgagccatcccccatttgagcttctttggttttacgtcgcctgatgtatgtaaataacttcaataaataaagtgtaggaacagatgctgtcaaagtgatggccctcatgcaatgtgattttatttgtcgctcttgcaattgattgattctgttcgttcatcaaccacaatacttgtacatcatccattttcgtccgttctg

SEQ ID NO: 202750 - DNA, 2582 bp, Zea Mays
ccacctttctcccactgcctcgtattctattcccctccctcgccatctccgccgtcgttgccttctccaatccactagtcgacaacgcacgcgcgcaccttctcccgcggcggcgacccccgcggcgtcgtcctagggttaggattcaggcgacttccctcccttccgtgtcgcggcgaacgcgtgggagataatacgccctatgtcgtctgacccttcgcgccacctcccgtcgccggtggctccgccggacgcggcggaggtggatacccattccgccgagccgccagaggtgatgcaccggacgagagccgtcgacttccttggacgacgcacgcccatcgtctaccagaacgacaacgggccctgcccgctcctcgccatctgtaacgtgctgctgctgaagaatgtgatcagcatgaaccctgacgcggaggaggtgtcgcagcagaggttgctctcgctcgtggcggagcgcctcatcgatccaaacatcgctggacaggtcaaggatgaggagtatgttaacaaccgggagcagaacatcgcggatgcgattgatcttctcccgtgcctcacgacaggcattgatgtgaacgtgatgttcaggaagattgatgacttcgagttcacccgagaacgtgctatatttgatcttctggatatcccgctatatcatggatggattgtggaccctcagtcctacaatgctcttgcttccggacttgttgaattcaagtcaggtaaaccaacagaagaaaataaacctgtggaggaagaaactgttgattttgctgccgcaacagctgcagctttaaagattccgtctcccagtgtttctcttgggagatcatttgatgaacatagtctctcaaactcagttgaaccacataaaaggcgaggtgaccttgaggaagaagaggaattgatgagggtcctcacattgtccaaaggagaaagtggggatgcagttgatggagaagtttctcttgacacctcacatagtcattcattgtccaacatggatacaccacaaactgagaatcttcagtcagaaacacctgagttagtaggggcagcaaaagaagaggaacatggtaatcacactgtgagtgatgatggctccatcctaccagtcataaatggtgttgttaatggtagtgaagctgtgaccaaagaatctcaaaaaactttgacatctaaagaaccagaggctagtggaataaagaatatgttaccaggggaccttaatatactcgttcaatcttcagaatgtactcccaattgtcagtctcatgaatcctttgctactagtgacccccagcctgctgttcctactcttgttgaaggtggtaaagaaaacaatagagaacagttcgatgcacaaattcatggccaatctaatgatactgaggttgcttgtgactcgacgactgcaacttgtgaagctgttccaggtcatgctaaaacagaactggatgtgaaaagtgattctttagaaaattctgagcctctacctttaagcattcaggaatatgaaccaatataccaaggtgaagagcacatacttggcaccacaaatatggtgtatgaaaatcaagaaccagtgtatgagggggaggtggttcttgctaagcagcttgacaagatggaggaaagcagtccttccgtggatgacaaggccacagaacatcattgggagttgatcgataattttctgtggtccactgctaaccagctgactgtctatggtctcttctgcttacaagaggaacttaaggaaaatgagctttgtgtcttcttccggaataaccacttcaacactatgttcaagtacaacggaagtctatatctcctagcaactgatcaaggttttataagccaaactgatttggtatggcagaggttggatgaggtgaatggagatgggggttttcttactagcaacttcacaccatttaaggctgaaactccaagaaatgattcatggaatgaacagcaagctatgacgagtactgctgattatcttgctcaatttgacaactccacttctggaaactctgatctggagctagctatagcacttcaacagcaagagtttgagcggcaaccacaaaggttccaagctccaccaccacagcagcagcaacaacaaccaccacctcagacgcagcaccaaccagctcaatctggccgaccaggacttgttgttggtccaaggatgtccaatgtgccgcctccgtcaagaagtgaatccaagaaagagaggtgcatcgtgatgtaaaaataccttcaacagaaaagtagtagaaaaaaagaagagataagagacgcatggcattatactgtaaagaaatggtttcttctgcgtttagtcacctcgagccatcccccatttgagcttctttggttttacgtcgcctgatgtatgtaaataacttcaataaataaagtgtaggaacagatgctgtcaaagtgatggccctcatgcaatgtgattttatttgtcgctcttgcaattgattgattctgttcgttcatcaaccacaatacttgtacatcatccattttcgtccgttctg

SEQ ID NO: 202751 - DNA, 571 bp, Zea Mays
ttgctatatataggccttctcgtctcgtcatccacccgctcgcccattcccctatccacgagcaaggcacagcagcaggggagtcggagtgacagccgcccgcaggatgccgacactaaacctgagcaccaacgtgccggtggacgcggtggtcgccgccgacatcctcagggactgctccaaggccgtcgccaggatcatcggcaagcccgaatccggacacaacttcggcttcaacggatccacattctaagtcgactccagcagaaaccgaagatgatggtcgctgcgtccaaacatccagctcaatacataccaacaccactacatcaataaacgctgatcatgtgtcatccatcacccgcacgtccatggaaaatcccgctcgagcacgagacgcaccaccactagtttatgggctttgtactttcacctgaaagcatgcagtgcatgatggcatgtatctgattccaaattttattgaacttcattttttcagtaatgcaattctacagccctaaagaaaatgtaggcgggaacaggtgtaacaggaaattgcactgacgcgtgt

SEQ ID NO: 202752 - DNA, 722 bp, Zea Mays
ttgctatatataggccttctcgtctcgtcatccacccgctcgcccattcccctatccacgagcaaggcacagcagcaggggagtcggagtgacagccgcccgcaggatgccgacactaaacctgagcaccaacgtgccggtggacgcggtggtcgccgccgacatcctcagggactgctccaaggccgtcgccaggatcatcggcaagcccgaatcccgaagagccggcggcgtacggcgagctcgtgtccatcggcggcatcggccccggcgtcaacggcaagctgagcgccgccgtcgccgaggtactcgaggccaagctctccgtcagcaggtccagattctacatcaagttcgatgacgtgcggggacacaacttcggcttcaacggatccacattctaagtcgactccagcagaaaccgaagatgatggtcgctgcgtccaaacatccagctcaatacataccaacaccactacatcaataaacgctgatcatgtgtcatccatcacccgcacgtccatggaaaatcccgctcgagcacgagacgcaccaccactagtttatgggctttgtactttcacctgaaagcatgcagtgcatgatggcatgtatctgattccaaattttattgaacttcattttttcagtaatgcaattctacagccctaaagaaaatgtaggcgggaacaggtgtaacaggaaattgcactgacgcgtgt

SEQ ID NO: 202753 - DNA, 876 bp, Zea Mays
ctctctcttgctatatataggccttctcgtctcgtcatccacccgctcgcccattcccctatccacgagcaaggcacagcagcaggggagtcggagtgacagccgcccgcaggatgccgacactaaacctgagcaccaacgtgccggtggacgcggtggtcgccgccgacatcctcagggactgctccaaggccgtcgccaggatcatcggcaagcccgaatccgctccctcccggtcgctggtcagcggcggcttggctcagtgccctttctgatgaaacgaaacattccccacgtgctgcgctgcggcctgcggtgcagtatgtcatggtgtcggtcaacgggtcggtgcccatgtcgttcgcggccagcgaagagccggcggcgtacggcgagctcgtgtccatcggcggcatcggccccggcgtcaacggcaagctgagcgccgccgtcgccgaggtactcgaggccaagctctccgtcagcaggtccagattctacatcaagttcgatgacgtgcggggacacaacttcggcttcaacggatccacattctaagtcgactccagcagaaaccgaagatgatggtcgctgcgtccaaacatccagctcaatacataccaacaccactacatcaataaacgctgatcatgtgtcatccatcacccgcacgtccatggaaaatcccgctcgagcacgagacgcaccaccactagtttatgggctttgtactttcacctgaaagcatgcagtgcatgatggcatgtatctgattccaaattttattgaacttcattttttcagtaatgcaattctacagccctaaagaaaatgtaggcgggaacaggtgtaacaggaaattgcactgacgcgtgt

SEQ ID NO: 202754 - DNA, 899 bp, Zea Mays
actacttgaatagcaagcaaccggggacctgtttattccttcgtctgttacattgaaagtctggtccctggtgaggcggttcgaccagccacagctcttcaagcccttcgtgagccggtgtgagatgaaggggaacatcgagatcggtagcgtcagggaggtcaacgtcaagtccgggctgccggccacaagaagcacggagaggctcgagctgttagacgacgacgagcgcattctcagcgtcaggttcgttggaggcgatcacaggctgcagaactactcctccatcctcaccgtccacccggaggtcatcgacggccggccagggacgctcgtcatcgagtccttcgtcgtcgacgtccccgacggcaacaccaaggacgagacctgctacttcgtggaggcgctgctcaagtgcaacctccggtcactcgcggaggtgtccgagggccaggtcatcatggaccagacggagccccttgaccggtgaataatgagtcggaccattatattgcattgcattctgtgtacgcgtagacctgttctccaatgcatggagcccctaggttcttggaaaactgctatgccgcgttcaaagtcaagttctttttccccctccttgcgattgtgtttttctgttcttctccggcgttgtatgtcgcggagggagaagtgcagagtatgatgtgcttgatgaaaattgaaagaaaaaaaaaagaatttagaactgtgaggccctgggacatcttcattctcagatcaatatgtggacttgagggtttaatttctctgtaattagattgctccatcttgattcctttctttcctccgtgtgtgtatgtgtgtgttttgtaaatacatgtcccaagtgtgtacttagggtacgtttagttggattg

SEQ ID NO: 202755 - DNA, 1039 bp, Zea Mays
aaagacattgacgttcaaggcctcctggtgttacacttggaggtacaggcaaggaacatggagataggcaccccaagattggtcagggagctctaattggagccagtgctactatcctcggcaatattaatgtaggcgaaggtgccatgattgctgctggctcccttgttttaaaggacgtacctccccacagtatggctgtaggtaatcctgcaaaggtagttggttatacagagaaagaagatccttctttaactatgaaacatgatgcaaggagagattattttgagcatgctgccatcagattgagatgattgatacacctaatgacgagtcttctttctattcgtctgtggaatactgtggagtaaaaaaagttccaaatcgccttattggcaagaagttttgtggagttaaaaaaaggtttcgtcgtcttactcgcaggaaaccttgtgaagttaaaaaaaaaatgtttgacgaaacgcatacggatgccattccggacatttcgtcacaggcacaaggctggatagtcgatgagctctgtgtttccctttctgcccagacaaccaaatgaagatggaaaagggtcacccagggctccaaaatctagagtgtagacaagcatgtccttaatgcgccttaaattggtctggatggcacttttttgtgataaactatctatctaaaccattgactaatgtctactctactctcaacaagatcaattaattgtatatttgatattaaagttggaatgtttagtatgacaaatttaatattttaaaatagatatgcatgaaatttgatcttgatctttttctattatcaagctcatgactacgaacaaaaataaaattttacatattttttgtgcactgtttgctccctacgacaaaacaaggtgaatttttttttgaatctagatatttgtatctgaattttatatctttcatttgagatgatatgaatggtaaatttgagatttacctttaaattgacatttgaataagtatatgttttcatccctacttgtttc

SEQ ID NO: 202756 - DNA, 1571 bp, Zea Mays
ctagaaggctagaagaaaggactgttcaggctctcatacatgccagcgattcccctctgtcgattgtgctcgtcggagtaggcaacggaccatgggatgatctgttcatggatttcaccgagatcatgtcgagggaaacgtcacagggcgacaaggagggcaagttcacgttggaagcgctgatgaagataccggcccagcacgatgccataatcagccagaacatcagtgagctgatgacaagggcgccggctacaagagcagcttttcgtccaccgtgctgagccaacgctggcagcacggattagcatataatatttgctcgtagggttgttcataaacaccattctggaactaagaggaattcctgagaaaatgcggatgtggtctgtggtagcttggctgttcaatcccttcacattcaccattggtacaagaggaaactgtgaaccaatagtctgcgcagtcatactctggattctcatatgtttgatgaagggtagagtgttgcaggcagctttctggtatgggtttattgtgcacttcagaatatacccaatcatatatgcaattccttttgtaatagttcttggcaagggctatgctggtcctgttggtaggcctactcttacgatgtggaggtccaaacaacagttgcaagatgataaagtcagtcaaatagaagaaccaacatcatttctggccactgtatggggttttctttcaaacttcataagcagaaatgggatcctgtttggattactctctggatccatgttctttgcctggaccggtgttttcttctatctgtatgggtgggacttcctaaatgaagcattactttatcaccttactcgtaccgacccaaggcacaatttctcgatatatttctaccacatatatctacaccatcagcaagggttctcaagtattcagaggctcgcttcgtttcttcctcaactgatcgtgcaactggcactcattctacgcttctctagggatcttccattctgcatgtttctccagacggttgcatttgttgcttttaacaaggtgatgacagcacagtacttcgtgtggttcttctgcttgttgcccctcattctcccttggagcagcatgaaacttaagtggaagggtctggcctgcgcggtagtgtggatggggtcccaactgcattggctcatgtgggcttacctgctggaattcgagggccgaaacgtttttgtgcagctctgggttgcaggcctcatgtttctggctgcgaacacctttgttatgctcatggtgatgaagcaccacaagtacactctgctcttctcaacgccgctgaagtctggcaacaaggttgctaccaagaaggaagaatagcagcgtttgggctctttccattttgccgactgatgtatgattaggacatggatcatgtttgtttctctttttttttgtgtttctgtcagatcacatgtgacttgaatcattgtagtttttcccgtacataatgtggtgacattgcatgagaatattttttggttaccagaatttgcaattggttcagattttattacctg

SEQ ID NO: 202757 - DNA, 1312 bp, Zea Mays
agccagcggttgccggttgtgaccgtcgtcgttggaaggcgacgcgaagcggcagtgcagtgctcgtcttcgtcggcgcgtcgccgtccggagggcggaggccaaagcttgtacttgtcttcggcggaggggattctgaaatcgaggtgcgcaactaggagagccagttgccacggttgcgcttttgctcatcatcggaggcggttgaagtgtcgatgtttctgtgccttcctgggggtattctggaggatcatagctgacaactgcttgtgattgcaaacacagccaaacttgtcggcattaggacccttggtggatgaatggggtctgcattagaaagtcaaggagaacagggctcttgcactgggggcaccgagggtcatcttgtgggagcatgacgtagatgaagcagcgaggacaggcagcaagaaccatggatgtggcctcagggctgttggaccactgcaggccatgctcgttctctgacgataggcaggagctcggggatgactcctcatcagccatcgccctcctggaggagtcccctgttgcaggaagtgagaggttcagtttcaggtcaaggcccctagagctcttcctgttgctgcggctcatcctttggagagtgacgaggcgctggatgcaagcaggtggagatgagagcgatgtgaaatgctctggaaggagagggctatgagctttagaatgctcagaggtgtttctctggtgttgctggagaagggatagatggtatttatagggggtgaggatgggaggtcaattggttttctttaatgtgacataagagctacgctcccatttaattattactcactactatctcatagtagtagcaatagtacaattgtacgcattttattgcctatcatattcatggttggggagtggcgaaggaataggattgaatatgtgttgggtggaagagaagtgctaggtgagaggttttgtggtggcctgttgggtcatatgcaaaagatcaacaaatctgaacgaggaaaaacaggacctgggacacatgcctacagttgagcatttgcttcttcgctcgttgctttttacacaacattaacaggtactgggaaacttttacctggtgcttaacaagttaattcgtatttttttattgttaatcagtatttttagcctgctagcaatgcaaagtatttgctccacagcattttctggattcaggcttctttcttattgcatttgggcgagaggttaaacttgctatctatatttaaaaaatgttccaaattttttaaaatgactgacatcccacagattttag

SEQ ID NO: 202758 - DNA, 1037 bp, Zea Mays
aagagccacaggccagaggccacgcggccacgccgtcctcttcaccccagggttgccgacgcggcgactccgatcacccaccaccgctgccccctgtcctccctgctgccgcctgtgccggggctagcccgccgcggagccatgtcgcggtccttgagcatgagagggagcatgagggcgcgccgcgacctgcctcctcctgagaagacaattgaaaggcttgagagtatggtggatggaggaaatttctatgaagctcaacaaatgtacaagtcaaccagtgcaaggtatattgctgctcagaagtattcagaagccttggacatccttcagtcaggcgctttggttcaattgaagcatggacaggttacctgtggtggtgaacttgctgtcctctttgttgacaccctcatcacaggagagcttccatatagtgaacaaatttttgatcgtatcagaaagatgtatgaggcattcccaagggtaactgttccacatttccttggagatgactatgatgatgaggggcatcaattatctgaagctatttctgctgccaaagtgcgggcagagagttgctcatcattcatgaaagctgcaatcaggtggtctgctgagtttggaacatcaagaaatggttcttctgagcttcacgttatgttagcagaatacatatattcggaatctccagagacggacatgactaaagtctcaagtcattttgttcgtggaaatgatccaaaaaagttcgcttctatgctggtgaactttatgggcaagtgttaccctggtgaagatgatactgcaattgcacgtggggtcctaatgtacctatctcaagggaacttgagagatgcaaatttacttatggatgagatgaacgaacaactaaaatctgctaactcggaatttccgaaaacagatttgattcagttcatcaagtatcttttaccaacggcactaccattttgtgaagaagcatttggatcgcgatccattaccacccctatctggaagcatagaaatgcttgtgtttt

SEQ ID NO: 202759 - DNA, 1420 bp, Zea Mays
ggcttctgctcggcccccgcgggtgagacaattgaaaggcttgagagtatggtggatggaggaaatttctatgaagctcaacaaatgtacaagtcaaccagtgcaaggtatattgctgctcagaagtattcagaagccttggacatccttcagtcaggcgctttggttcaattgaagcatggacaggttacctgtggtggtgaacttgctgtcctctttgttgacaccctcatcacaggagagcttccatatagtgaacaaatttttgatcgtatcagaaagatgtatgaggcattcccaagggtaactgttccacatttccttggagatgactatgatgatgaggggcatcaattatctgaagctatttctgctgccaaagtgcgggcagagagttgctcatcattcatgaaagctgcaatcaggtggtctgctgagtttggaacatcaagaaatggttcttctgagcttcacgttatgttagcagaatacatatattcggaatctccagagacggacatgactaaagtctcaagtcattttgttcgtggaaatgatccaaaaaagttcgcttctatgctggtgaactttatgggcaagtgttaccctggtgaagatgatactgcaattgcacgtggggtcctaatgtacctatctcaagggaacttgagagatgcaaatttacttatggatgagatgaacgaacaactaaaatctgctaactcggaatttccgaaaacagatttgattcagttcatcaagtatcttttaccaacacttgagagagatgcttaccctctttttagaacacttcgacagaagtataagacaagtacagatcgtgatgctgtgtttcaggagttactggatgaaatagctgcaaaattttacaatatacaacgccagaaccctttagaaggccttttcagcgaaatgttcaagatataatgcacgagaaaagaattttatgtcgatgctttcatctaaaccattggctggaataatacaattggtcaacaaaggtgtttgctcaactatgaatctccaaggccatacatttagcatcatgctgcatgaagatatatacttagctctgcagcaaaatcgtcgattagtgtcagattgttactgagcatgtgtaactgaattttgttttctattacttgtttctctttgttgacttgcccttgattgttattgaccatgcataactgaattttgttttcttttacttgtttctccttgtcctgttcacttttggagatgtattttgtgtacccacagatcaaaactataacctatttaaattcattgattttaatatatggtgttatcagtaaagttcattgaatccttgatcattagggatgcactattgtgctcttgctcaattggcttatggcgggctagtgtcttatgg

SEQ ID NO: 202760 - DNA, 912 bp, Zea Mays
tcccagctcatctcaatcttattctctagccttatctcagctcatctcaatcttattctctagccttatcccagcctggttgttgcctctcgctccctatgatgcccatgacatgggtgcactcccagcatccaaacaggtacctatctcaagggaacttgagagatgcaaatttacttatggatgagatgaacgaacaactaaaatctgctaactcggaatttccgaaaacagatttgattcagttcatcaagtatcttttaccaacacttgagagagatgcttaccctctttttagaacacttcgacagaagtataagacaagtacagatcgtgatgctgtgtttcaggagttactggatgaaatagctgcaaaattttacaatatacaacgccagaaccctttagaaggccttttcagcgaaatgttcaagatataatgcacgagaaaagaattttatgtcgatgctttcatctaaaccattggctggaataatacaattggtcaacaaaggtgtttgctcaactatgaatctccaaggccatacatttagcatcatgctgcatgaagatatatacttagctctgcagcaaaatcgtcgattagtgtcagattgttactgagcatgtgtaactgaattttgttttctattacttgtttctctttgttgacttgcccttgattgttattgaccatgcataactgaattttgttttcttttacttgtttctccttgtcctgttcacttttggagatgtattttgtgtacccacagatcaaaactataacctatttaaattcattgattttaatatatggtgttatcagtaaagttcattgaatccttgatcattagggatgcactattgtgctcttgctcaattggcttatggcgggctagtgtcttatgg

SEQ ID NO: 202761 - DNA, 2813 bp, Zea Mays
gaaccactctctgtttcagtttccgcttccgtttgcgtctcgttttggttcaggctgtctgccctcgtctcttagggatcgagaatcgcggcgaggttcatcgaggcttcttgctctgaacagaggagcaaaccaattgcgacttggaaaaggctaataaggaatggaatcgagttatgccaccgaagagagtaactctaaaggctcttctgcaaatgcatcttcatctccaacaggaagttcagaaacttctgtggatttacaaactcctcctgcagccaaggaaattcctggacgtattgatcatgagggaccaagctggcatgaggtcttagaaatgcgggttcctgatctatcagaagacattgcagaatcacatgcgccttcggatacagatcctgacatactgtctaattcaggaccaactgaggcatacataagctcaacaaatgataaggcagattatccttcttcagtaggcacaagcgaagtgaacggtgtgcctgtaaatgtttcgaacggagctggaactacgctaaaggatgaaatgaaacctaaagaagatgatacgcaccatcagattgatagggatacaaagctgaaaatgaaacaagattcagcaacaacacctgaaagtccgtacagaggccttattgacactgctgcaccctttgagtctgttagagaagctgtcaccaagtttggaggaattgtcgattggaaagctcacaaagctcagatgatggagaggcgcaagctcatacaagttgaattagaaaacattcgaacagaaattccactttgcaaggaggaactagaagccgctgagatgactaaatctcaagttgtcgatgagctagagcacaccaagagacttattgaggagctgaagcatcaactggagaaagtacaggttgaagaagctcaggcaaagcaggactctgagcttgcacaactcagggcacaagaaattgagcacggagtagctgatgaagctagtgcgatagccaggacacaaatggaagtcgccaaagaaaggcacgaaaaggctgttgctgaacttaagtcagtaaaagaggagttggcgtcagtacatgaacagtatgctgccttggtagatgaaagagacacagcaatcaaaagagcagaagaggtcatatctgctgggaaggacattgagaagcgagtggaacaactgacattagaactgattgcgtctaaagggtctcttgaattggcccatgctgcgcatcatgaagcagaggaacgtaggatcggtgcagcattggcgaaagagcaggattgcaatgcttgggagagagagttgcgtcaggcacaagaggagctggaacgattagacagtaagcttgcgttcagtaacgatatgcagcacaatattgatgcaaatttgcacaagttgcttagcctcaattcggagctgtctgcctatgtggcgaacaaactgactgaagaagctgaaggtgtttccaaggatcatgagtccgaagattctagacacattagcaacgcagttaaggaagctctagcatcgaaacagaaagaacttcaggagctcaaagccgacattgagaaggcaaaggctgaggccaacgtgctaagatttgctgccatgacactcagatcagaactggacaacgagaacgcttcacttgtcgcgttgcagcagggagaggctatggcatccgttgctgtttcttcactagaagctgagctcaaccggacgaaacaagagatagaatctgtcaggtccaaggaggcagaggcccaagaaaagatggtggagcttcccatggttttacagcaagcgactcaggaggccgaggacgccagggtagcagctcacgcggcccacgaggagctgaggaaggcgaaggaggcattcgagcaaaccaaggctgccgcagctgcagcagagaccaggttatctgctgttgtgaaagaaacagaagcatccgtagcatcagagaggctagcacgcgaggcgcttcaagctttgcaagaaagcgaacaggcaagagaaactaaggattctcagcgaggagtggtgcttcctataagcgagtactacgaacttagcaagagggcacatgaagccgaagaacaggcgagcgagaaggtagcagaagcactggcacaggtagtgtcggcaaaggaatcagaagcaatgagcctggagagcctaaaggaagcgtccgatgaaatggacgagaagaaggaagctcttgagatcgccttggagagagccgggagggcgaacgaagggaagcttggcgcggagcaggagcttaggaaatggagagccgaccacgagcagcgccgcagagctcacgaatccgcgaaacgcgcggtgaatcctttgaacggtccgtctagagtatttgtcgaacagaagagtccataccacaaggagcaggaatccaaggtgcaggcgtcggggagtagtagctacgagggcctcgttccaaaccaaaagatgcagaggaagaaatcgctgttccctctgatgggctcggttctatccaggaagacccgggcacagacgtgacgtaaacgagatcctataggcacctggggctttgccattcacattgctgtacattggtgtaataagctggttttttttcttggtcttctttggaaagagcctttttgttttgttttaaaggttggtatatcctgtggaaggtgtaatttaatttgtcggtataaacagcgtagaacacattggaatacttttatatgattttttttggtaactcatagttcttcatgaattctgcgaggagatctgt

SEQ ID NO: 202762 - DNA, 2808 bp, Zea Mays
gtgagttccgcccgcctcggccctttccgctgcaatccgcgagtgtggagtttcgctttctctgtctgctgtacgcggggtgattcctcctcttgttcgcgttggatgaaaacaaaaccggagcaaaccaattgcgacttggaaaaggctaataaggaatggaatcgagttatgccaccgaagagagtaactctaaaggctcttctgcaaatgcatcttcatctccaacaggaagttcagaaacttctgtggatttacaaactcctcctgcagccaaggaaattcctggacgtattgatcatgagggaccaagctggcatgaggtcttagaaatgcgggttcctgatctatcagaagacattgcagaatcacatgcgccttcggatacagatcctgacatactgtctaattcaggaccaactgaggcatacataagctcaacaaatgataaggcagattatccttcttcagtaggcacaagcgaagtgaacggtgtgcctgtaaatgtttcgaacggagctggaactacgctaaaggatgaaatgaaacctaaagaagatgatacgcaccatcagattgatagggatacaaagctgaaaatgaaacaagattcagcaacaacacctgaaagtccgtacagaggccttattgacactgctgcaccctttgagtctgttagagaagctgtcaccaagtttggaggaattgtcgattggaaagctcacaaagctcagatgatggagaggcgcaagctcatacaagttgaattagaaaacattcgaacagaaattccactttgcaaggaggaactagaagccgctgagatgactaaatctcaagttgtcgatgagctagagcacaccaagagacttattgaggagctgaagcatcaactggagaaagtacaggttgaagaagctcaggcaaagcaggactctgagcttgcacaactcagggcacaagaaattgagcacggagtagctgatgaagctagtgcgatagccaggacacaaatggaagtcgccaaagaaaggcacgaaaaggctgttgctgaacttaagtcagtaaaagaggagttggcgtcagtacatgaacagtatgctgccttggtagatgaaagagacacagcaatcaaaagagcagaagaggtcatatctgctgggaaggacattgagaagcgagtggaacaactgacattagaactgattgcgtctaaagggtctcttgaattggcccatgctgcgcatcatgaagcagaggaacgtaggatcggtgcagcattggcgaaagagcaggattgcaatgcttgggagagagagttgcgtcaggcacaagaggagctggaacgattagacagtaagcttgcgttcagtaacgatatgcagcacaatattgatgcaaatttgcacaagttgcttagcctcaattcggagctgtctgcctatgtggcgaacaaactgactgaagaagctgaaggtgtttccaaggatcatgagtccgaagattctagacacattagcaacgcagttaaggaagctctagcatcgaaacagaaagaacttcaggagctcaaagccgacattgagaaggcaaaggctgaggccaacgtgctaagatttgctgccatgacactcagatcagaactggacaacgagaacgcttcacttgtcgcgttgcagcagggagaggctatggcatccgttgctgtttcttcactagaagctgagctcaaccggacgaaacaagagatagaatctgtcaggtccaaggaggcagaggcccaagaaaagatggtggagcttcccatggttttacagcaagcgactcaggaggccgaggacgccagggtagcagctcacgcggcccacgaggagctgaggaaggcgaaggaggcattcgagcaaaccaaggctgccgcagctgcagcagagaccaggttatctgctgttgtgaaagaaacagaagcatccgtagcatcagagaggctagcacgcgaggcgcttcaagctttgcaagaaagcgaacaggcaagagaaactaaggattctcagcgaggagtggtgcttcctataagcgagtactacgaacttagcaagagggcacatgaagccgaagaacaggcgagcgagaaggtagcagaagcactggcacaggtagtgtcggcaaaggaatcagaagcaatgagcctggagagcctaaaggaagcgtccgatgaaatggacgagaagaaggaagctcttgagatcgccttggagagagccgggagggcgaacgaagggaagcttggcgcggagcaggagcttaggaaatggagagccgaccacgagcagcgccgcagagctcacgaatccgcgaaacgcgcggtgaatcctttgaacggtccgtctagagtatttgtcgaacagaagagtccataccacaaggagcaggaatccaaggtgcaggcgtcggggagtagtagctacgagggcctcgttccaaaccaaaagatgcagaggaagaaatcgctgttccctctgatgggctcggttctatccaggaagacccgggcacagacgtgacgtaaacgagatcctataggcacctggggctttgccattcacattgctgtacattggtgtaataagctggttttttttcttggtcttctttggaaagagcctttttgttttgttttaaaggttggtatatcctgtggaaggtgtaatttaatttgtcggtataaacagcgtagaacacattggaatacttttatatgattttttttggtaactcatagttcttcatgaattctgcgaggagatctgt

SEQ ID NO: 202763 - DNA, 3312 bp, Zea Mays
cgtcgcgatcgcgacatgcccggcgccgccaccctcagatcgcgcgtggccgtcgcggccgccgcgtgccttgcggtcttcgcagcggtggcgctgctccaccgcaagcgccgctggaaccgggcgccctcctcgtctcgtcgcctcggggtcgggggacgcccacgccgcgcttgcgaggaggaggagaagccgcaggaccggttcaagcgcgtcctcgcggacaactcctactccccgttcaaacacccgcgccgcaagagtgctcagttgggaagtgcagaaggcgaggcacccctgccaccgcctcaagaattgtcacaaaaaggtcatccatttgaggaggaaatcacatctttgctaaagaacccccctggttttcatagctttatgctgtgtgaccagtgcccagaaatgagtgctacatataattgggttcatacagaaactcaactggaacatttggcgagattattgggtgaggaaagagcttttgctgttgatacagagcaacatagcattcgatctttcctaggatatactgcactaatgcagaattattctgttttagatctctacccagaatgaagactatctgatagacacaatagcactgcacgatgtgatgggcattctacgaccagtgtttgccaattcttctatctgtaagatcttccatggagctgacaatgatattctttggcttcaaagggattttcatatttatgttgtgaatatgtttgatactgctaaggcatgtgaaattctattgaaaccacaaaaatcactggcatatttgcttgaagtatattgtgaagtgaccaccgacaagacaatgcagcgtgaagattggagactgcgtcctctgactccagaaatgatcgagtatgcacgcactgatgctcactatctgttatacattgcaaattgtttggcatcagagctccatgcaaaagcctgtgatacttccagtgataaaatcaattttttcttcgaggctagtcatcgctcaaatatggtgtgcatgcaactgtattcaaaagaaattgaatcccctcctggagcttccagtgcaacatctattctctcacgaaatttgcaaactcatgggttcgactccaaaaagtctagtgaagtgaaggatcttgtttggaaattttgtgcatggagggacttaatggctcggatgcatgatgaaagcttacgatatgttctgccagaccaagctatagctgcccttgccgttagtcttccaaagggcccaacagaggtgtttgctgtcatagcagaaactgacctaagcatttcaagtatgtacccttccttgtcatcaccgtcacctcttgttgtggctcatgtcaaagaactctgttatctgctggatgacatcactaccagcatggacagcatctttaaaagtttactagagaagtataaagatccaagtggattatgtcgactatcagtttataattataaccttataacacacctaagtttgaagcaaacaagtatgttttccgttgctccaagtggaaagaagttgacagcactgcctaataaaaaggtttcacgggatttattcattaaaaagttttcctgcaagtccccggtatatcacaattgcaggatttatgctagtgatggaagactactttgctactgtgaccgcaaaaaactggaatggtacattcagcgtaatttggcgaaattgattgaaaatagtcctccagcaatcatgcttctctttgaacctaaaggtcgtccagaggatgaagataacgagttctatattcagagcaagaaaaatatttgtgtgggctgtggagaaaagagccattatattagatacagaataataccgtcatgctacaggatgcattttccagaacatttaaagagccatcgttcacatgatattgtacttctttgtgtagactgtcatgaaatagctcattcagcagctgagaaatacaagaggcgaatagcagaagaatttggaatacccctttttgtgcaaaagataatgaactcgggtgatataagtttgattaccaacacatcagtatctgaagataaattgaatggaacaggtgtctccccattgcagctgaggactgctgccatggctcttctacgtcatggatccactatgccattgaagagatgtgaagagctaatgcagattgtgaagtcatactatggtggtagagatgtgactcctgaagatctcgagatggcattacttgttggtatgagccctcatgagcgaaggcgtcttgaaaagaaaaagggatattcgtttagagctcaggctcaaactattattagaaagagcagcagcaataccatctcagaagacagtggacatggatcagaaaattgtcatgccttatctgcgcgatttcctgaggttggaactggtagtaatggtcagcaagagtttgatgagacagggaatcaaaaccagctagagaatttaaccctgagccagggaagctcaagtttgccagtcagcatggaggacaccacttctgatcatgacactgtgacactcgagaccgataccgagcagcaagcaagaggtgcctgtactcctggaaacagtcatgacgacaaggaacaatccatatgtgacaattctagtcaggtcatttccaagaatgctgagaagatatccctgttgggtcatgggcatcatggtaaacaagttgtggaacttttgttttctaatggtggagaggaatttgttaaccagttttgccaaaggtggaggcagatctttgttgaagctgttcacccccgttatttaccttctggctggaatattaaccacagtggacggcgggattttggtgacttcagtgtctacaagccaccaaggaaagatcctcaatctgcaactgcaagggattaggcttacgcgggtgtcatgctgtcgttggtaccctgaggttcaacttactttccagaattggttccattcccttaaacttgatcttgttgtacttgttccattcccttaaacctgatattgttgtacttgtatgtatctcaatctgtgtgtttgttcgagtaccttgaaataccaatttcatctcctatgtatttctttgagatgaactttgcatcagttttgttgagccgtttttttatacgtgaggatttagagtactaacaatttaagtccaagaaaaatcaacagtgaagttcaactcagcagattaaatcttcaaagtgccgtttttaactgggagttgagctcaaattggtttcttcgggacaggcttgaaacttgttgcgtttggaaca

SEQ ID NO: 202764 - DNA, 3228 bp, Zea Mays
cgtcgcgatcgcgacatgcccggcgccgccaccctcagatcgcgcgtggccgtcgcggccgccgcgtgccttgcggtcttcgcagcggtggcgctgctccaccgcaagcgccgctggaaccgggcgccctcctcgtctcgtcgcctcggggtcgggggacgcccacgccgcgcttgcgaggaggaggagaagccgcaggaccggttcaagcgcgtcctcgcggacaactcctactccccgttcaaacacccgcgccgcaagagtgctcagttgggaagtgcagaaggcgaggcacccctgccaccgcctcaagaattgtcacaaaaaggtcatccatttgaggaggaaatcacatctttgctaaagaacccccctggttttcatagctttatgctgtgtgaccagtgcccagaaatgagtgctacatataattgggttcatacagaaactcaactggaacatttggcgagattattgggtgaggaaagagcttttgctgttgatacagagcaacatagcattcgatctttcctaggatatactgcactaatgcaggtaatttactgatctctacccagaatgaagactatctgatagacacaatagcactgcacgatgtgatgggcattctacgaccagtgtttgccaattcttctatctgtaagatcttccatggagctgacaatgatattctttggcttcaaagggattttcatatttatgttgtgaatatgtttgatactgctaaggcatgtgaaattctattgaaaccacaaaaatcactggcatatttgcttgaagtatattgtgaagtgaccaccgacaagacaatgcagcgtgaagattggagactgcgtcctctgactccagaaatgatcgagtatgcacgcactgatgctcactatctgttatacattgcaaattgtttggcatcagagctccatgcaaaagcctgtgtcatcgctcaaatatggtgtgcatgcaactgtattcaaaagaaattgaatcccctcctggagcttccagtgcaacatctattctctcacgaaatttgcaaactcatgggttcgactccaaaaagtctagtgaagtgaaggctcggatgcatgatgaaagcttacgatatgttctgccagaccaagctatagctgcccttgccgttagtcttccaaagggcccaacagaggtgtttgctgtcatagcagaaactgacctaagcatttcaagtatgtacccttccttgtcatcaccgtcacctcttgttgtggctcatgtcaaagaactctgttatctgctggatgacatcactaccagcatggacagcatctttaaaagtttactagagaagtataaagatccaagtggattatgtcgactatcagtttataattataaccttataacacacctaagtttgaagcaaacaagtatgttttccgttgctccaagtggaaagaagttgacagcactgcctaataaaaaggtttcacgggatttattcattaaaaagttttcctgcaagtccccggtatatcacaattgcaggatttatgctagtgatggaagactactttgctactgtgaccgcaaaaaactggaatggtacattcagcgtaatttggcgaaattgattgaaaatagtcctccagcaatcatgcttctctttgaacctaaaggtcgtccagaggatgaagataacgagttctatattcagagcaagaaaaatatttgtgtgggctgtggagaaaagagccattatattagatacagaataataccgtcatgctacaggatgcattttccagaacatttaaagagccatcgttcacatgatattgtacttctttgtgtagactgtcatgaaatagctcattcagcagctgagaaatacaagaggcgaatagcagaagaatttggaatacccctttttgtgcaaaagataatgaactcgggtgatataagtttgattaccaacacatcagtatctgaagataaattgaatggaacaggtgtctccccattgcagctgaggactgctgccatggctcttctacgtcatggatccactatgccattgaagagatgtgaagagctaatgcagattgtgaagtcatactatggtggtagagatgtgactcctgaagatctcgagatggcattacttgttggtatgagccctcatgagcgaaggcgtcttgaaaagaaaaagggatattcgtttagagctcaggctcaaactattattagaaagagcagcagcaataccatctcagaagacagtggacatggatcagaaaattgtcatgccttatctgcgcgatttcctgaggttggaactggtagtaatggtcagcaagagtttgatgagacagggaatcaaaaccagctagagaatttaaccctgagccagggaagctcaagtttgccagtcagcatggaggacaccacttctgatcatgacactgtgacactcgagaccgataccgagcagcaagcaagaggtgcctgtactcctggaaacagtcatgacgacaaggaacaatccatatgtgacaattctagtcaggtcatttccaagaatgctgagaagatatccctgttgggtcatgggcatcatggtaaacaagttgtggaacttttgttttctaatggtggagaggaatttgttaaccagttttgccaaaggtggaggcagatctttgttgaagctgttcacccccgttatttaccttctggctggaatattaaccacagtggacggcgggattttggtgacttcagtgtctacaagccaccaaggaaagatcctcaatctgcaactgcaagggattaggcttacgcgggtgtcatgctgtcgttggtaccctgaggttcaacttactttccagaattggttccattcccttaaacttgatcttgttgtacttgttccattcccttaaacctgatattgttgtacttgtatgtatctcaatctgtgtgtttgttcgagtaccttgaaataccaatttcatctcctatgtatttctttgagatgaactttgcatcagttttgttgagccgtttttttatacgtgaggatttagagtactaacaatttaagtccaagaaaaatcaacagtgaagttcaactcagcagattaaatcttcaaagtgccgtttttaactgggagttgagctcaaattggtttcttcgggacaggcttgaaacttgttgcgtttggaaca

SEQ ID NO: 202765 - DNA, 2974 bp, Zea Mays
cgtcgcgatcgcgacatgcccggcgccgccaccctcagatcgcgcgtggccgtcgcggccgccgcgtgccttgcggtcttcgcagcggtggcgctgctccaccgcaagcgccgctggaaccgggcgccctcctcgtctcgtcgcctcggggtcgggggacgcccacgccgcgcttgcgaggaggaggagaagccgcaggaccggttcaagcgcgtcctcgcggacaactcctactccccgttcaaacacccgcgccgcaagagtgctcagttgggaagtgcagaaggcgaggcacccctgccaccgcctcaagaattgtcacaaaaaggtcatccatttgaggaggaaatcacatctttgctaaagaacccccctggttttcatagctttatgctgtgtgaccagtgcccagaaatgagtgctacatataattgggttcatacagaaactcaactggaacatttggcgagattattgggtgaggaaagagcttttgctgttgatacagagcaacatagcattcgatctttcctaggatatactgcactaatgcagatctctacccagaatgaagactatctgatagacacaatagcactgcacgatgtgatgggcattctacgaccagtgtttgccaattcttctatctgtaagatcttccatggagctgacaatgatattctttggcttcaaagggattttcatatttatgttgtgaatatgtttgatactgctaaggcatgtgaaattctattgaaaccacaaaaatcactggcatatttgcttgaagtatattgtgaagtgaccaccgacaagacaatgcagcgtgaagattggagactgcgtcctctgactccagaaatgatcgagtatgcacgcactgatgctcactatctgttatacattgcaaattgtttggcatcagagctccatgcaaaagcctatacttccagtgataaaatcaattttttcttcgaggctagtcatcgctcaaatatggtgtgcatgcaactgtattcaaaagaaattgaatcccctcctggagcttccagtgcaacatctattctctcacgaaatttgcaaactcatgggttcgactccaaaaagtctagtgaagtgaaggatcttgtttggaaattttgtgcatggagggacttaatggctcggatgcatgatgaaagcttacgatatgttctgccagaccaagctatagctgcccttgccgttagtcttccaaagggcccaacagaggtgtttgctgtcatagcagaaactgacctaagcatttcaagatttatgctagtgatggaagactactttgctactgtgaccgcaaaaaactggaatggtacattcagcgtaatttggcgaaattgattgaaaatagtcctccagcaatcatgcttctctttgaacctaaaggtcgtccagaggatgaagataacgagttctatattcagagcaagaaaaatatttgtgtgggctgtggagaaaagagccattatattagatacagaataataccgtcatgctacaggatgcattttccagaacatttaaagagccatcgttcacatgatattgtacttctttgtgtagactgtcatgaaatagctcattcagcagctgagaaatacaagaggcgaatagcagaagaatttggaatacccctttttgtgcaaaagataatgaactcgggtgatataagtttgattaccaacacatcagtatctgaagataaattgaatggaacaggtgtctccccattgcagctgaggactgctgccatggctcttctacgtcatggatccactatgccattgaagagatgtgaagagctaatgcagattgtgaagtcatactatggtggtagagatgtgactcctgaagatctcgagatggcattacttgttggtatgagccctcatgagcgaaggcgtcttgaaaagaaaaagggatattcgtttagagctcaggctcaaactattattagaaagagcagcagcaataccatctcagaagacagtggacatggatcagaaaattgtcatgccttatctgcgcgatttcctgaggttggaactggtagtaatggtcagcaagagtttgatgagacagggaatcaaaaccagctagagaatttaaccctgagccagggaagctcaagtttgccagtcagcatggaggacaccacttctgatcatgacactgtgacactcgagaccgataccgagcagcaagcaagaggtgcctgtactcctggaaacagtcatgacgacaaggaacaatccatatgtgacaattctagtcaggtcatttccaagaatgctgagaagatatccctgttgggtcatgggcatcatggtaaacaagttgtggaacttttgttttctaatggtggagaggaatttgttaaccagttttgccaaaggtggaggcagatctttgttgaagctgttcacccccgttatttaccttctggctggaatattaaccacagtggacggcgggattttggtgacttcagtgtctacaagccaccaaggaaagatcctcaatctgcaactgcaagggattaggcttacgcgggtgtcatgctgtcgttggtaccctgaggttcaacttactttccagaattggttccattcccttaaacttgatcttgttgtacttgttccattcccttaaacctgatattgttgtacttgtatgtatctcaatctgtgtgtttgttcgagtaccttgaaataccaatttcatctcctatgtatttctttgagatgaactttgcatcagttttgttgagccgtttttttatacgtgaggatttagagtactaacaatttaagtccaagaaaaatcaacagtgaagttcaactcagcagattaaatcttcaaagtgccgtttttaactgggagttgagctcaaattggtttcttcgggacaggcttgaaacttgttgcgtttggaaca

SEQ ID NO: 202766 - DNA, 1506 bp, Zea Mays
acaatgatttgtttcaaaaaaaaaaaaaaacattgcccaatccaaatccccattccctccactcccaaaatttcgaactccgaatcgaagctatcatgtgcgagcgctcacctaccccacgttgactagaagaaccgtccgacttcaacttcccaattttgcctccaaaaaattcaaaatattattcgaccccgccgccatcccgtccgccctacaaatcccgccagcatgcgctccatgttcgccactaggtcgcttctcgccgctgccgcctccgcccccaccgtcctccgcgccagcgctttcccatcgcgttcgctgctcctctctctgcctttccctcggggtcgtgctgccagaaatatgcttggcgcggcgaggtcgatctcttcggccgccccgtcgcgagtcggaggccgtgcggctatggaggtccgggcggctcagtccggcgagatccatgtcatcgtgggccccatgttcgccggcaagaccaccgcgctcctccgccgggtccaggccgaggccggcaacgggaggagcgtggcactaataaagtccgacaaagacaaccgctatggattggattctgttgtgactcatgacggtacaaagatggcgtgctgggccttgtcagaactgtcaagttttcatgacaaattaggaattgaggcctataataaggtagatgttataggtatcgatgaggcccaattcttcgacgatctttatgatttctgctgcaaagctgcagatcgtgatggaaaaattgtagttgttgctggcctagatggtgactacaaacggagaaagttcggttcaattcttgatattgttcctctggctgactcggtcaccaagctaacagcacgctgtgagctatgtggtcgccgggcgttctttacactgaggaagacgcaggaaaccaagactgaactaattggaggagcagatgtgtatatgcctgtgtgcaggcagcactacatggatgggcagattgttattgaggccacaaggattgtgttggaccttgacagatccaccgtgacggcgaaagccttgaaataggccaatacctgacttctgcatgcagatttgcagtgtgtaacgatttatttatgatgacattggttgctgtcgagtgttgaagacgcacaccagttggtgaaaagctgttggccttgagatgctgccaccagcgagggaagccaaatgagttgatcccacaaagtactgttgagaagtttgtaaatatctaacagtgtttgggtttaaaatgcggacatgtatcgcttttcttatgcaattggcattgtcatttttattaagcaatcagatgcttggaatcagctgtacgaatttgtaccacaaaggaattgcattcaagtttgaaagtaaactaaggctatctccatcatgtaaatggatgtgtaaagtactgtttttcactgtagatcgtactgattgtagagtgtgtaatttgaaatggagattgagacataaaat

SEQ ID NO: 202767 - DNA, 1233 bp, Zea Mays
acagattatgcagtggttgagaaaccatccttgacaacatggatgaaaggaggacttgattatatagttcttaaaagtttagatacagacgggattcgcataatttcaagcgttcttggtcaaagtatcgcccttgatcactatattcggcaggtcgatgatatggttgaggaattcactgaaattaatcgtgtcatggagaaaaccggtaactttaccatgcaaagaaaaaaactctttcaacttgtgggtaaggccaattctaatcttgcggatgttatcatcagacttggtctttttgacagaaattgcttggaaaaatgcaaattatgcacaaattctagaatatcttcgggaggaatatgaactgaatcagcgttttggaagccttgacttcaaactgaaatttgtggagcataacattcactttcttcaagaggtcctccaaaacagacggtctgatctgctggaatggggtgtcataatactgctgattattgagattgctatctcattatatgaaattgccaaggactccatgatcgattgagagctctgaacaacacctctattcatcctcgatcatcccattatgctaactccagatccactgttttaacaaaaaaaggaaaagaatgaccccagcttccatattttctgactatccatctccaccctttggatttctaaccttagatgaaaggaagttgggaatggcgttctggcttgagtttatttacatcctttaattctacaactccaaacgaaaagaagtttggccaattttcctatgtccaatgagttcccgggcagccaggttttccaatttgagtagaatctagttttcctttcaatattcatgccaggtgttcttgatacatgttcttggtgccactttttagtatcttgataggactgtcagctctttttttttgggggcaaggctgacgccaggcagctgcaactggacctgatggaaaaatcatgaaagtttttatcaaatggctttgtaatttgtacaaatacttagcgtgggaaggttccatttggtttaaccatactgaattgctcgttccattttgcgtggtaattaaccatgcatactgtaagtatgtgtagtacacttgatgcctatgagtgagagtgaattagatatttcttctagtcaaaatctatgcaataaataaactatctgtgtataattatatttttgacagtattttgctatctata

SEQ ID NO: 202768 - DNA, 715 bp, Zea Mays
gacagacctggtggagtcaagtactctaccaaacttgccccttcccttcccagcgcgctctctctagccggcgacgattgggcgagcggcgccactcaacgccaggtcttcgtgaaaaccatcgccggcgatgagtttcaaccagtctactgtcaaggggcaggccaggagggagaggcctagggctcgccctcatggcctgacgcagcagaggaggcaggaaataaaggaagcttttgatctgtttgatacagataactctggaaccattgatgcaaaagagctcaatgttgccatgagagccttgggatttgagatgactgaagagcaaattaggcaaatgattgctgatgttgacaaagatggcagtggagcgatcgactacgaggagtttgagcacatgatgactgccaaaatcggagagagggatagtaaagaggagctttcaaaagcattccgcattattgatcaagatggaaatggaaagatttctaacattgatatccagaggattgccaaagagctgggtgtaaatctcaccctcgatgagatccaagacatggtgcaagaggctgatagaaatggtgacggtgagatagactttgacgagttcatcaggatgatgaggaggaccagctttggctactaggtgtatttatctgtatggcaacttttatgtataacgagcacggcccgacaacctactaagaaaatg

SEQ ID NO: 202769 - DNA, 1184 bp, Zea Mays
catcagtggaccaagtggacatcttgacaggagtcacgctactcctgatagcaagggttcctgccaagttgggctacaggaagaatacattgtttgctccaactatcgcacttggcaaaatctcattattactggcaacagctgcacctgggttggatactggagaaggttgcctgaagagactactgaagctaagctactgatgcgttatttggttcagttaatcagttgtatcctctgcccttgtaggctgttgtacctcacctgtgtcagcaacatttttgtgaatctaaaacagttagcacatcaacaatgctgacagactagaaccgggctttgccggtctggatgtactgcttacgtgcattgatgctagtgtggacagcaaatctctgcactgcatcatcagactgtgttcttgaatgaaaactctggagagctgggacgcaaagacatctgtccgagccaactgcagaagatggaagacggttcagactggaaaatagcagcatgtcatcttagagattttgtgatattggcagcatgcatccagtctgtgtaaatgtcatgtgattcaaagagaactaactggaaaaagaagttctgtatgacggcagcaccttaggcagctgggctctcgtggagttccctatggtgtgcatggcatcaaccgcagagctaagagcgtttcttatcccttgaatatctgcctgaaaacatgaggtctcagtatttcaagatgagaagcaacagattgacgaaacttagttcctggtttatggaacaccaaccactgctccatcggagacaggaaggcgcaggacggtggcagtcagagcctgtgtagttcctgacaaagaatgggcatggcccctctccaagaagggccattcttccaggtatttcatctgcgttttttagccccaggaagtcaggaggaggggtcagtcaatgacccgacccctactggttaatgtaaatacatacgtaggaataaaaagaagatagcttgtactttcatctgcatattgtaattttatcagattttgtgcggacaatgtgtactcagaacgaatctagtgtcataaattagcgattagttactccagcgcggcaaactgggtgtacgagctttaacctttaagatagcaattatagttgcatcttcatgaaccatgtcatgg

SEQ ID NO: 202770 - DNA, 3979 bp, Zea Mays
gactcagcccactagcccagccccggcaaagcctcacatccatccggagggcgcagcccgtcgctccttctcgccggtcgccgccgcccccctctcatcgtccaaggctgcctccatgcacgccgccgccgccatgccctcccgctgctggcctattgcatcgctttgaaggctaaggatcatcatgatctcagggatatgcatagcttatcagcttgtgcaaagtacctttggagcacttctagggcaacagtgatccgcaatgaggtacttgtcgtattgtctgccatcagcctgttgttcatgaccacctttgggcccttgcgccgccggagcagaaactcgtttgtacagaatggtttcatggttgcatacactttgtcctcgtccctgatatcatacacacttggttcaatgtactcatctgcagtaaagagcagcatgtatcccatttgggcctcatccctgtatctcctcttttgttctgcggactctattacatcttattgtctcaatggcaacaatcaacaaaaggaacagcttattttgtttcttcttttccaaatatatgtcagccaaataactaatggatctgattctaatggctctctagttttttcggtagctgcttttaaatttatggaacgattctgggcataccagctggccaccggatcatggaatttgaacaaaatggttgctgactacatgtatgaggaacaatccagaagtggctcatcttatgatccaaccagcatgaaaggttatcattacttagttgattggcccttggatgagtcaaaactggaagcaaggatgtcatatgcaaaggaattaacagtggatgatgcacagatcattgacatagagaggatatttatgtgcagtgaactaagctccgagctgaaggatgtatgcctttccttctctctttttcttctgctgagaaggcgcttctttgggtttgtctgcgttgaagcttcacagcgaaagacacatgattttgtcttcaagggggttttgtcaaagaatcaggacggaaccctcaattacgacaggatcttcaggttgattgaggttgagttagcttttatgtatgatttcttcttcaccaagtatgctgttctttactatggatctaaaaaggtttcagcaatttggtccctggcatcagccagcttcatgtctgtgacaatctacaagctgatagaaagtgttctttctaaccagaatcggtctgaattcgtgggcacaacaacatctgatgttacaacaacatctgatgttgttgtaacaatactgatagtagcatgcattgttttgcttgagtttatccaagtattacttttttttagcaccatttggtgcagagtatcatttgtttgccattatgttcgagaacaagcaacgaacacaaggagaggcttctgcatgaaactgtttcaaaagttctgctgcatgagattcagggagattattcttaacatggctattggtatcaccaggtcaaggtcaagcgaatactactaccaaaataaacttgggcaatactccttgcttgaatcagtgattagttgcaagtacaagcagagtccacgtaaggtatggtttcacaggtttatgcatcgatattgtagtcttatagtggctccagactttgggtacctttgtaatacaaacaaagactttattcacgcacaacgtatccgcaagaaacatgtgaaacctgcagctatcaagataccagtagaagtaaaaaaggcagttgtccattccctccagcgtacacagggtgtcctagcgaatggagaatcgtcattagtgtacaatgaggtgcatgacctcttatgggcttgcaggcacaatatgctctcagacccaggcaccaactgttacctggacaaggagaatcagacacacatcattttgacttggcacattgcaacgtgttactgcgaggtgcaaacattgaaatgcctttatcctagagttgggggggcactcaagttacatcttgacatcgcaaccatactgtcaaagtactgtgcatacctggtggtctcagcaccgaagttgcttcctgggaactactatgattctagccttgtgtttgatgcagtagcagtggaagctgcacagtttctgcagaaagtggaagacaagtatgaagccttgagaagtttgcctgtatcaacagaaacctccatcttacagagggggatgaagttggcgaggcagctcgaggagatggaatgtgacaagtgttggaaggtgcttgcggatttctgggcagagatgttgctctatatcgcgccttcggaaaatgtgaatgagcatttcgaggcactggcaaatggaggggagtttataacacactggtgggcattgctcacccacgctggcattctagagagggctccaaggaatgtcaacaatgacatagaaaatcaatgggaaggatcatcatcatatggttgcccatctacaactcaggctgcagctgcagcctgtgccacaaatcaacagccaatggctggggaccgtactgtgcaactgattgaaatgaatgtcggagacatagaagatgctaagactgacaggcattatcctggagagatttcatatggtgctgctttaaggcttcgtcgtgcgaactcctacattagcaagtgtagagaagctgctaccttagccaccagcgccacgattaaaccagcaatacgtggaaactgtgagcaagtgaggatgatgattcggcaacaagcatatctaggtcaaaatgtggaactcgcaagtcccagcgcaagcactgctccaagtgagaacaaagagattgaaattgtaatagcatgttcctgccaagttgggctacaggaagaatacattgtttgctccaactatcgcacttggcaaaatctcattattactggcaacagctgcacctgggttggatactggagaaggttgcctgaagagactactgaagctaagctactgatgcgttatttggttcagttaatcagttgtatcctctgcccttgtaggctgttgtacctcacctgtgtcagcaacatttttgtgaatctaaaacagttagcacatcaacaatgctgacagactagaaccgggctttgccggtctggatgtactgcttacgtgcattgatgctagtgtggacagcaaatctctgcactgcatcatcagactgtgttcttgaatgaaaactctggagagctgggacgcaaagacatctgtccgagccaactgcagaagatggaagacggttcagactggaaaatagcagcatgtcatcttagagattttgtgatattggcagcatgcatccagtctgtgtaaatgtcatgtgattcaaagagaactaactggaaaaagaagttctgtatgacggcagcaccttaggcagctgggctctcgtggagttccctatggtgtgcatggcatcaaccgcagagctaagagcgtttcttatcccttgaatatctgcctgaaaacatgaggtctcagtatttcaagatgagaagcaacagattgacgaaacttagttcctggtttatggaacaccaaccactgctccatcggagacaggaaggcgcaggacggtggcagtcagagcctgtgtagttcctgacaaagaatgggcatggcccctctccaagaagggccattcttccaggtatttcatctgcgttttttagccccaggaagtcaggaggaggggtcagtcaatgacccgacccctactggttaatgtaaatacatacgtaggaataaaaagaagatagcttgtactttcatctgcatattgtaattttatcagattttgtgcggacaatgtgtactcagaacgaatctagtgtcataaattagcgattagttactccagcgcggcaaactgggtgtacgagctttaacctttaagatagcaattatagttgcatcttcatgaaccatgtcatgg

SEQ ID NO: 202771 - DNA, 3330 bp, Zea Mays
gactcagcccactagcccagccccggcaaagcctcacatccatccggagggcgcagcccgtcgctccttctcgccggtcgccgccgcccccctctcatcgtccaaggctgcctccatgcacgccgccgccgccatgccctcccgctgctggtccagactccaaagccctcactcctcccgagcgaacacccaactcacccctcgattgctgtctgtcctgtttctgtttggaatgccgcttctttggctgcttccattccatggcggaaaaatcgcagcctttctggatttgcatcggttatctctttgcctgtgcgggtggagctaagctgcccacgtcctgcacgctgtccccgtctccccgacggatacgcccagcccagtcgacgacaggggagcaacacaacagtgatgtagatggattcagattcagtgatgcaggaagcttctcctgaattactagacatgtagacatgatgacaattcgagtaatcaacttgagtgtcggtaatagtcgctggctccaaggttgtcgacttgtcgtggtgaatggtacaaaggcacatccctatcgtcttggcatacccttggagcagctgacttgactttgtgtgtctgctgcactaggtgcttgtataaagtgtgtcctttacgaagccagagggcacatgtcatctgccttatctggagcacacttaggctttagggggagggaggaagggatatcagttcgtcgatccatccaggggatggctaactacacggcctattgcatcgctttgaaggctaaggatcatcatgatctcagggatatgcatagcttatcagcttgtgcaaagtacctttggagcacttctagggcaacagtgatccgcaatgagctggccaccggatcatggaatttgaacaaaatggttgctgactacatgtatgaggaacaatccagaagtggctcatcttatgatccaaccagcatgaaaggttatcattacttagttgattggcccttggatgagtcaaaactggaagcaaggatgtcatatgcaaaggaattaacagtggatgatgcacagatcattgacatagagaggatatttatgtgcagtgaactaagctccgagctgaaggatgtatgcctttccttctctctttttcttctgctgagaaggcgcttctttgggtttgtctgcgttgaagcttcacagcgaaagacacatgattttgtcttcaagggggttttgtcaaagaatcaggacggaaccctcaattacgacaggatcttcaggttgattgaggttgagttagcttttatgtatgatttcttcttcaccaagtatgctgttctttactatggatctaaaaaggtttcagcaatttggtccctggcatcagccagcttcatgtctgtgacaatctacaagctgatagaaagtgttctttctaaccagaatcggtctgaattcgtgggcacaacaacatctgatgttacaacaacatctgatgttgttgtaacaatactgatagtagcatgcattgttttgcttgagtttatccaagtattacttttttttagcaccatttggtgcagagtatcatttgtttgccattatgttcgagaacaagcaacgaacacaaggagaggcttctgcatgaaactgtttcaaaagttctgctgcatgagattcagggagattattcttaacatggctattggtatcaccaggtcaaggtcaagcgaatactactaccaaaataaacttgggcaatactccttgcttgaatcagtgattagttgcaagtacaagcagagtccacgtaaggtatggtttcacaggtttatgcatcgatattgtagtcttatagtggctccagactttgggtacctttgtaatacaaacaaagactttattcacgcacaacgtatccgcaagaaacatgtgaaacctgcagctatcaagataccagtagaagtaaaaaaggcagttgtccattccctccagcgtacacagggtgtcctagcgaatggagaatcgtcattagtgtacaatgaggtgcatgacctcttatgggcttgcaggcacaatatgctctcagacccaggcaccaactgttacctggacaaggagaatcagacacacatcattttgacttggcacattgcaacgtgttactgcgaggtgcaaacattgaaatgcctttatcctagagttgggggggcactcaagttacatcttgacatcgcaaccatactgtcaaagtactgtgcatacctggtggtctcagcaccgaagttgcttcctgggaactactatgattctagccttgtgtttgatgcagtagcagtggaagctgcacagtttctgcagaaagtggaagacaagtatgaagccttgagaagtttgcctgtatcaacagaaacctccatcttacagagggggatgaagttggcgaggcagctcgaggagatggaatgtgacaagtgttggaaggtgcttgcggatttctgggcagagatgttgctctatatcgcgccttcggaaaatgtgaatgagcatttcgaggcactggcaaatggaggggagtttataacacactggtgggcattgctcacccacgctggcattctagagagggctccaaggaatgtcaacaatgacatagaaaatcaatgggaaggatcatcatcatatggttgcccatctacaactcaggctgcagctgcagcctgtgccacaaatcaacagccaatggctggggaccgtactgtgcaactgattgaaatgaatgtcggagacatagaagatgctaagactgacaggcattatcctggagagatttcatatggtgctgctttaaggcttcgtcgtgcgaactcctacattagcaagtgtagagaagctgctaccttagccaccagcgccacgattaaaccagcaatacgtggaaactgtgagcaagtgaggatgatgattcggcaacaagcatatctaggtcaaaatgtggaactcgcaagtcccagcgcaagcactgctccaagtgagaacaaagagattgaaattgtaatagcatgtgagtaatgttgctatatatgtgtcaatgaatgaaatttgtacatatgcatggggcaacattcacaggttcagctggtcatttgtttgtggagccatgaactattatgaagttgtcctgttattctgaaagtaaaagagtgcagagatcatatgtaatgtgacagatatttagtatcaaaatagtgtacaattgtcttaagatgaaattcgtatatatggggcatcttcattcacaggtcctgctgtatgatgcttgctc

SEQ ID NO: 202772 - DNA, 1585 bp, Zea Mays
ttgcttcccagttcccaccccgtggtgccaagctcgcggagccggcgacgcagcaagggatacggtaccctcccgtccacgcgacgacaggacagacacccaccccatcaccggaagcaccgccaaagcccaaagccggccaattccgacgccatggccgacgtcgacgacgacgctgtcctctccgacgtcgacgaggacccactcccgcccccctccacctcttccgcctcttcccacaaatcccttccacaagctcaaccccaatcacagtccgatgcccaggcgcagcagcagcggctgctggacctggccgcggagctcgaggaggagcgccgcctccgccgcgcagccgaggcctccctcgcagaggccgagccccgcgtcgcccgcttcaaggccttcgcgctccaggccgaggccgccaccgcctcctccatgctctcctctggcttcgagaggatctccgccaaggcctccccttcctcgccccccgcaccgctcccgacctcccagaagtactcctccggcctcccggccctcgcgtacggcgttctcaagcgcgccaacgatatcgtcgacgaactcctcgcccagatcgacgccgctaaccgcgaccgcgatcgcgcgcgggagcagatggaacaccgcaactaccagatcgccatcgaggtctctgagcttgaggcatcgctcgcatccaggtctgccgagggcgaatccctctccaagtccctctcccagcgtgaagccgagatctccgagctccgtgataaaatcacctctctcgaggggaagctcgccgcgcagaggcccgtgctcgcggaacagatcgggtgcacctcgaagctgtatcacgagatgcgggaggtggtcaagctggtcgatgccgaagctgtcagtgccctatcggactcggtttttgtctggaaggagactgacgtcgaggagagcctcaaggtgtctctggaagggacgaaattggcctatgagcttgcggcaatagctctggagaaggttggggcttgtatcgatgacaaggagagcaagcttagacgtttggagaacatggtggatggactgattaaagagaaggagcacattagtgtactgctccggaacgcactgcaggccaccacaagtgaggtgttaaaggttgcagaggatggtctgagagaagctggcattgagattggacttaacgagcgaaaggagcacatgctagggagtgtggagaaggacgaggtttataccctggcaggggctcttgagaataccatgaaggagtctcaggtcaaaattattgagctccaacatcttgtcgaagcactaagggcggagtctggtttacttagaacaaggctagaagggcaagagaaggagattggtcagctaagaaagcaaataaaaaatcttgaagagaaggagaaggtggcaaatgaaagcgttgagggtctgatgatggacgtgacagctgctgaagaggagattaaacggtggaagatggcagcagaggaggaagctgaagctggtagatcaattgaacaagagttccaaattcagcgattcccctctgtcgattgtg

SEQ ID NO: 202773 - DNA, 690 bp, Zea Mays
agacttctttgatggaagtcctgatatcatcccttcgcaaggagttggacgaagcaaaccgagctatggtggagctagaaaacaagctgaagttcaaggaagagacagctgctgctgcaatggcggcacgcgatgctgcagagaagtctctaaagctagcagatacgcgatcgtccaggctacgtgagaggctggaggagctcaacaagcagctcgaagaatcagatacgagaaccgagtcggtgaatcgcaatggccataggtacatgtgctggccatggcagtggctgggactgaactacgtgcagttacctctagcggagacagaccagacgtccaacgagatggagctatctgagcccctaataatataggtgctccgacctccatacttgtacagattacagatatatacagatcctgctctttcactagataagggggaacagtagttttttttttgggaggggggttgggttgatgggttcttgtgtagatgttttcgcaatttcttgatgcatgctttgcggaaaacgggcgggtgctggaaggcgccgtgtaattgtaaaaggtaccacttagtgaagatgctgagaagttcattctttgacaagattgttcttgaaacaagtctcgcttgatcttcattgtgataacaatgtgctacactgctactctacttagacggag

SEQ ID NO: 202774 - DNA, 2762 bp, Zea Mays
cttgctcccgtcagactcttgagcggcggccggagccggctactccggcggaaatcgcctcccgagttgcctgatcggctccctgaacgagagtggtcagaatcatcttttcccactcctgccgtctattttcccgactactctacgtgcgctttctctctctgcgcaactaggtgaccgcgaccgcggccaccgccctacgtcacgtacgtgcttgctagagtctagcctcgtcggttccttcgcatggtctcgttcaggcggacccttcgccggcgaccaacacccaccagcaatttactggaagtgtggaaccacttctgatgctgtctttgtaaatattgatggagctagctgagtagaaatggactgcagtcaagatccccaagaagaaagccatcaaagaagggagaatggtgaagaagcagaaaagacggctgactatggaaatgctttgagtcgtaaggaggtaacagaagagcttcttggttgtgtggttcatagtgaggaagaggcgtacaggttgtactgtgattatgggcatcgaatcggttttagcgtgcggaagggcaaacagtcttactttattggtaccaagaatattcgaacaaaggattactactgctcaaaggaagggcttaaatacgatgagcctgttacagaagcaaattttaatcgaccagacacaagaactaattgcaaagcaatgatccgctttagagttgacgagaaggggcggtggacagttatacgctttgttcctgtacataatcaccagttggcaaaacctggagaaagacacatgctgagatcagccaaatcgcttgctgttggcaaatcaggtgttatagatccattagcatctacagaggcacatccaattaatggtttctctgatatgacaggtgatatagttgagaattcagggtatactataagggaatgttacaatcaagtgggcatgcagagtataacagtaattgaggcaggggatagccaaagtcttgtcagctatttcaagcataaaactaatgaggaaggcatgttctattgggacgtccaagttgatcaagaagggcgcatgacgaacttcttctacagggatggtaaaagtagaaatgattatggctgctttggagatgccattatatttgatacaacctaccgcacaaacaaatataacttgatatgcgccccatttgttggtgttgaccaccattggcaaaatgttgtttttggctgcgcgttcttgttagacgagtctgtaacttcctatgcctgggtatttaaatcattcttggagtcaatgggagggcgatcaccaaaatcaatattcactgatcaggatgaagctattatgcaggcagtcaaacaggttttccctaatacgcaacattgtttttcctactggcatattctgaagaatgctcaatctcatttaggctcactaaatacgtctcaagcatttcaaagtatgtttaccaagtgtatgcaaggatctgactcagaagaggattttaaggaatcatggactgcaatgatccaggaatacaagctacaggataataattggttgattgacctttatacattccatcataaatggtgctcggcgtttaacaaagatacatttgatggtggaattaattcttctcagtggggggaggtttcaagtaatattctcaatggaatttctgatgaaaatacctctcttacacgttttgcccttttgctagaaaaggttgtcaaggatctacgtagaaatgaatctgaagaggattttcgatgtagccaaactgctccagtccgtgcaattaagcatagtaccgttttgaagcaagctgcagaatcatatacacataggatctataaattatttgaagcagaatttctggatgggtgtggagcaacttcatgccatgaaacttcgagtggtggaaatttattgaggtttggaattacaatgcaggggaggggttcaaaagtatgggatgttgttcttgacacttccaccatggagatcagttgtggttgtagaaagtttgaaaggatgggtcttctttgttcgcatgccctcaaagtcttcaccctgcagaatgttgacacaattccagaaaagtatgttttgaaacgctggacaaaagatgccaggagaagcatgtatacacttgctcaggatgattcaacccaacaggaatgcacagaggctgaacttgcatatcgcaatcgggcaatgcagtatgcatataacctaattataaagagccaggaactggaagaatcacgaaaaatattctgggactcccttgaaactggagagaaggcactggaagtgttctttgaaatgagaaacatgcgcactcaagcagccaaggatgctgataagaatgtaaagaagaagaaaaaaacatcaaaaggaacaaacccaaaaaaagctaaacaagccccaggagtttcctcaactggtccagagctgatagtccatactaatgagcatcaatttcaatcttcacaagatgctcagggtaatgcaaccattggaagaccatattactatcaggcttttccaaatgcccctatacaaccaaaccagatgtacatgcatacaaatatgcacacaatgcccctttgcacaccgcaggagctgtctgcatatgctgcaatacgccccaattcaatgtttggtggtgccaagaacatctgaaggatattaagcagagaaagtcaagactagaggcagcggcagctcgcaggcaatcaac

SEQ ID NO: 202775 - DNA, 3575 bp, Zea Mays
cttgctcccgtcagactcttgagcggcggccggagccggctactccggcggaaatcgcctcccgagttgcctgatcggctccctgaacgagagtggtcagaatcatcttttcccactcctgccgtctattttcccgactactctacgtgcgctttctctctctgcgcaactaggtgaccgcgaccgcggccaccgccctacgtcacgtacgtgcttgctagagtctagcctcgtcggttccttcgcatggtctcgttcaggcggacccttcgccggcgaccaacacccaccagcaatttactggaagtgtggaaccacttctgatgctgtctttgtaaatattgatggagctagctgagtagaaatggactgcagtcaagatccccaagaagaaagccatcaaagaagggagaatggtgaagaagcagaaaagacggctgactatggaaatgctttgagtcgtaaggaggtaacagaagagcttcttggttgtgtggttcatagtgaggaagaggcgtacaggttgtactgtgattatgggcatcgaatcggttttagcgtgcggaagggcaaacagtcttactttattggtaccaagaatattcgaacaaaggattactactgctcaaaggaagggcttaaatacgatgagcctgttacagaagcaaattttaatcgaccagacacaagaactaattgcaaagcaatgatccgctttagagttgacgagaaggggcggtggacagttatacgctttgttcctgtacataatcaccagttggcaaaacctggagaaagacacatgctgagatcagccaaatcgcttgctgttggcaaatcaggtgttatagatccattagcatctacagaggcacatccaattaatggtttctctgatatgacaggtgatatagttgagaattcagggtatactataagggaatgttacaatcaagtgggcatgcagagtataacagtaattgaggcaggggatagccaaagtcttgtcagctatttcaagcataaaactaatgaggaaggcatgttctattgggacgtccaagttgatcaagaagggcgcatgacgaacttcttctacagggatggtaaaagtagaaatgattatggctgctttggagatgccattatatttgatacaacctaccgcacaaacaaatataacttgatatgcgccccatttgttggtgttgaccaccattggcaaaatgttgtttttggctgcgcgttcttgttagacgagtctgtaacttcctatgcctgggtatttaaatcattcttggagtcaatgggagggcgatcaccaaaatcaatattcactgatcaggatgaagctattatgcaggcagtcaaacaggttttccctaatacgcaacattgtttttcctactggcatattctgaagaatgctcaatctcatttaggctcactaaatacgtctcaagcatttcaaagtatgtttaccaagtgtatgcaaggatctgactcagaagaggattttaaggaatcatggactgcaatgatccaggaatacaagctacaggataataattggttgattgacctttatacattccatcataaatggtgctcggcgtttaacaaagatacatttgatggtggaattaattcttctcagtggggggaggtttcaagtaatattctcaatggaatttctgatgaaaatacctctcttacacgttttgcccttttgctagaaaaggttgtcaaggatctacgtagaaatgaatctgaagaggattttcgatgtagccaaactgctccagtccgtgcaattaagcatagtaccgttttgaagcaagctgcagaatcatatacacataggatctataaattatttgaagcagaatttctggatgggtgtggagcaacttcatgccatgaaacttcgagtggtggaaatttattgaggtttggaattacaatgcaggggaggggttcaaaagtatgggatgttgttcttgacacttccaccatggagatcagttgtggttgtagaaagtttgaaaggatgggtcttctttgttcgcatgccctcaaagtcttcaccctgcagaatgttgacacaattccagaaaagtatgttttgaaacgctggacaaaagatgccaggagaagcatgtatacacttgctcaggatgattcaacccaacaggaatgcacagaggctgaacttgcatatcgcaatcgggcaatgcagtatgcatataacctaattataaagagccaggaactggaagaatcacgaaaaatattctgggactcccttgaaactggagagaaggcactggaagtgttctttgaaatgagaaacatgcgcactcaagcagccaaggatgctgataagaatgtaaagaagaagaaaaaaacatcaaaaggaacaaacccaaaaaaagctaaacaagccccaggagtttcctcaactggtccagagctgatagtccatactaatgagcatcaatttcaatcttcacaagatgctcagggtaatgcaaccattggaagaccatattactatcaggcttttccaaatgcccctatacaaccaaaccagatgtacatgcatacaaatatgcacacaatgcccctttgcacaccgcaggagctgtctgcatatgctgcaatacgccccaattcaatgtttggtggtgccaagaacatctgaaggatattaaggcctcaatccgctgtgggcgtgagtttctccccttccaaggcagtttcctgcatgggttcagcttgagttgagctgctgagttgtgaacgaggaagcaaccaaagcaactgggagcctgggagagtgggagtggaggagctggctgccggcactggccgaggaactactcagtccaagacgtgtgtcgatctgaagtgacgctgacggctgacctatcacctatgttttgggaggggctcagggccggcaacagccatggccgggcaggtctccacacagtggccactggagctagaactggacctggaacggcgccccacctgccaaacggcaatgctgatgaccgcttgacagctgcttccgatgggctggccacctcccactgcccacatatgaaagggaacctggaactgtgtttgctcggcaaccagcactggtttggggaaacagaaagggtacataattgtagattgagagaaaaattagaggatgcagctgttgcttgggttcagtggtgaaggaagcagctagcagcttcttgggttcattcaagagagattggagaagggggaaggattggaaatgttgcttctgattcgcttgaactctgaatttctgattgtttccttgttcacagaatgtagtgtcatgcataacctgggttgccacgccttgtttctgaggcgtgacatgtgactgtcgtgatggtgtttttgaaatttcggttggtaagaaatgctgaaagaagaaatggcgtcattacgttcgttgcattgctttgcctattttgcgtgtttaatggaatatgattgttgtatggcacttcactctgaatgtgagttgttttatgctgaggtcc

SEQ ID NO: 202776 - DNA, 3836 bp, Zea Mays
cttgctcccgtcagactcttgagcggcggccggagccggctactccggcggaaatcgcctcccgagttgcctgatcggctccctgaacgagagtggtcagaatcatcttttcccactcctgccgtctattttcccgactactctacgtgcgctttctctctctgcgcaactaggtgaccgcgaccgcggccaccgccctacgtcacgtacgtgcttgctagagtctagcctcgtcggttccttcgcatggtctcgttcaggcggacccttcgccggcgaccaacacccaccagcaatttactggaagtgtggaaccacttctgatgctgtctttgtaaatattgatggagctagctgagtagaaatggactgcagtcaagatccccaagaagaaagccatcaaagaagggagaatggtgaagaagcagaaaagacggctgactatggaaatgctttgagtcgtaaggaggtaacagaagagcttcttggttgtgtggttcatagtgaggaagaggcgtacaggttgtactgtgattatgggcatcgaatcggttttagcgtgcggaagggcaaacagtcttactttattggtaccaagaatattcgaacaaaggattactactgctcaaaggaagggcttaaatacgatgagcctgttacagaagcaaattttaatcgaccagacacaagaactaattgcaaagcaatgatccgctttagagttgacgagaaggggcggtggacagttatacgctttgttcctgtacataatcaccagttggcaaaacctggagaaagacacatgctgagatcagccaaatcgcttgctgttggcaaatcaggtgttatagatccattagcatctacagaggcacatccaattaatggtttctctgatatgacaggtgatatagttgagaattcagggtatactataagggaatgttacaatcaagtgggcatgcagagtataacagtaattgaggcaggggatagccaaagtcttgtcagctatttcaagcataaaactaatgaggaaggcatgttctattgggacgtccaagttgatcaagaagggcgcatgacgaacttcttctacagggatggtaaaagtagaaatgattatggctgctttggagatgccattatatttgatacaacctaccgcacaaacaaatataacttgatatgcgccccatttgttggtgttgaccaccattggcaaaatgttgtttttggctgcgcgttcttgttagacgagtctgtaacttcctatgcctgggtatttaaatcattcttggagtcaatgggagggcgatcaccaaaatcaatattcactgatcaggatgaagctattatgcaggcagtcaaacaggttttccctaatacgcaacattgtttttcctactggcatattctgaagaatgctcaatctcatttaggctcactaaatacgtctcaagcatttcaaagtatgtttaccaagtgtatgcaaggatctgactcagaagaggattttaaggaatcatggactgcaatgatccaggaatacaagctacaggataataattggttgattgacctttatacattccatcataaatggtgctcggcgtttaacaaagatacatttgatggtggaattaattcttctcagtggggggaggtttcaagtaatattctcaatggaatttctgatgaaaatacctctcttacacgttttgcccttttgctagaaaaggttgtcaaggatctacgtagaaatgaatctgaagaggattttcgatgtagccaaactgctccagtccgtgcaattaagcatagtaccgttttgaagcaagctgcagaatcatatacacataggatctataaattatttgaagcagaatttctggatgggtgtggagcaacttcatgccatgaaacttcgagtggtggaaatttattgaggtttggaattacaatgcaggggaggggttcaaaagtatgggatgttgttcttgacacttccaccatggagatcagttgtggttgtagaaagtttgaaaggatgggtcttctttgttcgcatgccctcaaagtcttcaccctgcagaatgttgacacaattccagaaaagtatgttttgaaacgctggacaaaagatgccaggagaagcatgtatacacttgctcaggatgattcaacccaacaggaatgcacagaggctgaacttgcatatcgcaatcgggcaatgcagtatgcatataacctaattataaagagccaggaactggaagaatcacgaaaaatattctgggactcccttgaaactggagagaaggcactggaagtgttctttgaaatgagaaacatgcgcactcaagcagccaaggatgctgataagaatgtaaagaagaagaaaaaaacatcaaaaggaacaaacccaaaaaaagctaaacaagccccaggagtttcctcaactggtccagagctgatagtccatactaatgagcatcaatttcaatcttcacaagatgctcagggtaatgcaaccattggaagaccatattactatcaggcttttccaaatgcccctatacaaccaaaccagatgtacatgcatacaaatatgcacacaatgcccctttgcacaccgcaggagctgtctgcatatgctgcaatacgccccaattcaatgtttggtggtgccaagaacatctgaaggatattaaggtccagattcatgtggatgtcattggaaaaccttattgagactttcgctatcaactccgctttgatctctgtggacccatttatggaggcctggtggcacttcatgtttggttggttcaggggctcttcgttctgatctttagggaagcggttattctggctgttgcagtgcaggctgtgcagccccttatccatatagcagtggccagtggcttgctattaatatcactcacaggcaattttagggttgtaaactgtaaggcctcaatccgctgtgggcgtgagtttctccccttccaaggcagtttcctgcatgggttcagcttgagttgagctgctgagttgtgaacgaggaagcaaccaaagcaactgggagcctgggagagtgggagtggaggagctggctgccggcactggccgaggaactactcagtccaagacgtgtgtcgatctgaagtgacgctgacggctgacctatcacctatgttttgggaggggctcagggccggcaacagccatggccgggcaggtctccacacagtggccactggagctagaactggacctggaacggcgccccacctgccaaacggcaatgctgatgaccgcttgacagctgcttccgatgggctggccacctcccactgcccacatatgaaagggaacctggaactgtgtttgctcggcaaccagcactggtttggggaaacagaaagggtacataattgtagattgagagaaaaattagaggatgcagctgttgcttgggttcagtggtgaaggaagcagctagcagcttcttgggttcattcaagagagattggagaagggggaaggattggaaatgttgcttctgattcgcttgaactctgaatttctgattgtttccttgttcacagaatgtagtgtcatgcataacctgggttgccacgccttgtttctgaggcgtgacatgtgactgtcgtgatggtgtttttgaaatttcggttggtaagaaatgctgaaagaagaaatggcgtcattacgttcgttgcattgctttgcctattttgcgtgtttaatggaatatgattgttgtatggcacttcactctgaatgtgagttgttttatgctgaggtcc

SEQ ID NO: 202777 - DNA, 2830 bp, Zea Mays
cttgctcccgtcagactcttgagcggcggccggagccggctactccggcggaaatcgcctcccgagttgcctgatcggctccctgaacgagagtggtcagaatcatcttttcccactcctgccgtctattttcccgactactctacgtgcgctttctctctctgcgcaactaggtgaccgcgaccgcggccaccgccctacgtcacgtacgtgcttgctagagtctagcctcgtcggttccttcgcatggtctcgttcaggcggacccttcgccggcgaccaacacccaccagcaatttactggaagtgtggaaccacttctgatgctgtctttgtaaatattgatggagctagctgagtagaaatggactgcagtcaagatccccaagaagaaagccatcaaagaagggagaatggtgaagaagcagaaaagacggctgactatggaaatgctttgagtcgtaaggaggtaacagaagagcttcttggttgtgtggttcatagtgaggaagaggcgtacaggttgtactgtgattatgggcatcgaatcggttttagcgtgcggaagggcaaacagtcttactttattggtaccaagaatattcgaacaaaggattactactgctcaaaggaagggcttaaatacgatgagcctgttacagaagcaaattttaatcgaccagacacaagaactaattgcaaagcaatgatccgctttagagttgacgagaaggggcggtggacagttatacgctttgttcctgtacataatcaccagttggcaaaacctggagaaagacacatgctgagatcagccaaatcgcttgctgttggcaaatcaggtgttatagatccattagcatctacagaggcacatccaattaatggtttctctgatatgacaggtgatatagttgagaattcagggtatactataagggaatgttacaatcaagtgggcatgcagagtataacagtaattgaggcaggggatagccaaagtcttgtcagctatttcaagcataaaactaatgaggaaggcatgttctattgggacgtccaagttgatcaagaagggcgcatgacgaacttcttctacagggatggtaaaagtagaaatgattatggctgctttggagatgccattatatttgatacaacctaccgcacaaacaaatataacttgatatgcgccccatttgttggtgttgaccaccattggcaaaatgttgtttttggctgcgcgttcttgttagacgagtctgtaacttcctatgcctgggtatttaaatcattcttggagtcaatgggagggcgatcaccaaaatcaatattcactgatcaggatgaagctattatgcaggcagtcaaacaggttttccctaatacgcaacattgtttttcctactggcatattctgaagaatgctcaatctcatttaggctcactaaatacgtctcaagcatttcaaagtatgtttaccaagtgtatgcaaggatctgactcagaagaggattttaaggaatcatggactgcaatgatccaggaatacaagctacaggataataattggttgattgacctttatacattccatcataaatggtgctcggcgtttaacaaagatacatttgatggtggaattaattcttctcagtggggggaggtttcaagtaatattctcaatggaatttctgatgaaaatacctctcttacacgttttgcccttttgctagaaaaggttgtcaaggatctacgtagaaatgaatctgaagaggattttcgatgtagccaaactgctccagtccgtgcaattaagcatagtaccgttttgaagcaagctgcagaatcatatacacataggatctataaattatttgaagcagaatttctggatgggtgtggagcaacttcatgccatgaaacttcgagtggtggaaatttattgaggtttggaattacaatgcaggggaggggttcaaaagtatgggatgttgttcttgacacttccaccatggagatcagttgtggttgtagaaagtttgaaaggatgggtcttctttgttcgcatgccctcaaagtcttcaccctgcagaatgttgacacaattccagaaaagtatgttttgaaacgctggacaaaagatgccaggagaagcatgtatacacttgctcaggatgattcaacccaacaggaatgcacagaggctgaacttgcatatcgcaatcgggcaatgcagtatgcatataacctaattataaagagccaggaactggaagaatcacgaaaaatattctgggactcccttgaaactggagagaaggcactggaagtgttctttgaaatgagaaacatgcgcactcaagcagccaaggatgctgataagaatgtaaagaagaagaaaaaaacatcaaaaggaacaaacccaaaaaaagctaaacaagccccaggagtttcctcaactggtccagagctgatagtccatactaatgagcatcaatttcaatcttcacaagatgctcagggtaatgcaaccattggaagaccatattactatcaggcttttccaaatgcccctatacaaccaaaccagatgtacatgcatacaaatatgcacacaatgcccctttgcacaccgcaggagagctgcctatcttttcattaagataggggaaaacaaaaggaaacaacaagggagaggcacgaggcacactctcagccacccccggacaaaatccaacttacacacccacactgatgcctaaaattaaataatatgaccacaaccatgagtccatgaccaaggaagactaactgcactcaaaggggg

SEQ ID NO: 202778 - DNA, 767 bp, Zea Mays
ttcgcgttgcatcgaatccttatcgttttctgtttttgttttgcccattttttcgctggcgatttatgccatcacatctggcgctgctgtcgtgcctgctggtactgctcctctctttcgacaagttcctcttccactacctgaagcgccgctggttctccggcggcagcggcgccaccgtcccaaggccccccgccaaatcgaggcggaacatggcggccgccaagtggagcgagacggccatgctcgttatcgacatgcagaaggacttcgtggacccggcgatgcgcagcccgatgctggtggccggtggcgaggccgtcgtccctgccgttgccggggccgtcgccgtcgcaagggagcgcggcattttcgtcgtctgggttgtcagagagcatgacccttctggaagagatgttgaacttttccgtaggcaccattattctgggggaaagggtccaacagtgaaaggtctgaaaggagcggagctggctgatgggcttgttatcaaagaaggggagtacaagttggtgaagactagatttagtgctttcttcgcaacacatcttgattctgtcctgaaaactgcaggaataaagaacttggttattgttggagttcagacaccaaattgcattcggcagactgtgttcgatgctatagcactggactatgagaaagttacggttctaattgatgcaacagctgctgcaagaccagaaatccatttgtatatttaagttatggtattgggaggtgatgagcca

SEQ ID NO: 202779 - DNA, 770 bp, Zea Mays
cttttgatgcgtgcgttctaagttgtcagagagcatgacccttctggaagagatgttgaacttttccgtaggcaccattattctgggggaaagggtccaacagtgaaaggtctgaaaggagcggagctggctgatgggcttgttatcaaagaaggggagtacaagttggtgaagactagatttagtgctttcttcgcaacacatcttgattctgtcctgaaaactgcaggaataaagaacttggttattgttgacaccaaattgcattcggcagactgtgttcgatgctatagcactggactatgagaaagttacggttctaattgatgcaacagctgctgcaagaccagaaatccatttgtccaatatcagggatatgaagaacatcggagtggacacgccaaccctggaagaatggcgccgctagggttactctgtctcttggcagcaccagcaaacggagatgacctgttgtatgagatgcatgcagcacctccctgcatctacttctttgcttctaatctgcgtctgactgcgcgtacgttgttgtattgttatacccagtgcggtagaacaattgcagatggtggtatatggtatatgcaaacttgtaatccctcatatgtagagttcagttcaccataccatgtgatgtgcttgctttcacgtcgcagcagatggcagtatggcactcaatccactccacatgccttgttatcttctttcttcatgagtcggcaaatgatgcctaaactgttgaaaaaataaca

SEQ ID NO: 202780 - DNA, 1189 bp, Zea Mays
aactgagcaaaagacatctcactctcctcaccccaaattaggatatggcaggtgctaaaatttagcacatccaaacactacatgtgaaaaaatggagtttgatttccactccaccacccccggaagaaaaaaactgtccaatcgaatcaaagagagaaaaaaaatcctaaaccctagcatctcccatggacgacagcgatggcggactgagcttcgatttcgagggcggcctcgactctgccccagcttctgggggcgggggccccgtgccgtcctccaccgaccccggcgcgggtgtcgggggaggcggcgacgggctgggtatgcacgggcgcggccgaggtcgcgggagctaccgccaaacggtgtgccggcactggcttcgcggcctctgcatgaagggcgaggcctgcggattcctgcaccagttcgacaaggcccgcatgcccgtctgccgcttcttccgcgacttcggcgagtgccgcgagcccgactgcgcgtacaagcactcgtacgacgacgtcaaggagtgcaacatgtacaagatgggtttttgtcccaatggtcctaattgccggtataagcatatcaagctccctgggccaccgccttctgttgaggaagttcttcagaagattttgcagatgcgctcttttaacagatacagtcagaatagaaataataattataatcatcaaggggagagacctcaacatccacaaggttctgggttgcctaaccaaaactcggcagaaaatgccactgccgtggatccaccagctggtggacaacaagcacaaacgctgaatcaacaaccaccacagcagcagcagaagccaaatacaaatgatcaggcccaaggtgtttcaaatggtcatcaagccactagaatcgccacaccccttccacaaggaccatctaggtgtacttcattgttaaaagttgcaatcgggagaatctggaaatatcagttcagcaaggaatttgggctacacagaggagtaacgaggctaaactcaatgaagcttttgaatccactgagaatgttattttgatattctcaattaatagaactcgcaatttccagatgacttctaggattggtggctacattggtggtggaaattggaaatctgctcatggaacagcacattttggtcggaacttctctatgcagtggcttaaggtg

SEQ ID NO: 202781 - DNA, 1238 bp, Zea Mays
tagctcataaagtatgctagaatgagctaaaagtgatccaactgagcaaaagacatctcactctcctcaccccaaattaggatatggcaggtgctaaaatttagcacatccaaacactacatgtgaaaaaatggagtttgatttccactccaccacccccggaagaaaaaaactgtccaatcgaatcaaagagagaaaaaaaatcctaaaccctagcatctcccatggacgacagcgatggcggactgagcttcgatttcgagggcggcctcgactctgccccagcttctgggggcgggggccccgtgccgtcctccaccgaccccggcgcgggtgtcgggggaggcggcgacgggctgggtatgcacgggcgcggccgaggtcgcgggagctaccgccaaacggtgtgccggcactggcttcgcggcctctgcatgaagggcgaggcctgcggattcctgcaccagttcgacaaggcccgcatgcccgtctgccgcttcttccgcgacttcggcgagtgccgcgagcccgactgcgcgtacaagcactcgtacgacgacgtcaaggagtgcaacatgtacaagatgggtttttgtcccaatggtcctaattgccggtataagcatatcaagctccctgggccaccgccttctgttgaggaagttcttcagaagattttgcagatgcgctcttttaacagatacagtcagaatagaaataataattataatcatcaaggggagagacctcaacatccacaaggttctgggttgcctaaccaaaactcggcagaaaatgccactgccgtggatccaccagctggtggacaacaagcacaaacgctgaatcaacaaccaccacagcagcagcagaagccaaatacaaatgatcaggcccaaggtgtttcaaatggtcatcaagccactagaatcgccacaccccttccacaaggaccatctaggtacttcattgttaaaagttgcaatcgggagaatctggaaatatcagttcagcaaggaatttgggctacacagaggagtaacgaggctaaactcaatgaagcttttgaatccactgagaatgttattttgatattctcaattaatagaactcgcaatttccaggggtgtgcaaagatgacttctaggattggtggctacattggtggtggaaattggaaatctgctcatggaacagcacattttggtcggaacttctctatgcagtggcttaaggtg

SEQ ID NO: 202782 - DNA, 1954 bp, Zea Mays
atgacacaacccacctcaccgctcctaacccgcgagcggttcatccgattccgcccccagtccttgcatgtccccacggttccgtgaaacgtctcgtcgtgtttggtctcatcatagggacgtggctaatcgcgatcctgctgtctccttggaggttccggacgcatgtgaccgtggaattccattcctcgtgcgcgattaggttgagacgtcgtgatcctcgtgcgcccgccgtacaaacccgtgatcctaattgtgctgatggatcgattggaaatgcaggacgactcgaagagatccaataggcccaaatattctaagtttacgcagcaagagcttccagcatgcaagccactgctaactccagcaattgtcatttccgccttcttactggttggcatcctattcgtcccaattggtctcgcatcgctttctgcgtcacaagagattgtggagctggtagatagatacgatacaagttgtgtgcccgtggctgacaaagttgggttcattcagaacactaaaacggacaaatcatgcacaagaactctaactatccctaagcatatgaagagcccaattcaaatatattaccagatcggtgacttctatcaaaaccatcgacggtatgtgaaaagtcgcagtgataaacaattgcgatataaagatgctgcacacttgacaaaagattgtgagcctgaagtttatagtgctggcggtgccccaatcgttccatgtggcctcgttgcttggagtttgttcaatgatacatatacaatttcggtcaacaagaaagctattgtagtgaataaaaaggatatagcctggcagagtgacaagaagaaaaaatttggcagtgatgtttatcccagtaactttcagaacggaaatcttataggtggcgctaagctaaatgagagcataccggtatgtgagagagtttctgtgtcttcaacactaagtgagcaagaagatctcattgtttggatgagaactgctgccctcccaactttcagaaagctttatggaagaattgagacagatattatggaaaatgatgaactcacagtggttatacagaacaactataacacatacagttttggagggtcaaaagcactggtcctctcaactacatcttggattggaggcaaaaataatttcattggtttcgcatatctgattgttggtggtttttgccttttccttgcactggtttttgtagttctctacatgattaagccaaggactcttggagacacctctttcttgtcatggaataggggtaccatggactatccaagctaatacatcgaaacattctctttataaaaatagtggaaggacccattgccaattggactgcactgcagagtctcatgcattgctcacctcaaagaatgacactgcaaacaaaggtggaaacgatgttactcctatctgttacggatgcactacctgtgtctgataaaggaaagtacaattctagcatatgatacctcaaacttgattaattatagataaaagaagttcagcttgtgtttcagaaacgtcatgctgagtacaattctagcatatgataacttactgcagcttggtaattacgatttactagctgcacattcccaaatctgcagcatgtgcgttcaacgatgaggtgtttggacgaaggagttttgcaccttcttccattgttaagagcagtagatggtgaggaagtacctggagaggtcgtggtgtcgacggagaagctggcgagggggatgacgaacgacttaatcctccccgtgcagtacttcgtcttggatgccatcttggacgtgttctgcagtacggtgagcatgagcacttctcagaatccggtggagcaagcaggcaagctgcatgcagctccgtctccgaacgagacctacctgcatgagaaggtagctcttgccatcgccggagttcttga

SEQ ID NO: 202783 - DNA, 1270 bp, Zea Mays
ctccagtctccctctcctctcttcgtcctcactcctcgacgtttcgtcggggtctctcgccgtcgctctctctgctctccaccatcctcctccccctcccctcgacctctcatcctcctcctgcttccccgcccggtcaacccataatccaaggcatccctgtgctgatggatcgattggaaatgcaggacgactcgaagagatccaataggcccaaatattctaagtttacgcagcaagagcttccagcatgcaagccactgctaactccagcaattgtcatttccgccttcttactggttggcatcctattcgtcccaattggtctcgcatcgctttctgcgtcacaagagattgtggagctggtagatagatacgatacaagttgtgtgcccgtggctgacaaagttgggttcattcagaacactaaaacggacaaatcatgcacaagaactctaactatccctaagcatatgaagagcccaattcaaatatattaccagatcggtgacttctatcaaaaccatcgacggtatgtgaaaagtcgcagtgataaacaattgcgatataaagatgctgcacacttgacaaaagattgtgagcctgaagtttatagtgctggcggtgccccaatcgttccatgtggcctcgttgcttggagtttgttcaatgatacatatacaatttcggtcaacaagaaagctattgtagtgaataaaaaggatatagcctggcagagtgacaagaagaaaaaatttggcagtgatgtttatcccagtaactttcagaacggaaatcttataggtggcgctaagctaaatgagagcataccggtatgtgagagagtttctgtgtcttcaacactaagtgagcaagaagatctcattgtttggatgagaactgctgccctcccaactttcagaaagctttatggaagaattgagacagatattatggaaaatgatgaactcacagtggttatacagaacaactataacacatacagttttggagggtcaaaagcactggtcctctcaactacatcttggattggaggcaaaaataatttcattggtttcgcatatctgattgttggtggtttttgccttttccttgcactggtttttgtagttctctacatgattaagccaaggactcttggagacacctctttcttgtcatggaataggggtaccatggactatccaagctaatacatcgaaacattctctttataaaaatagtgggattataggatccatgggtgtgg

SEQ ID NO: 202784 - DNA, 1764 bp, Zea Mays
agggaatccactccgtctcagtttgaattggctggttgcttgcctgtggcggccggtcctccccgtccccggcggttataaaaccggcaagccacgcacgccacgccttccggctccccgcagccccacgtcggcacatcccacgttcccccctgctccgcaagcgagcgctggccgtgcgggtcgcgaccacttccaccacctccaccactcccctccccaaccgccgccgccgccttattactcggccgcacccgccccgccgccccggtccatgagtccatcctccctctagctagcactaatcgtccatccagtctcacagtcaagctccccgaccaccagcgcgcctcgagctcgagcttccctcctgacagcgtgctggtcgcttcaatggcatctcgggcgcacctgccgggctcgccggcctcgatcgccgtcctcatcctctccttcttccaagggtcggtatgcggcatcacgttcaccttcaccaaccgctgcggcgacacggtgtggccgggcctgctgtccggctcggggacgccgccgctggagaccacgggcttcgcgctcgcgccggggcagtcgcgctcgctgtacgcgccgcaggggtggtcgggccgcttctggggccgctccggctgcgccttcgacgcctccggcaaggggtcctgcgccacgggcgactgcggctccggcgaagtcgagtgccgcggcgcgggggcgtcgccgcccgccacgctcgccgagttcacgctcgacggcgacggcggcaaggacttctacgacgtcagcctcgtcgacggctacaacctgcccatgctcgtgcagcccgccgcggccggctgccccgacacggggtgccttgtcgacctcaacgagcggtgccccgacgagctccgcgccgacggcggccgcgcctgccgcagcgcctgcgaggcgttcggcagccccgagtattgctgcaacggcgcctacggcaaccccaacacctgccacccgtcccagtactcgcagctcttcaagtcggcgtgccccaagtcctacagctacgcctacgacgacgccacatccaccttcacatgcaaccacaccgattacaccatcaccttctgccccgaatcaactccatccagatccaaacattcgtctcggaggccaagccacgagcaactggaagattcagtgtggcttgcatccttgaaggcaagtggcgccagttctatgaaaataacgtcatggtggtcggcgcccactgtgttccgatctggattagcaattgcagtggcgaccttgcttggtgcacaaattgcaccggatcatcctgtggtcggcttgctatgattcggcaaggttgcggttcttgattcttaggagccatccaagttattttcagaccggaagcagattagagcggtagtagatcagcaatggggatagaattctgtgtaggttttttgttggtggataggtgctagcgctagagaaggaacgatgtgttacaagttggcaatcggaattccatgaatgcattacataagcacattgcctttcagaaacattgctctttgaattataatcttctgtgtgcatcaactgtttttctttggggtggcggggggcgtgatccacgccgcacgctgatccggcgtcactttggaatgagaataaaatatacgatctgatgttctgttatcatcgggtccttgtttctatttttccagtaaggcgtataaacaatctcaaatggattttgtaacc

SEQ ID NO: 202785 - DNA, 3861 bp, Zea Mays
ttccagttccatgccgcatttcctttccatttctgttgctctcctctctttacccgtcgccgccctcgccctcgccaccacccgcacccgccgcgcggcccccattcgcctcgatttcgccggcggcgatgtacggcaacgacaactggatcaacagctatctcgacgccatcctcgatgccggcaagggcgtcgcggccgcggccgcgggcgccgtcaggggccggggcggaggctggggcggggaccggccctcgctgctcctccgcgagcgcggccacttctcccccgcgcgctactttgtcgaggaggtcatcaccggctacgacgagaccgacctctacaagacctggctccgggcgaacgcgatgcggagcccgcaggagaagaacacgcggctggagaacatgacctggaggatctggaacctcgccaggaagaagaaggagaaatgtctgaagatctttttgaaggagtgaagggagaagacgctggtgatccatctgttgcctacggtgacagcacaactgggaacacacctaggaccagtttatttgacaagctatacatagtgttgatcagtctgcatggcctgatacgtggagagaacatggagcttggccgtgattcagatactggtggccaggtcaaatatgtcgtggagcttgctaaagcattaagttcatgtcctggagtttaccgggttgatctattgacaagacaaatcttagccccaaattttgatcgtggctatggtgaactagatgagctgctggcttcgacaagtttcaagaactttagatgcgaacgaggagagaacagtggtgcacatatcatcagaataccatttggccccaaagacaagcatctagctaaagaaaatatctggcctttcattcaggaatttgttgatggtgcactaggtcatattgtgcgcatgtcaaaaactataggcgaagaaactggcagtgtgtgtccagtgtggcctactgtgattcatggccattatgccagtgcaggagttgctgctgctctattatctggagcacttaatgttcccatgttgtttaccgggcattttcttggtaaagataagctggaagagcttctcaagcaaggtaggcagacaagagaacaaataaatgtgacatacaaaataatgcgccgaattgaggcagaggagttgtctcttgatgcatctgaaataattatcgcaagcacacggcaagaaatagaagaacaatggaacttgtatgatggttttgaagtcatgcttgcgaggaagctccgtgcgttagtcaagcgtggtgctaactgttatggtcgttatatgcctcgtatggttataattcctccaggagttgaattcggccaattgattcatgattttgatatgtatggagatgaagataaccaatctccagccttggatccatctatttggtttgagataatgcggttcttcacaaatcctaggaaacctatgattttggctattgctcgtccatattctgaaaagaatattgcaacacttgtgaaggcatttggtgaatgccatccgttgagggaacttgctaaccttacactgataatgggcaaccgtgaggctatttccaaaatgaacaaaatcagtgcagctgttttgacatcggtgcttacattgattgatgaatatgatttatatggtcaagtggcatacccaaagcttcacaagcactctgaagttcctgatatttatcgtttagcagcaagaacaaagggcgcttttgtaaatgttgcttattttgaacaatttggtgtcaccttgatagaggctgccatgcacgggttgcctgttattgcaacaaaaaatggggctcctgttgaaatttatcaggttctggaaaatggtctccttgttgatccccatgatcagcatgcaattgcagatgccctctataagatgctttctgaaaagcagttttggtcaagatgtcgagaaaatggattgaaaaatatacaccaattttcttggcctgaacattgcaagaattacttgtcaaggatatcaagtcttggtccaagacatcctgcttttgcatgcaaagaagaccacaaggtgcctgtgaagtgcaggaagcatatatctatcattgctgtagactctgttaacaaggaagatttaattcaaattatcagaaactctgttgaggctacacgcactggaactatgtcaggttctacaggttttgtgctgtcaacttcactgacaatagcagagctacagtctgtaatagtacgcacaggcatgctcccgactgactttgatgcctttatatgcaatagtgggagcgatatatattatccattacagtctagtgatgtgccaagcaattcccgtgttacatttgcgttggaccataactaccgatcacatatcgagtatcgttggggaggagaaggtttaaggaagtacttagttaagtgggcttcttcagtagtagaaagaagggggagaactgaaaagcaagtcatctttgaagattcggaacactcttcaacatattgtcttgcatttagagtggttaatccaaatcatttgcctcctttgaaggagctgcaaaagttgatgagaatccagtcactgcgttgtcatgctctgtataaccatggcgccaccaggctatctgtaattccaatgcatgcatcgcgatctcaggctctaaggtatttgtctattcgctggggcatagagttgccaaatgctgtggtcattgttggtgaaactggtgattctgattacgaggaactgtttggaggtctccacaagacagtcatccttaagggtggattcaacactcctgcgaataggatccatacggtcagaaggtaccctttacaggatgttgttgctcttgatagctcaaatatcattggaattgagggattcagcactggtgacatcaggtctgctatgcaacaacagcttggtatacccacacaatgacaccaactgcaatctattttgttattaatagaaagaaagaaacagataacagaaatatacgatacaaatacttagtttccattctattggaaatgtccgattttgcctgccagtcatttaatgtatgtgtgtggtggtccctgcacgggttatgaatgacgttcccttggatcccgcactggagattttttggattgaagagcttgttaatggatacatccagctgtacagacggaacaaatttgttcaaatgttgatagtgaaaacattttgtggaagtattttcagcaaacaagcttccaatatacaaagttcacactttccatcgcttcaatgtggagcatctgattacagtgcaatcgtctaagggcttgtttgtatttacctcaattcatatgtgttgagatagattatatgtgttgagatagattgagatgtaacttaaactaatttacacaccaattcatcccaatatatgtggattaaggtgaatacgagagtgtccatataaggcctattcggttaggggttgattgagggagtttggagagaattaaatacctttcgatacaaatttatataggagaggatgtaatcctctccaatccccttttagcgcttgtttagatgttttagtattgatcccaatacacatgtgtttaaggggatagagaactaatttatactctaatccttctcaaatcatgtgtattacggtgaatactagagtttcaaacatagctttaaccgaacaagtcctaaactctttttttttctttctaggaggagtgtcttatattgtgtaaataccgtgtcacacaatttagcaccatacatcatgtgcaggaattatttgaagctaccaaagcagcaaa

SEQ ID NO: 202786 - DNA, 2312 bp, Zea Mays
tttatctcggccaacgtggacggcgcgtgattttctcttctctcgcagtcgcagcacggcagtcggcagcaggcaggcagccagccagcagccagcagctgcgaatcgaagcggaatcgaagcccaccaccagcagcagtgcccacttgcttggagcgcgagtttaccccgagcaaatcgcggcggcgctcgtgcccgtgcctcccgcgtcgaaccctagtgcaactaccagatccggagatcccgcgcgggcgcgggcgggacaccaagcttctgactcaactcaatccccgcacctgccaatgccaccccctcggcgctgatccgatcccgccgccgccgacactcgcgggcccgccccatggattccgcccggagctggctccagaagctgcagccgcgggacaaggacagagagcggggcgccaagacgccggcgccggcgtcgcccaacggtggcgccggcaactccgcgaggatggccgccgcggcgggggaggaggcgctgtctagcgccaccaagcagaaggtggcggcggcgaagcagtacatcgagaaccactacaagtcgcagatgaagtcgcttcaggagcgcaaggagaggtgagactttgtagagaaaaagctacatccaatgtgtatgcaatgaaaaagcttaagaagtccgaaatgttacgaagagggcaggttgaacatgtcagagctgaaagggacctccttgcagaggttgatagtccttacattgttaagctgtactgctcatttcaagatgatgagtttctgtacctcattatggagtaccttcctggtggtgacatgatgactttactcatgcgcaaggacacactgactgaggacgaatctaagttttatgttgcagagacaatactagcaattgaatctattcacaaacgcatttatattcatagggatatcaagcctgataatttgttgctagatcgaagtggccacttgaagctttcagattttggcttatgtaaacctctagatagcagttgcttcccaaatctgagtgaccttgactatgcagcaggtaagagcaccaatccatcatcagatggtgataagcaatccagtaactctactgcccccaggcggacacaacaggaacaactactacattggcagaagaatcggaggatgttggcttactctactgttggtacacctgattacattgcacccgaggtactcctgaagaaaggatatggaatggaatgtgactggtggtcacttggtgcaataatgttcgaaatgcttgtggggtatccgccattttattctgaagacccaatgtcaacatgtaggaagatagtgaattggagaagtcatctaaaattccctgaagaggccagcctttctctagaagctaaagatctcattagcaagctattgtgtaatgtggatcagagaattggaacaaaaggtgcacatgagataaaggcacatccatggtttgcaggtgttgagtgggaaaaactatatcagatggaagcagctttcattcctgaggttaatgatgagttggacacacaaaactttgaaaagtttgaggagactgctcctccaatgcaaacttcatcaaaggcaggtccttggagaaagatgctttcctccaaggacgtgaactttgttggctatacctacaagaactttgaaattgtgaacgatcctgagcttccaggaattgctgagctaaagaaaacgaacaacaagccaaagcgaccaaccatcaaatcattatttgagactgctgatagtgaagaccagccttctgatggcagttttctgaacctattacccacacaactggagctgccagagagccttgagccctctcctcactccagtatctcttctgaggattcccaagcacggaataggtagcaggtctctattcagaggacaagctccataaagtttgcttttgaagagatgtttgtggtgctcagcagccatctaatgtacattgtcctgtacattgttactggtttccaaagttcctttggcaacgacacgaggaggttggttgtcatatagaggaggaggtatttgttctctcctgtaaatccttggattctttgagtttctgagatttattctttcgatatagcatgccaagggggtatgctgcctgtttcctttttacgtgcagaaatctgcatttctacatcgttgttgtaagatttgagacagtgtaaagaaattgcaagtgataaacaagcgaccgaaaatgataatgaaaatgctatttttcttctatacagccttttttctttgcccttgtactt

SEQ ID NO: 202787 - DNA, 2470 bp, Zea Mays
tttatctcggccaacgtggacggcgcgtgattttctcttctctcgcagtcgcagcacggcagtcggcagcaggcaggcagccagccagcagccagcagctgcgaatcgaagcggaatcgaagcccaccaccagcagcagtgcccacttgcttggagcgcgagtttaccccgagcaaatcgcggcggcgctcgtgcccgtgcctcccgcgtcgaaccctagtgcaactaccagatccggagatcccgcgcgggcgcgggcgggacaccaagcttctgactcaactcaatccccgcacctgccaatgccaccccctcggcgctgatccgatcccgccgccgccgacactcgcgggcccgccccatggattccgcccggagctggctccagaagctgcagccgcgggacaaggacagagagcggggcgccaagacgccggcgccggcgtcgcccaacggtggcgccggcaactccgcgaggatggccgccgcggcgggggaggaggcgctgtctagcgccaccaagcagaaggtggcggcggcgaagcagtacatcgagaaccactacaagtcgcagatgaagtcgcttcaggagcgcaaggagaggcgttggatgttggagaggaaactagcagatgcagatgtatctgaagaagagcaaaacaatatcctgaaagatttagaaaaaaaggagacagaatacatgcgcctacgaaggcataaaatgggcgttgatgactttgaattgcttaccattattgggagaggtgcatttggggaggtgagactttgtagagaaaaagctacatccaatgtgtatgcaatgaaaaagcttaagaagtccgaaatgttacgaagagggcaggttgaacatgtcagagctgaaagggacctccttgcagaggttgatagtccttacattgttaagctgtactgctcatttcaagatgatgagtttctgtacctcattatggagtaccttcctggtggtgacatgatgactttactcatgcgcaaggacacactgactgaggacgaatctaagttttatgttgcagagacaatactagcaattgaatctattcacaaacgcatttatattcatagggatatcaagcctgataatttgttgctagatcgaagtggccacttgaagctttcagattttggcttatgtaaacctctagatagcagttgcttcccaaatctgagtgaccttgactatgcagcaggtaagagcaccaatccatcatcagatggtgataagcaatccagtaactctactgcccccaggcggacacaacaggaacaactactacattggcagaagaatcggaggatgttggcttactctactgttggtacacctgattacattgcacccgaggtactcctgaagaaaggatatggaatggaatgtgactggtggtcacttggtgcaataatgttcgaaatgcttgtggggtatccgccattttattctgaagacccaatgtcaacatgtaggaagatagtgaattggagaagtcatctaaaattccctgaagaggccagcctttctctagaagctaaagatctcattagcaagctattgtgtaatgtggatcagagaattggaacaaaaggcacatccatggtttgcaggtgttgagtgggaaaaactatatcagatggaagcagctttcattcctgaggttaatgatgagttggacacacaaaactttgaaaagtttgaggagactgctcctccaatgcaaacttcatcaaaggcaggtccttggagaaagatgctttcctccaaggacgtgaactttgttggctatacctacaagaactttgaaattgtgaacgatcctgagcttccaggaattgctgagctaaagaaaacgaacaacaagccaaagcgaccaaccatcaaatcattatttgagactgctgatagtgaagaccagccttctgatggcagttttctgaacctattacccacacaactggagctgccagagagccttgagccctctcctcactccagtatctcttctgaggattcccaagcacggaataggtagcaggtctctattcagaggacaagctccataaagtttgcttttgaagagatgtttgtggtgctcagcagccatctaatgtacattgtcctgtacattgttactggtttccaaagttcctttggcaacgacacgaggaggttggttgtcatatagaggaggaggtatttgttctctcctgtaaatccttggattctttgagtttctgagatttattctttcgatatagcatgccaagggggtatgctgcctgtttcctttttacgtgcagaaatctgcatttctacatcgttgttgtaagatttgagacagtgtaaagaaattgcaagtgataaacaagcgaccgaaaatgataatgaaaatgctatttttcttctatacagccttttttctttgcccttgtactt

SEQ ID NO: 202788 - DNA, 996 bp, Zea Mays
tcgaataaatgacttttcttccctgagtgaggcagttgaggaaataagaagccatgggcccatggccttattgtccttgtttcgagagtgtccagaaggtggcagaaagagcgctcttcctatggaacagcaatcacatcgagggtttgatcaaacacaacagcaaggttatactgcccgtagtcctcccagcattagaacggaacacgaaaggccattggaatcaggcagtgcagagcctgagtctaaatgtccgtaaaatattcatggactacgacccagcactgttcgaggagtgtcgcgagaagtttgaggaagaggaagctcaagaagccggcatgaggtcaagatgtgaggctagatggaagcgcctagaagaaattgcctcgtcaaaggaggtgaagtagctcgtcttgccgactgcccaggctgtagctcgtcagcagagttcctctagctatctagccttgctggctgcatacgagcagctagctctttctggcaggatcaagtagatgctgatgtaactgcccatggatggctgcttgcctcgtgttacttgctttaccgaacattttacaggctgacatgtaaatacgaggtacatggtgggccgtgaagcttcaacggggactcaggttctggctgccgtgtgatccactgatgacagtatcggttttcatcatcagaggacaaaggaaaggatgtaaaatggtcattcctgctttactgagatgctcatgccacatgttaacgtctagtctgcggctcaatgtcttgatccaagcactgctagaagcacttgaaagacagtcgagcagcacttgttcttgcctgctgatggtgattttgctgaaatgtatagcatgctttgtgtatgatgaatggtaacttggagccatgtcttgtgatgatatgtaatcgtgttgtacatgtcttttccttcctttgatgtatacagaaatttggaatgaagtgctcattgattgatgtttt

SEQ ID NO: 202789 - DNA, 633 bp, Zea Mays
cttctctcgatcctttacctcaattggagtctagcttcgaatgtcttgcccctacacttcccatcagagtgccggaaacactgcctgaacatataaaattcgaccatggttatacctctaagagtcctgcaattattaattttcttgagatcatggcagaatttactcctgagcagcaacatgctttctgccagtttgtgaccggtgctcctcggcttccacctgggggtttggctgctctaaatcctaagttgaccattgttaggaagcactcttctgtggcaaataataattcaaatgcaactggagcgacagagtctgcagatgatgatttgcctagtgtcatgacttgcgccaactatcttaaactaccaccatactccaccaaggctatcatgctaaagaaactgctttatgcgatcaacgaaggccaagggtcatttgatctttcgtgaatctcaacactaacataggttaaactcagctctccggagtcccaccgaaggtttggagcccgtacctttgggtgtggatgtctatactctcttttcttcttggttgtatattcttgcggatctttatagtgaataatagtaataaattgttttgcgcttcttactatgctaatcatca

SEQ ID NO: 202790 - DNA, 4420 bp, Zea Mays
gggattgcgtaactgatggcaaagatgaatgagattgtgaagcttgcagatgagttacttccttctctgcctgttgggaccatttctttaccagtgtattctggtgttcacatgaaaggttgttctgtaaagaaatccacttctagtaagcagggtgaacatggttcaacagcaaatgaactatcaggtcgggagaagttattgcgtgatcagcctgaacttctgcagcaatttggcatggacctgttacctaccatgacacaggtgtatggctctagtgtaagtggaccaatacggcacaggtgcttatctgtcattgggaaattaatgtactatagctcagctgagatgatccagtctctccttagcacaacaaacatttccagctttttggctggcattttagcttggaaagatccacaagtgttgatccctgctcttcagatagcagaagttttaatggaaaaacttccagagatttttttgaagatgtttgtgagggaaggcgttgttcatgctgttgagtcacttatatgcccagaattatctggtcaggtgactcctcatgtggattccattacatcttcacataataggcgcaaccgccgtagaaataatgctgtgaacactggaaataacttgcctgatggaccaaaaggttccaattctatgattgccaattcacccccaagcatggctgaagttccaaataatagtcttcgtgctttagttagtaatcatgcaaagtcatttaaggataaatatttcccttccgagcctggctcaagtgacattgcagttaccgatgaccttcttaaactgagggcactttgtgcaaaactgaatacaacagctgacactatcaaaacaaaagctaaaggaaaatcaaaggtagtgtctgacaatagttttgatgtcttgtgcaatattgaggagcaattggatgatataatagctgaaatgttgtctgagcttagcaagggtgatggtgtttcgacatttgagttcatcggaagtggagttgttacggctttgctaacctatctgtcatgtggaacatttgggagggaaaaggtgtctgaggcaaacataccaaatttgcgtcatcaggcagtcagacgatacaaaacatttatatcttttgcacttccaaatgataaagatgggaataaaactcctatggcattcctagtccataaactgcaaagtgccctatcttcgttggaacgtttcccagttgtgctcagccattctggaagggcatcgactttgggaggatcccgcctgacaacaggtttaggatctctgtcgcagcccatcaaattgcgtctttgtcgagcgcctggtgagaagtcacttaaggatttttcgtccaatgttgttcttattgactcattagctagtctggcagctgttgaagattttctttggcctagagtccagcgcactgaaccagtattgaagcctccaatgtcatctgcaaataattctggatctggagcagcaagctccacagcttgtgcgccttcaattccatcagaaactcaatctgtccgtcgcacatcgttaagatcaaagtcatcagctgccaccagtggtgcaattaagaaggattatcaggagggaagcataaacacctcaaagggaaaaggaaaagctgttcttaaattgagtttggatgaacctaaaggcccacatactaggaatgctgcgcgcagaaaagctacttcagagaaagatgttgaactgaagccatcacatggtcacatcacttcagaggatgaagatcttgatgcttctcctgttgagattgatgatgctttaattcttgatgatgatgacgaggatgtcccagatgatgaagatgatgatcatgaggcggttctccgaggttctcttccttcctgtgttcctgagagagtgcatgatgtgaaattaggagatgctgatgattctagtgttgcctcattggcaaatgataaccaggcacagccctcatctggttctagtacaaaaaatacttctagcaggggattggacactgctgaatttagaagtccagccacatttggttcacgaggtgcaatgtcgtttgctgcagctgcaatggctggattaactccagtaggtggtcgtggaattagaggtagccgagatcggaatggccttccattgggtgctcgtgcaactgagcattacaacaaattgatatttacagctgctgggaagcagctgaacaaacatttgactgtatatcaagctgttcaaagacaagtagttcatgccgaggatgatgaagatcgattcggtggatctgatttacctgatgatggtaaccacttctgggatgatataaggggtgatgtgttcactataacgtatcagaaggctgataacacagcggagaaggggtctgttggaggttcagcttcagtgccaaaatcttccaaatcagattcttgcagaactttgtctgaaaaacagtgtacttctcttcttgatagtattttgcaaggagagcttccctgtgatttagagaaatcaaaccaaacctacaatatcttatcactattacatgtgttggagggtttgaatcagttatcacctcgtctgagactgcagtcagcctgtgatgattttgctgaaggaaaagttgctacattaaatgggctatacgatgttggagctaaggtaccctcaaaggagtttatcaacagtaagatgaccccaaaacttgctcggcaaattcaggatgttcttgcactgtgtagtggcagtttaccatcttggtgttatcagctgacgaaagcttgtccttttctgtttcctttcgaaacacgaaggcaatacttctattccacagcttttgggttgtctcgtgcacttcatcgtcttcagcaacaaccgggcaatgataataacactgcttttgaaagagaagtcaggattggtagattgcaacgccagaaagtccgtgtttctcgtaaccgtatcttggattctgcagctaaagttatggagatgttctctaatcaaaaggctgtcctagaagttgaatactttggtgaagttggaactggtcttggtccaactttggagttttatactctcttaagccgtgagctgcaaagggttgacttaggattgtggagatctcattcttcagataattctgggatgcaaattgatgcgaatgctgatgatttaataagaagtaaaaatcatgaatcagaatcacttactgagagcaggaacatagtacaatcacctcttggattatttcctcagccttggccacctactgctgctgcatcagaaggtagcaaattcttcaaagttgtcgagtatttccgcttagttggtcgagtgatggcaaaagcattgcaagatggaaggcttctcgatttgcctttgtcgacagcattttacaaacttttgcttggacaagaacttgatttatatgatatattatcttttgataccgagttcggaaagacattgcaagaattgcaaattctcgttgcacgtaaacaatttttggactcctgctctagtgagagccaaaagatagatctatgtttccgtggtgctcccgttgaagatttatatttggacttcactcttccgggctatcctgaatatgttctcaaggaaggtggagagaatgcagaggtcaacatttgtaacttagaagagtatatttctttggttgtggatgctactgttaagaccggcataatgcggcaagtagaggcatttaaggcaggattcaatcaggtgtttgacatatcatcactgcaaatattttctcctcaagaacttgattatctgatttgtggtcgctgtgaactttgggagccggaaacactgcctgaacatataaaattcgaccatggttatacctctaagagtcctgcaattattaattttcttgagatcatggcagaatttactcctgagcagcaacatgctttctgccagtttgtgaccggtgctcctcggcttccacctgggggtttggctgctctaaatcctaagttgaccattgttaggaagcactcttctgtggcaaataataattcaaatgcaactggagcgacagagtctgcagatgatgatttgcctagtgtcatgacttgcgccaactatcttaaactaccaccatactccaccaaggctatcatgctaaagaaactgctttatgcgatcaacgaaggccaagggtcatttgatctttcgtgaatctcaacactaacataggttaaactcagctctccggagtcccaccgaaggtttggagcccgtacctttgggtgtggatgtctatactctcttttcttcttggttgtatattcttgcggatctttatagtgaataatagtaataaattgttttgcgcttcttactatgctaatcatca

SEQ ID NO: 202791 - DNA, 6042 bp, Zea Mays
caccctcgcagtgtgaagcacgtataccgcatgaaagccggcccccaaatcacgagctcctccctctaacctccggcctcttcctgcgtcaccaccgcgcaggcgcagccatccccatccttcctcaaattcccaaccccacccaagccagatctcaccccctccccgatcgctacacctccgatgttcccgcctctttcgcctatcccttcatagccgcgtcgccaccggcgccgctgcgaggcggccgctgcctttctccgctccctttgtatggaaacgcgcagccgcaagcgggcggaggcctcttcttcttccgcgacctcctcctcccgctcctccaagcgctcgcgacacaaccctaaccctaatcctcccgccggcccctcccccgcccccaaactcgtcccgttgccaccacgcacccgccgctcgaccgctgtcaatcccctccccccgatggattcctcgggcgacaacaactccaatcccgtcccgccgccgcggcgccgcggtcgcccctccaacacagataagggtaaggagcagcagcagccggagccgtctcacagctcccgagtgcgcgaggccgagcgcctgctgggtctaggtttcgagggcattgatgatgatgaagattcagggttcggggctggggccatcccccacagcctgacttccgcgagcaccgcgctccagggtcttcttaggaagcttggtgctggcctggacgatatactgccatcgtcggcactgtcagctgcagctgcagccgcgtcatcgtcatcagcatccgggcagctgagtgggaggttgaagaatattcttgcaggtttgcgtgctgatggggaggatggaaggcaggtcgaggcgttaacacaactctgtgagatgctgtccattggcacagaagagtctcttggggcattctcggtggactcatttgtacctgtcctgttgtgcattatggtgctgtgccttgcttttgtgcccggcttctcaccattgaatacatggacttggcggagcagtcattgcaagctcttaaaaaaatatccctggagcatccaactgcgtgcttgcgagctggtgcactaatggcagtcctatcataccttgactttttctccacaggtgttcagagagttgcattatctacagctgctaatatgtgtaggaaacttccttctgatgcatcagattttgtaatggaagcggttccacttcttactaatctactgaactaccatgattcaaaagtactggagcatgcttctgtctgccttacccgtattgcggaatctttttcaccatttccagaaaaattggatgagttgtgcagtcatggattggttgcacaagctgctagcttagtgtctgttagcaactcagcaggacaggcatccttgagtacatcaacatatacgggtgtgattcgtcttctctcaatatgcgcaagtggatcacctctggcagctaaaacacttctccttcttggaattagtggcatacttaaagatatcctttcaggctctgggttggttgctggcacgactgtgtcccctgctttaacaagaccagctgatcagatgaatgagattgtgaagcttgcagatgagttacttccttctctgcctgttgggaccatttctttaccagtgtattctggtgttcacatgaaaggttgttctgtaaagaaatccacttctagtaagcagggtgaacatggttcaacagcaaatgaactatcaggtcgggagaagttattgcgtgatcagcctgaacttctgcagcaatttggcatggacctgttacctaccatgacacaggtgtatggctctagtgtaagtggaccaatacggcacaggtgcttatctgtcattgggaaattaatgtactatagctcagctgagatgatccagtctctccttagcacaacaaacatttccagctttttggctggcattttagcttggaaagatccacaagtgttgatccctgctcttcagatagcagaagttttaatggaaaaacttccagagatttttttgaagatgtttgtgagggaaggcgttgttcatgctgttgagtcacttatatgcccagaattatctggtcaggtgactcctcatgtggattccattacatcttcacataataggcgcaaccgccgtagaaataatgctgtgaacactggaaataacttgcctgatggaccaaaaggttccaattctatgattgccaattcacccccaagcatggctgaagttccaaataatagtcttcgtgctttagttagtaatcatgcaaagtcatttaaggataaatatttcccttccgagcctggctcaagtgacattgcagttaccgatgaccttcttaaactgagggcactttgtgcaaaactgaatacaacagctgacactatcaaaacaaaagctaaaggaaaatcaaaggtagtgtctgacaatagttttgatgtcttgtgcaatattgaggagcaattggatgatataatagctgaaatgttgtctgagcttagcaagggtgatggtgtttcgacatttgagttcatcggaagtggagttgttacggctttgctaacctatctgtcatgtggaacatttgggagggaaaaggtgtctgaggcaaacataccaaatttgcgtcatcaggcagtcagacgatacaaaacatttatatcttttgcacttccaaatgataaagatgggaataaaactcctatggcattcctagtccataaactgcaaagtgccctatcttcgttggaacgtttcccagttgtgctcagccattctggaagggcatcgactttgggaggatcccgcctgacaacaggtttaggatctctgtcgcagcccatcaaattgcgtctttgtcgagcgcctggtgagaagtcacttaaggatttttcgtccaatgttgttcttattgactcattagctagtctggcagctgttgaagattttctttggcctagagtccagcgcactgaaccagtattgaagcctccaatgtcatctgcaaataattctggatctggagcagcaagctccacagcttgtgcgccttcaattccatcagaaactcaatctgtccgtcgcacatcgttaagatcaaagtcatcagctgccaccagtggtgcaattaagaaggattatcaggagggaagcataaacacctcaaagggaaaaggaaaagctgttcttaaattgagtttggatgaacctaaaggcccacatactaggaatgctgcgcgcagaaaagctacttcagagaaagatgttgaactgaagccatcacatggtcacatcacttcagaggatgaagatcttgatgcttctcctgttgagattgatgatgctttaattcttgatgatgatgacgaggatgtcccagatgatgaagatgatgatcatgaggcggttctccgaggttctcttccttcctgtgttcctgagagagtgcatgatgtgaaattaggagatgctgatgattctagtgttgcctcattggcaaatgataaccaggcacagccctcatctggttctagtacaaaaaatacttctagcaggggattggacactgctgaatttagaagtccagccacatttggttcacgaggtgcaatgtcgtttgctgcagctgcaatggctggattaactccagtaggtggtcgtggaattagaggtagccgagatcggaatggccttccattgggtgctcgtgcaactgagcattacaacaaattgatatttacagctgctgggaagcagctgaacaaacatttgactgtatatcaagctgttcaaagacaagtagttcatgccgaggatgatgaagatcgattcggtggatctgatttacctgatgatggtaaccacttctgggatgatataaggggtgatgtgttcactataacgtatcagaaggctgataacacagcggagaaggggtctgttggaggttcagcttcagtgccaaaatcttccaaatcagattcttgcagaactttgtctgaaaaacagtgtacttctcttcttgatagtattttgcaaggagagcttccctgtgatttagagaaatcaaaccaaacctacaatatcttatcactattacatgtgttggagggtttgaatcagttatcacctcgtctgagactgcagtcagcctgtgatgattttgctgaaggaaaagttgctacattaaatgggctatacgatgttggagctaaggtaccctcaaaggagtttatcaacagtaagatgaccccaaaacttgctcggcaaattcaggatgttcttgcactgtgtagtggcagtttaccatcttggtgttatcagctgacgaaagcttgtccttttctgtttcctttcgaaacacgaaggcaatacttctattccacagcttttgggttgtctcgtgcacttcatcgtcttcagcaacaaccgggcaatgataataacactgcttttgaaagagaagtcaggattggtagattgcaacgccagaaagtccgtgtttctcgtaaccgtatcttggattctgcagctaaagttatggagatgttctctaatcaaaaggctgtcctagaagttgaatactttggtgaagttggaactggtcttggtccaactttggagttttatactctcttaagccgtgagctgcaaagggttgacttaggattgtggagatctcattcttcagataattctgggatgcaaattgatgcgaatgctgatgatttaataagaagtaaaaatcatgaatcagaatcacttactgagagcaggaacatagtacaatcacctcttggattatttcctcagccttggccacctactgctgctgcatcagaaggtagcaaattcttcaaagttgtcgagtatttccgcttagttggtcgagtgatggcaaaagcattgcaagatggaaggcttctcgatttgcctttgtcgacagcattttacaaacttttgcttggacaagaacttgatttatatgatatattatcttttgataccgagttcggaaagacattgcaagaattgcaaattctcgttgcacgtaaacaatttttggactcctgctctagtgagagccaaaagatagatctatgtttccgtggtgctcccgttgaagatttatatttggacttcactcttccgggctatcctgaatatgttctcaaggaaggtggagagaatgcagaggtcaacatttgtaacttagaagagtatatttctttggttgtggatgctactgttaagaccggcataatgcggcaagtagaggcatttaaggtgtttgacatatcatcactgcaaatattttctcctcaagaacttgattatctgatttgtggtcgctgtgaactttgggagccggaaacactgcctgaacatataaaattcgaccatggttatacctctaagagtcctgcaattattaattttcttgagatcatggcagaatttactcctgagcagcaacatgctttctgccagtttgtgaccggtgctcctcggcttccacctgggggtttggctgctctaaatcctaagttgaccattgttaggaagcactcttctgtggcaaataataattcaaatgcaactggagcgacagagtctgcagatgatgatttgcctagtgtcatgacttgcgccaactatcttaaactaccaccatactccaccaaggctatcatgctaaagaaactgctttatgcgatcaacgaaggccaagggtcatttgatctttcgtgaatctcaacactaacataggtattggtccacctagaaatctgcgtcattgttacccagagttagtttctacctcattcatgtatgacataggttaaactcagctctccggagtcccaccgaaggtttggagcccgtacctttgggtgtggatgtctatactctcttttcttcttggttgtatattcttgcggatctttatagtgaataatagtaataaattgttttgcgcttcttactatgctaatcatca

SEQ ID NO: 202792 - DNA, 1956 bp, Zea Mays
agtgtgtcttaagtggtccagcaacgtttgccgcatgcagccgcttcaagtccgacgattttctcctttctctctctctctatttttcactctagaccgaaatcggagcgcccgataccataccaatagcagcagagcagtagcagcacagctccctcccccgtcctctccaaatctcgccggattccgtccaccgccaagccctcgcatctgccgcaggaactgatgatgatcttccacaacttccacataggagtatcagaggcagcggacgtgttagtggtaatgggagaactattgttcctgccggttcatatgctagagcaccaactgacatggaagcacaaattcaacaacttgagcaagaagcatattgttcagtccttcgtgcattcaaagcccagtctgatgccattacatgggagaaggaaggtctcatgactgaacttaggaaggaactaagagtatctgacaaagcacacagggagctgttaaataaagtcaacaacgataatattatatgtagcataagggaatggagatcaacaggagggcttcaagcaagcatgtccaataacccacaaccgattcatgaccctgttccaagtcctaccacctctggccgtaagaggcaaaagacatctcaatctgttcctgctttacctgcacctcctgcaatgcattcacaacagctggctacaccaacacagccatcgtcttcaactgctaggaaagcagtacccccagtccctaaaggcaaaaagacgaaaccaggtcagaaggtaccaggtggctctgcagccaagcctatgccatcttcagcaggtcctagtggaagaggaccacacatgaataggaattttccaggtggttctgctcctgaagctcaagctcagaatgtcgatccattggttggtcgtaaagtgatgagccggtggcctgaagataatagtttttatgaagcagtcatatctgattataatgctgaaacgggcctttatgtgctggtttatgacattaatacggcaaatgaaacctgggagtgggttgatcttaaagagatgggacctgaagacataagatggaaagaggatgactctgggatagaccctgtggtgtatctgcgcagccgaggtgccccaagtagtggggtcaggaagccaacaggtcgcggtgggcccatgccaggttctggaagaggaagaggattaccgaagaacatgtctaggaaagattttccacctccacaaaatggtgttggcaagagaagttccgatgacattgatatccttcatactgagagcctaataaaagaggttgaatgtttattattacaatgaactgcagatcttgtgcacttcatttcacttctcttctgctatatctgctcatgtaggtggagaaagtttttagcgttagcaatcctgatccacaggaagtagaaaaggcaaagaaagcactgaaggagcaagaacagtcattgattgacgccatagcaaggcttgctgaggcatcagatggtgaaagtgatgggctcaatcgtgggcgaaggaacttgtatgctggtaaccagcatcaagcaaactatgttgatgacatgcccgttggtgaccaagctgatgccatgtaaacactgcatgaacatgtatacacaacataatataactgtctgttgtacaatccattgcaaatatttgttctggatttaggtctctgtaagctaagtatcgttcgtttcgggaaactaatttttttagaacagtaattcagaatgctgacaagtaaagcttgtagatgtttgtttctttctctagtttttttgttagtgtggtctcatgttctatatgcatgataaaaggaaaaaaatcacctttgtaaagcactaagtttgtcttcgaccatttttgacgcagcaatcattcctcatgaccatgaatgcgcacaaaaatagaccag

SEQ ID NO: 202793 - DNA, 1913 bp, Zea Mays
agtgtgtcttaagtggtccagcaacgtttgccgcatgcagccgcttcaagtccgacgattttctcctttctctctctctctatttttcactctagaccgaaatcggagcgcccgataccataccaatagcagcagagcagtagcagcacagctccctcccccgtcctctccaaatctcgccggattccgtccaccgccaagccctcgcatctgccgcaggttcgcgtctgtgcccgagcgtgttgcactgccggtggtgttggtggtggttggcggagttgccgccgagggtcggtcatggactacgggccctctgacagcagcggaactgatgatgatcttccacaacttccacataggagtatcagaggcagcggacgtgttagtggtaatgggagaactattgttcctgccggttcatatgctagagcaccaactgacatggaagcacaaattcaacaacttgagcaagaagcatattgttcagtccttcgtgcattcaaagcccagtctgatgccattacatgggagaaggaaggtctcatgactgaacttaggaaggaactaagagtatctgacaaagcacacagggagctgttaaataaagtcaacaacgataatattatatgtagcataagggaatggagatcaacaggagggcttcaagcaagcatgtccaataacccacaaccgattcatgaccctgttccaagtcctaccacctctggccgtaagaggcaaaagacatctcaatctgttcctgctttacctgcacctcctgcaatgcattcacaacagctggctacaccaacacagccatcgtcttcaactgctaggaaagcagtacccccagtccctaaaggcaaaaagacgaaaccaggtcagaaggtaccaggtggctctgcagccaagcctatgccatcttcagcaggtcctagtggaagaggaccacacatgaataggaattttccaggtggttctgctcctgaagctcaagctcagaatgtcgatccattggttggtcgtaaagtgatgagccggtggcctgaagataatagtttttatgaagcagtcatatctgattataatgctgaaacgatgggacctgaagacataagatggaaagaggatgactctgggatagaccctgtggtgtatctgcgcagccgaggtgccccaagtagtggggtcaggaagccaacaggtcgcggtgggcccatgccaggttctggaagaggaagaggattaccgaagaacatgtctaggaaagattttccacctccacaaaatggtgttggcaagagaagttccgatgacattgatatccttcatactgagagcctaataaaagaggtggagaaagtttttagcgttagcaatcctgatccacaggaagtagaaaaggcaaagaaagcactgaaggagcaagaacagtcattgattgacgccatagcaaggcttgctgaggcatcagatggtgaaagtgatgggctcaatcgtgggcgaaggaacttgtatgctggtaaccagcatcaagcaaactatgttgatgacatgcccgttggtgaccaagctgatgccatgtaaacactgcatgaacatgtatacacaacataatataactgtctgttgtacaatccattgcaaatatttgttctggatttaggtctctgtaagctaagtatcgttcgtttcgggaaactaatttttttagaacagtaattcagaatgctgacaagtaaagcttgtagatgtttgtttctttctctagtttttttgttagtgtggtctcatgttctatatgcatgataaaaggaaaaaaatcacctttgtaaagcactaagtttgtcttcgaccatttttgacgcagcaatcattcctcatgaccatgaatgcgcacaaaaatagaccag

SEQ ID NO: 202794 - DNA, 1842 bp, Zea Mays
agtgtgtcttaagtggtccagcaacgtttgccgcatgcagccgcttcaagtccgacgattttctcctttctctctctctctatttttcactctagaccgaaatcggagcgcccgataccataccaatagcagcagagcagtagcagcacagctccctcccccgtcctctccaaatctcgccggattccgtccaccgccaagccctcgcatctgccgcaggttcgcgtctgtgcccgagcgtgttgcactgccggtggtgttggtggtggttggcggagttgccgccgagggtcggtcatggactacgggccctctgacagcagcggaactgatgatgatcttccacaacttccacataggagtatcagaggcagcggacgtgttagtggagaaggaaggtctcatgactgaacttaggaaggaactaagagtatctgacaaagcacacagggagctgttaaataaagtcaacaacgataatattatatgtagcataagggaatggagatcaacaggagggcttcaagcaagcatgtccaataacccacaaccgattcatgaccctgttccaagtcctaccacctctggccgtaagaggcaaaagacatctcaatctgttcctgctttacctgcacctcctgcaatgcattcacaacagctggctacaccaacacagccatcgtcttcaactgctaggaaagcagtacccccagtccctaaaggcaaaaagacgaaaccaggtcagaaggtaccaggtggctctgcagccaagcctatgccatcttcagcaggtcctagtggaagaggaccacacatgaataggaattttccaggtggttctgctcctgaagctcaagctcagaatgtcgatccattggttggtcgtaaagtgatgagccggtggcctgaagataatagtttttatgaagcagtcatatctgattataatgctgaaacgggcctttatgtgctggtttatgacattaatacggcaaatgaaacctgggagtgggttgatcttaaagagatgggacctgaagacataagatggaaagaggatgactctgggatagaccctgtggtgtatctgcgcagccgaggtgccccaagtagtggggtcaggaagccaacaggtcgcggtgggcccatgccaggttctggaagaggaagaggattaccgaagaacatgtctaggaaagattttccacctccacaaaatggtgttggcaagagaagttccgatgacattgatatccttcatactgagagcctaataaaagaggtggagaaagtttttagcgttagcaatcctgatccacaggaagtagaaaaggcaaagaaagcactgaaggagcaagaacagtcattgattgacgccatagcaaggcttgctgaggcatcagatggtgaaagtgatgggctcaatcgtgggcgaaggaacttgtatgctggtaaccagcatcaagcaaactatgttgatgacatgcccgttggtgaccaagctgatgccatgtaaacactgcatgaacatgtatacacaacataatataactgtctgttgtacaatccattgcaaatatttgttctggatttaggtctctgtaagctaagtatcgttcgtttcgggaaactaatttttttagaacagtaattcagaatgctgacaagtaaagcttgtagatgtttgtttctttctctagtttttttgttagtgtggtctcatgttctatatgcatgataaaaggaaaaaaatcacctttgtaaagcactaagtttgtcttcgaccatttttgacgcagcaatcattcctcatgaccatgaatgcgcacaaaaatagaccag

SEQ ID NO: 202795 - DNA, 2598 bp, Zea Mays
catgggcagatggggcttggcaaaaccctacaagcgatttctctattgagctatctcaagatccaccgtattgcacctggaccatttctggtcttatgtcctctaagcgtcacagatgggtggctgtcagaattcagtaaattctgtccttccttcagggtgatgcagtatgtaggtggtaagcttcaccgccgtgaccttcggaggaccatctatgaagatgtacagaaagcttccacatcatctcgatcctttgaattaccatttgatgtgctcatgacaacgtatgacatagccttgatggatcaagatttcctttcacaaatcccctggcactatgcagttattgatgaagctcaacgtcttaaaaatccatccagtgtactgtataatgtccttgagcaacgtttcatcatgccaagacgtctactactaacaggcacacctatccagaacaatctttctgaattatgggctttgatgcacttttgtttgccttcaatatttggaaagctggatgagttcctttctacatttaaggaagcaggggaatcactgacaggtgatgaagctaataaagcaaaaggccaattcaagatcattaaacatgtactcaaggcatttatgctacgtaggacaaaatttttactaatcgagagtggaattctggcgctgcctccactaactgagctaacagtgatggtgccgttgacacagttacaaaagaagctttacatgtcagtgttgcggaaagagctgccaacacttatttcatttgctagaggatcatctcgccaccagtctttgcaaaacattgttatacaactgaggaaagtttgcagtcacccatatctgttcagtggcattgaacctgagccttatgtggaaggggaacatttaattcaggctagtggaaagctcattgtcctagatcttatcctgaagaagctccatgaatgcggacatcgtgttttgctatttgctcagatgacccagacactggacattcttcaggattttctagagctacgcaattacacttatgagcgcctggatggttcagtacgtgctgaggaacggtttgcagcaataagaaatttcagttctcaatctacaaaaggtcttatcagagatgataatcgaagtgaagcatttgttttcatgatatcaactagagcaggtggtgtggggcttaatctcattggtgccgatactgttatattttatgaacaagattggaatcctcaagctgacaaacaggctctacagcgcgctcaccgcattggacagctgaatcatgtcttgtcaataaatttggtgtcacagcgcacaattgaagaggtcataatgcgaagagccgacagaaaacttaagcttagccataatattattggagaagaagacgggactgatgggaagggaggagatccaggaattgaagctagtgacatgagatcaattatctttggcttgcacctgtttgatccagcagatacagctacagaaacaatcgatgaggatataactgctgagacattcagtgtcgagaaactggcaaagttaaaaacaatgtctgaaaaggttgtcatgatgcgtagccatgagtcttctgaaaaggatgaacgagcatttgagatcaatccaaatatgactgatgacagtggaactgtgattagaagggcttctgattctatccgcattgatcctgggctaaatgaagctgcatacctatcctgggtcaagaagttcaaagaggcttccatttctagtgaagatgccacagttggatttggaaggcaaagagcagcgcctgaagaaaagctcctgaaacatgatgttaacaagcaaaaaatagaagaaaagagattggccaaatgggaaagtttgggttaccagacactagcagttaaggaacctgatatcacagcaagccagaatatttcagacgcgggatccatccaatttgtatatggagattgtactaatccttcaaaagtttgtcccgcaaagcctgccatcatattcagctgcatagataattctgggacttgggggcatggagggatgtttgatgctttgactagtctgtcgacatgcattccagatgcttatcaccgtgcttctgaatttgatgatctccacatgggcgatcttcacttgattcagcttgatgcggctatccacatgccccgaattggttaccaaggtggctcccaacgatcagaatggtatacaatagaacgcctgctcaggaaacactcatctctccatggaatcgacatttttgtatactactttcagcgacgacagacagattgccagattgtaacccaggtaggtcatgctgacgattcgacccaagcgtagggatgtctctgtaaaaacccactacatcagaagaatctgggattatgtgtagctagctgcaacaatttgtcttttctttttcttttactgccccttctctctgggaccaaaacgcctatgaatagatgagggagccaaatgaattaggttttagtacatttagctaagaggtgtatgtatgtacaagtgttgtttgcatctgcagtctcttttgatgaaaatctatgtggc

SEQ ID NO: 202796 - DNA, 2882 bp, Zea Mays
ctctccgccgacgcccaggacaaaggaatccgcctcccggacctcgggcgtcacggccgacctcaagccgcaccagctccatggcgtcgcctggctcatccgccgctatcgcctcggcgtcaacgtcgtactcgatggggcttggcaaaaccctacaagcgatttctctattgagctatctcaagatccaccgtattgcacctggaccatttctggtcttatgtcctctaagcgtcacagatgggtggctgtcagaattcagtaaattctgtccttccttcagggtgatgcagtatgtaggtggtaagcttcaccgccgtgaccttcggaggaccatctatgaagatgtacagaaagcttccacatcatctcgatcctttgaattaccatttgatgtgctcatgacaacgtatgacatagccttgatggatcaagatttcctttcacaaatcccctggcactatgcagttattgatgaagctcaacgtcttaaaaatccatccagtgtactgtataatgtccttgagcaacgtttcatcatgccaagacgtctactactaacaggcacacctatccagaacaatctttctgaattatgggctttgatgcacttttgtttgccttcaatatttggaaagctggatgagttcctttctacatttaaggaagcaggggaatcactgacaggtgatgaagctaataaagcaaaaggccaattcaagatcattaaacatgtactcaaggcatttatgctacgtaggacaaaatttttactaatcgagagtggaattctggcgctgcctccactaactgagctaacagtgatggtgccgttgacacagttacaaaagaagctttacatgtcagtgttgcggaaagagctgccaacacttatttcatttgctagaggatcatctcgccaccagtctttgcaaaacattgttatacaactgaggaaagtttgcagtcacccatatctgttcagtggcattgaacctgagccttatgtggaaggggaacatttaattcaggctagtggaaagctcattgtcctagatcttatcctgaagaagctccatgaatgcggacatcgtgttttgctatttgctcagatgacccagacactggacattcttcaggattttctagagctacgcaattacacttatgagcgcctggatggttcagtacgtgctgaggaacggtttgcagcaataagaaatttcagttctcaatctacaaaaggtcttatcagagatgataatcgaagtgaagcatttgttttcatgatatcaactagagcaggtggtgtggggcttaatctcattggtgccgatactgttatattttatgaacaagattggaatcctcaagctgacaaacaggctctacagcgcgctcaccgcattggacagctgaatcatgtcttgtcaataaatttggtgtcacagcgcacaattgaagaggtcataatgcgaagagccgacagaaaacttaagcttagccataatattattggagaagaagacgggactgatgggaagggaggagatccaggaattgaagctagtgacatgagatcaattatctttggcttgcacctgtttgatccagcagatacagctacagaaacaatcgatgaggatataactgctgagacattcagtgtcgagaaactggcaaagttaaaaacaatgtctgaaaaggttgtcatgatgcgtagccatgagtcttctgaaaaggatgaacgagcatttgagatcaatccaaatatgactgatgacagtggaactgtgattagaagggcttctgattctatccgcattgatcctgggctaaatgaagctgcatacctatcctgggtcaagaagttcaaagaggcttccatttctagtgaagatgccacagttggatttggaaggcaaagagcagcgcctgaagaaaagctcctgaaacatgatgttaacaagcaaaaaatagaagaaaagagattggccaaatgggaaagtttgggttaccagacactagcagttaaggaacctgatatcacagcaagccagaatatttcagacgcgggatccatccaatttgtatatggagattgtactaatccttcaaaagtttgtcccgcaaagcctgccatcatattcagctgcatagataattctgggacttgggggcatggagggatgtttgatgctttgactagtctgtcgacatgcattccagatgcttatcaccgtgcttctgaatttgatgatctccacatgggcgatcttcacttgattcagcttgatgaaggcaactgtacccggagtttggatgcacctttatgggttgcactagctatcgttcagtcttacaatccgaggcgtaaagttccgagaagtgaaatctccatgtctgatttggagctctgtatatcaaaagcagccttctcagctgctcagcattctgcggctatccacatgccccgaattggttaccaaggtggctcccaacgatcagaatggtatacaatagaacgcctgctcaggaaacactcatctctccatggaatcgacatttttgtatactactttcagcgacgacagacagattgccagattgtaacccaggtaggtcatgctgacgattcgacccaagcgtagggatgtctctgtaaaaacccactacatcagaagaatctgggattatgtgtagctagctgcaacaatttgtcttttctttttcttttactgccccttctctctgggaccaaaacgcctatgaatagatgagggagccaaatgaattaggttttagtacatttagctaagaggtgtatgtatgtacaagtgttgtttgcatctgcagtctcttttgatgaaaatctatgtggc

SEQ ID NO: 202797 - DNA, 2803 bp, Zea Mays
ctctccgccgacgcccaggacaaaggaatccgcctcccggacctcgggcgtcacggccgacctcaagccgcaccagctccatggcgtcgcctggctcatccgccgctatcgcctcggcgtcaacgtcgtactcgtggtcttatgtcctctaagcgtcacagatgggtggctgtcagaattcagtaaattctgtccttccttcagggtgatgcagtatgtaggtggtaagcttcaccgccgtgaccttcggaggaccatctatgaagatgtacagaaagcttccacatcatctcgatcctttgaattaccatttgatgtgctcatgacaacgtatgacatagccttgatggatcaagatttcctttcacaaatcccctggcactatgcagttattgatgaagctcaacgtcttaaaaatccatccagtgtactgtataatgtccttgagcaacgtttcatcatgccaagacgtctactactaacaggcacacctatccagaacaatctttctgaattatgggctttgatgcacttttgtttgccttcaatatttggaaagctggatgagttcctttctacatttaaggaagcaggggaatcactgacaggtgatgaagctaataaagcaaaaggccaattcaagatcattaaacatgtactcaaggcatttatgctacgtaggacaaaatttttactaatcgagagtggaattctggcgctgcctccactaactgagctaacagtgatggtgccgttgacacagttacaaaagaagctttacatgtcagtgttgcggaaagagctgccaacacttatttcatttgctagaggatcatctcgccaccagtctttgcaaaacattgttatacaactgaggaaagtttgcagtcacccatatctgttcagtggcattgaacctgagccttatgtggaaggggaacatttaattcaggctagtggaaagctcattgtcctagatcttatcctgaagaagctccatgaatgcggacatcgtgttttgctatttgctcagatgacccagacactggacattcttcaggattttctagagctacgcaattacacttatgagcgcctggatggttcagtacgtgctgaggaacggtttgcagcaataagaaatttcagttctcaatctacaaaaggtcttatcagagatgataatcgaagtgaagcatttgttttcatgatatcaactagagcaggtggtgtggggcttaatctcattggtgccgatactgttatattttatgaacaagattggaatcctcaagctgacaaacaggctctacagcgcgctcaccgcattggacagctgaatcatgtcttgtcaataaatttggtgtcacagcgcacaattgaagaggtcataatgcgaagagccgacagaaaacttaagcttagccataatattattggagaagaagacgggactgatgggaagggaggagatccaggaattgaagctagtgacatgagatcaattatctttggcttgcacctgtttgatccagcagatacagctacagaaacaatcgatgaggatataactgctgagacattcagtgtcgagaaactggcaaagttaaaaacaatgtctgaaaaggttgtcatgatgcgtagccatgagtcttctgaaaaggatgaacgagcatttgagatcaatccaaatatgactgatgacagtggaactgtgattagaagggcttctgattctatccgcattgatcctgggctaaatgaagctgcatacctatcctgggtcaagaagttcaaagaggcttccatttctagtgaagatgccacagttggatttggaaggcaaagagcagcgcctgaagaaaagctcctgaaacatgatgttaacaagcaaaaaatagaagaaaagagattggccaaatgggaaagtttgggttaccagacactagcagttaaggaacctgatatcacagcaagccagaatatttcagacgcgggatccatccaatttgtatatggagattgtactaatccttcaaaagtttgtcccgcaaagcctgccatcatattcagctgcatagataattctgggacttgggggcatggagggatgtttgatgctttgactagtctgtcgacatgcattccagatgcttatcaccgtgcttctgaatttgatgatctccacatgggcgatcttcacttgattcagcttgatgaaggcaactgtacccggagtttggatgcacctttatgggttgcactagctatcgttcagtcttacaatccgaggcgtaaagttccgagaagtgaaatctccatgtctgatttggagctctgtatatcaaaagcagccttctcagctgctcagcattctgcggctatccacatgccccgaattggttaccaaggtggctcccaacgatcagaatggtatacaatagaacgcctgctcaggaaacactcatctctccatggaatcgacatttttgtatactactttcagcgacgacagacagattgccagattgtaacccaggtaggtcatgctgacgattcgacccaagcgtagggatgtctctgtaaaaacccactacatcagaagaatctgggattatgtgtagctagctgcaacaatttgtcttttctttttcttttactgccccttctctctgggaccaaaacgcctatgaatagatgagggagccaaatgaattaggttttagtacatttagctaagaggtgtatgtatgtacaagtgttgtttgcatctgcagtctcttttgatgaaaatctatgtggc

SEQ ID NO: 202798 - DNA, 2770 bp, Zea Mays
ctctccgccgacgcccaggacaaaggaatccgcctcccggacctcgggcgtcacggccgacctcaagccgcaccagctccatggcgtcgcctggctcatccgccgctatcgcctcggcgtcaacgtcgtactcgtggtcttatgtcctctaagcgtcacagatgggtggctgtcagaattcagtaaattctgtccttccttcagggtgatgcagtatgtaggtggtaagcttcaccgccgtgaccttcggaggaccatctatgaagatgaattaccatttgatgtgctcatgacaacgtatgacatagccttgatggatcaagatttcctttcacaaatcccctggcactatgcagttattgatgaagctcaacgtcttaaaaatccatccagtgtactgtataatgtccttgagcaacgtttcatcatgccaagacgtctactactaacaggcacacctatccagaacaatctttctgaattatgggctttgatgcacttttgtttgccttcaatatttggaaagctggatgagttcctttctacatttaaggaagcaggggaatcactgacaggtgatgaagctaataaagcaaaaggccaattcaagatcattaaacatgtactcaaggcatttatgctacgtaggacaaaatttttactaatcgagagtggaattctggcgctgcctccactaactgagctaacagtgatggtgccgttgacacagttacaaaagaagctttacatgtcagtgttgcggaaagagctgccaacacttatttcatttgctagaggatcatctcgccaccagtctttgcaaaacattgttatacaactgaggaaagtttgcagtcacccatatctgttcagtggcattgaacctgagccttatgtggaaggggaacatttaattcaggctagtggaaagctcattgtcctagatcttatcctgaagaagctccatgaatgcggacatcgtgttttgctatttgctcagatgacccagacactggacattcttcaggattttctagagctacgcaattacacttatgagcgcctggatggttcagtacgtgctgaggaacggtttgcagcaataagaaatttcagttctcaatctacaaaaggtcttatcagagatgataatcgaagtgaagcatttgttttcatgatatcaactagagcaggtggtgtggggcttaatctcattggtgccgatactgttatattttatgaacaagattggaatcctcaagctgacaaacaggctctacagcgcgctcaccgcattggacagctgaatcatgtcttgtcaataaatttggtgtcacagcgcacaattgaagaggtcataatgcgaagagccgacagaaaacttaagcttagccataatattattggagaagaagacgggactgatgggaagggaggagatccaggaattgaagctagtgacatgagatcaattatctttggcttgcacctgtttgatccagcagatacagctacagaaacaatcgatgaggatataactgctgagacattcagtgtcgagaaactggcaaagttaaaaacaatgtctgaaaaggttgtcatgatgcgtagccatgagtcttctgaaaaggatgaacgagcatttgagatcaatccaaatatgactgatgacagtggaactgtgattagaagggcttctgattctatccgcattgatcctgggctaaatgaagctgcatacctatcctgggtcaagaagttcaaagaggcttccatttctagtgaagatgccacagttggatttggaaggcaaagagcagcgcctgaagaaaagctcctgaaacatgatgttaacaagcaaaaaatagaagaaaagagattggccaaatgggaaagtttgggttaccagacactagcagttaaggaacctgatatcacagcaagccagaatatttcagacgcgggatccatccaatttgtatatggagattgtactaatccttcaaaagtttgtcccgcaaagcctgccatcatattcagctgcatagataattctgggacttgggggcatggagggatgtttgatgctttgactagtctgtcgacatgcattccagatgcttatcaccgtgcttctgaatttgatgatctccacatgggcgatcttcacttgattcagcttgatgaaggcaactgtacccggagtttggatgcacctttatgggttgcactagctatcgttcagtcttacaatccgaggcgtaaagttccgagaagtgaaatctccatgtctgatttggagctctgtatatcaaaagcagccttctcagctgctcagcattctgcggctatccacatgccccgaattggttaccaaggtggctcccaacgatcagaatggtatacaatagaacgcctgctcaggaaacactcatctctccatggaatcgacatttttgtatactactttcagcgacgacagacagattgccagattgtaacccaggtaggtcatgctgacgattcgacccaagcgtagggatgtctctgtaaaaacccactacatcagaagaatctgggattatgtgtagctagctgcaacaatttgtcttttctttttcttttactgccccttctctctgggaccaaaacgcctatgaatagatgagggagccaaatgaattaggttttagtacatttagctaagaggtgtatgtatgtacaagtgttgtttgcatctgcagtctcttttgatgaaaatctatgtggc

SEQ ID NO: 202799 - DNA, 2863 bp, Zea Mays
ctctccgccgacgcccaggacaaaggaatccgcctcccggacctcgggcgtcacggccgacctcaagccgcaccagctccatggcgtcgcctggctcatccgccgctatcgcctcggcgtcaacgtcgtactcgatggggcttggcaaaaccctacaagcgatttctctattgagctatctcaagatccaccgtattgcacctggaccatttccgtcacagatgggtggctgtcagaattcagtaaattctgtccttccttcagggtgatgcagtatgtaggtggtaagcttcaccgccgtgaccttcggaggaccatctatgaagatgtacagaaagcttccacatcatctcgatcctttgaattaccatttgatgtgctcatgacaacgtatgacatagccttgatggatcaagatttcctttcacaaatcccctggcactatgcagttattgatgaagctcaacgtcttaaaaatccatccagtgtactgtataatgtccttgagcaacgtttcatcatgccaagacgtctactactaacaggcacacctatccagaacaatctttctgaattatgggctttgatgcacttttgtttgccttcaatatttggaaagctggatgagttcctttctacatttaaggaagcaggggaatcactgacaggtgatgaagctaataaagcaaaaggccaattcaagatcattaaacatgtactcaaggcatttatgctacgtaggacaaaatttttactaatcgagagtggaattctggcgctgcctccactaactgagctaacagtgatggtgccgttgacacagttacaaaagaagctttacatgtcagtgttgcggaaagagctgccaacacttatttcatttgctagaggatcatctcgccaccagtctttgcaaaacattgttatacaactgaggaaagtttgcagtcacccatatctgttcagtggcattgaacctgagccttatgtggaaggggaacatttaattcaggctagtggaaagctcattgtcctagatcttatcctgaagaagctccatgaatgcggacatcgtgttttgctatttgctcagatgacccagacactggacattcttcaggattttctagagctacgcaattacacttatgagcgcctggatggttcagtacgtgctgaggaacggtttgcagcaataagaaatttcagttctcaatctacaaaaggtcttatcagagatgataatcgaagtgaagcatttgttttcatgatatcaactagagcaggtggtgtggggcttaatctcattggtgccgatactgttatattttatgaacaagattggaatcctcaagctgacaaacaggctctacagcgcgctcaccgcattggacagctgaatcatgtcttgtcaataaatttggtgtcacagcgcacaattgaagaggtcataatgcgaagagccgacagaaaacttaagcttagccataatattattggagaagaagacgggactgatgggaagggaggagatccaggaattgaagctagtgacatgagatcaattatctttggcttgcacctgtttgatccagcagatacagctacagaaacaatcgatgaggatataactgctgagacattcagtgtcgagaaactggcaaagttaaaaacaatgtctgaaaaggttgtcatgatgcgtagccatgagtcttctgaaaaggatgaacgagcatttgagatcaatccaaatatgactgatgacagtggaactgtgattagaagggcttctgattctatccgcattgatcctgggctaaatgaagctgcatacctatcctgggtcaagaagttcaaagaggcttccatttctagtgaagatgccacagttggatttggaaggcaaagagcagcgcctgaagaaaagctcctgaaacatgatgttaacaagcaaaaaatagaagaaaagagattggccaaatgggaaagtttgggttaccagacactagcagttaaggaacctgatatcacagcaagccagaatatttcagacgcgggatccatccaatttgtatatggagattgtactaatccttcaaaagtttgtcccgcaaagcctgccatcatattcagctgcatagataattctgggacttgggggcatggagggatgtttgatgctttgactagtctgtcgacatgcattccagatgcttatcaccgtgcttctgaatttgatgatctccacatgggcgatcttcacttgattcagcttgatgaaggcaactgtacccggagtttggatgcacctttatgggttgcactagctatcgttcagtcttacaatccgaggcgtaaagttccgagaagtgaaatctccatgtctgatttggagctctgtatatcaaaagcagccttctcagctgctcagcattctgcggctatccacatgccccgaattggttaccaaggtggctcccaacgatcagaatggtatacaatagaacgcctgctcaggaaacactcatctctccatggaatcgacatttttgtatactactttcagcgacgacagacagattgccagattgtaacccaggtaggtcatgctgacgattcgacccaagcgtagggatgtctctgtaaaaacccactacatcagaagaatctgggattatgtgtagctagctgcaacaatttgtcttttctttttcttttactgccccttctctctgggaccaaaacgcctatgaatagatgagggagccaaatgaattaggttttagtacatttagctaagaggtgtatgtatgtacaagtgttgtttgcatctgcagtctcttttgatgaaaatctatgtggc

SEQ ID NO: 202800 - DNA, 2707 bp, Zea Mays
ctctccgccgacgcccaggacaaaggaatccgcctcccggacctcgggcgtcacggccgacctcaagccgcaccagctccatggcgtcgcctggctcatccgccgctatcgcctcggcgtcaacgtcgtactcgtggtcttatgtcctctaagcgtcacagatgggtggctgtcagaattcagtaaattctgtccttccttcagggtgatgcagtatgtaggtggtaagcttcaccgccgtgaccttcggaggaccatctatgaagatgtacagaaagcttccacatcatctcgatcctttgaattaccatttgatgtgctcatgacaacgtatgacatagccttgatggatcaagatttcctttcacaaatcccctggcactatgcagttattgatgaagctcaacgtcttaaaaatccatccagtgtactgtataatgtccttgagcaacgtttcatcatgccaagacgtctactactaacaggcacacctatccagaacaatctttctgaattatgggctttgatgcacttttgtttgccttcaatatttggaaagctggatgagttcctttctacatttaaggaagcaggggaatcactgacaggtgatgaagctaataaagcaaaaggccaattcaagatcattaaacatgtactcaaggcatttatgctacgtaggacaaaatttttactaatcgagagtggaattctggcgctgcctccactaactgagctaacagtgtatggttctttgcttcaggatggtgccgttgacacagttacaaaagaagctttacatgtcagtgttgcggaaagagctgccaacacttatttcatttgctagaggatcatctcgccaccagtctttgcaaaacattgttatacaactgaggaaagtttgcagtcacccatatctgttcagtggcattgaacctgagccttatgtggaaggggaacatttaattcaggctagtggaaagctcattgtcctagatcttatcctgaagaagctccatgaatgcggacatcgtgttttgctatttgctcagatgacccagacactggacattcttcaggattttctagagctacgcaattacacttatgagcgcctggatggttcagtacgtgctgaggaacggtttgcagcaataagaaatttcagttctcaatctacaaaaggtcttatcagagatgataatcgaagtgaagcatttgttttcatgatatcaactagagcaggtggtgtggggcttaatctcattggtgccgatactgtgagtttcattgaacatgataatattgctactctgatgactatgattttgcctacgagatctagtaatattttatctatattaattaaatatgtttttagtaccaagcaaacagctgctaatgatggcaatgaaccttatttatatgttatccatgcttattgggatgattggtttaggttatattttatgaacaagattggaatcctcaagctgacaaacaggctctacagcgcgctcaccgcattggacagctgaatcatgtcttgtcaataaatttggtgtcacagcgcacaattgaagaggtcataatgcgaagagccgacagaaaacttaagcttagccataatattattggagaagaagacgggactgatgggaagggaggagatccaggaattgaagctagtgacatgagatcaattatctttggcttgcacctgtttgatccagcagatacagctacagaaacaatcgatgaggatataactgctgagacattcagtgtcgagaaactggcaaagttaaaaacaatgtctgaaaaggttgtcatgatgcgtagccatgagtcttctgaaaaggatgaacgagcatttgagatcaatccaaatatgactgatgacagtggaactgtgattagaagggcttctgattctatccgcattgatcctgggctaaatgaagctgcatacctatcctgggtcaagaagttcaaagaggcttccatttctagtgaagatgccacagttggatttggaaggcaaagagcagcgcctgaagaaaagctcctgaaacatgatgttaacaagcaaaaaatagaagaaaagagattggccaaatgggaaagtttgggttaccagacactagcagttaaggaacctgatatcacagcaagccagaatatttcagacgcgggatccatccaatttgtatatggagattgtactaatccttcaaaagtttgtcccgcaaagcctgccatcatattcagctgcatagataattctgggacttgggggcatggagggatgtttgatgctttgactagtctgtcgacatgcattccagatgcttatcaccgtgcttctgaatttgatgatctccacatgggcgatcttcacttgattcagcttgatgaaggcaactgtacccggagtttggatgcacctttatgggttgcactagctatcgttcagtcttacaatccgaggcgtaaagttccgagaagtgaaatctccatgtctgatttggagctctgtatatcaaaagcagccttctcagctgctcagcattctgcggctatccacatgccccgaattggttaccaaggtggctcccaacgatcagaatggtatacaatagaacgcctgctcaggaaacactcatctctccatggaatcgacatttttgtgtatgccatgagaaca

SEQ ID NO: 202801 - DNA, 2106 bp, Zea Mays
ggcaaagcaagcttccttccttgcgaacgcaactgaccgctccggattcgccggcccccgccgccgcttcgccttctctctccctcgtccacggcaaccaactaaccgtcgagatattggcggggcgccgatgctccctgactccccgtagcgcgttgcggatgctgtgggcctgtgaggctcgctgccgccgctttgggatctgggctgctgccggagcggcagcggcggttgtgactggcgccggcgatggcgatatcggcgaaggagaggaagctgagcaggctcgggagttgtaagggcggtgcggcggctggaagtggcagcggcggcggcggcggttcgcctgctgccagggcccaccggtcggtggcggcggcgccgcagcggcgtgtcttcgctgcgctcttcgcgttcctgtgcgccggcgtagtcgtcctcggcggcgtgcacgtcattggagcaacgttccggccagtgctcaggacggcgtggccggcggcaaccctgaacgccatttcctccgatgccagagcgcggcgaggtggcagcagcgccgacaccaccgtgctgccgtcagtccaaatccggcacgcggtcgccatgccggaccgtgtactcctgatcctcaaggacgggccgttgctgccatctcccgagcggttccagtgcctgtactcccccgccaactcctcggaactgcgccgccaccgacccctcttggccgcctcctcacccgatggacccagcctcgtccactgccctgccgagccatcgtgtgtggacgtctctctgtccctgtccctgtcccctccggtggcgccgctgcagtgggacaggcttgtgtacgctgcgctcgttgacagcagggacaactccaccgtcgtgttcgccaaggggatgaacctccggccaggccggttgggtgtggcgtcgaggtaccagtgcgtctttggccgtgatctgtggaagccaaagcagcgtgtgctcacgtcccctgtgatttctgccgcacaagaggttttccggtgcgtgactccagctcgcgttcgccggcacctcaggatgacaactgatcccaacggcaatggcaatggcaatgacaagccgatgttggtctccatcagaacgaaggggcagagggactccacgctgccctcgatcgctgaacctgagccacttcctcctcggcacaactacaggcatcatcgacgacggccaaaggcgcactcaatgtgcgtgtgcaccatgctccgcaaccaggcgaggttcctcagggaatggatcatctaccactcgcgcatcggcgtggagcggtggttcatctacgacaacaacagcgacgacggcatcgagcaggtcctcggcaccatggacccgtcgacgcacaacgtgacgcgccacctgtggccgtggacgaagtcccaggaggctggcttcgcgcactgcgctctgagggcccgggagagctgcgagtgggtggggttcatcgacgtcgacgagttcctccacttccccggcaaccagacgaccctgccagacatcctgcggagctactcgaacaggccgcgggtgggcgagctgaggacagcctgccacagcttcgggccctcggggcggaccagaatccccaagcaaggcgtgacgacgggctacacctgccggctcgccgcgccggagcgccacaagtcgatcgtgaggcccgacgcgctgaacccgtcgctcgtcaacgtggtgcaccacttccacctgagggaaggcgcgaggagggactaagcacatacttcgttggggattgacaagaagagtatcccctaaaatggtgtgcacagacagtttgaggtacgtatgctcatcttcctttgcattattacttccctccttgatcagtcttgtgtttccttgcttcaaattaacacttcaaattaacatacgattagattcggtaagcaagggggttgtggttctattttgttgtctaccccagaaaagttcgtgtgattttttattcatattgtggatcttacagcctttgctcattgttaggcccttgtctatgcccagttggttttaattcactatcgacatatgaatggattgttgctg

SEQ ID NO: 202802 - DNA, 1035 bp, Zea Mays
gaattatgttctcggcgctctggctatatcaaagatgatatcagttccaatggtgatgtcttatcacacacatcttccagcgtacataccgaggtacaatttaaattggttacttgagcccacgtggagttttataagatgcctccacagatcagcagatcttactctagttccttcggtagctattgctgaagacttcgaaaccgctaaagtagtaccagcaaacagaatacggctttggaataagggtgtagattctgaaagctttcatactaaatatcggaggcatgaaatgcgtgtcagattgagtggtggtgaaccagaaaagccattggtaatacatgtgggtcgttttggacgtgaaaaaaatttggattttctgaaaagggttatggagaggctcccaggagcaaggattgcctttgttggagacgggccatacaggtccgagttggaaaaaatgttcacgggcatgcctgcagtttttaccggaatgctccaaggtgaggagctctcacaagcgtacgccagtggagatgtatttgcaatgccttcagaatccgagaccctcgggcaagtagtgctggagtccatggcttctggagtcccagtcgttgctgctcgtgctggagggatacctgatataatacccaaggacaaggaggagaagagatggagaagtgtgactggaggacagcctcgaagaaaatccgcaacgagcactacagcaccgcgatatcgtactggcggaagaagatgggcaagactaaccagacctccttgtttcaggattcttctgtcgctgccctctccaactagttgctgttaataactaaagaatttgtacattgtacccaaacagcttgcgagttttgtgtggctagctgcattcaaatgtccacagtctgactgactacggcttgtattcgattcatgtacatttagacagcacttaagattgccgatctgctaactcagaaggtttggcacaaatgctccgataattttgacgtacttgtctcgtgctgatgtgca

SEQ ID NO: 202803 - DNA, 1361 bp, Zea Mays
gcctaaacaaggtaggaaaagaaagaataaaaaaacctcacagcataatttgtccgacatcatggatggcggtctagcgttggcccatcgatgcttaactggcaatgagactcatgactcaactgtaaaaaattcttcaccagcaaaaaggcctgcacatgatgaactgttaatgaacccgcgagtagcacctttcaatgagactggttctctgggcacaatctatcctactagaaaggatacctttggaggatttagtgtacacgttccttacgtttcaaggatgagaagggggcgccctaggaaggacttcatttcatttgcggtaacaatctacgataagggaccctcggttgaacctaaagggattcagccatcagttgagatgatattagtgaaggatggtgacaagggaaaccacctgaggaaagtacctgaggttccactaaaggttagttctgagaacgagcatgcagaagcagttgatagcaaaggggttcggaacctacaagcaaaggtctgcagtgctgtttccaagcctaaaataaagcatggtttaacgcggaagcatcatcgagcatggacattgagtgaggtcgtgaagctggtggatggtgtggctcggtatggagctggcaagtggtctgagattagaaaactgtccttcgcctcgtattcctaccgcacttcagtggatctcaaggataaatggcgtaatctgatcagagcaacccagacacagcttccggcgcaaaaagatggtgcctgtccacggaagactaacccttctatcataccaataccaccatccattttgttgcgagtgaaggagctacatgagctgcagtcgcaagggggtggcttcacagccccagtcaagttctctgggcaggacggcaaggttctacagggaaaaggctcgggttttttgtgatccgtgtaatgcagatatacgtgtacgcttctggacgatgtggtatatatgagtaaatattatttgaagtaggtgtaaccacgttatccatcacaatgttctctacacgctggaacatgtgtaactcaggacgtccagaaaatattgttatacttagataagggcagacgtctgtcgccatgttttccaaacgtgtcaggcgtacacaatttaaaaagcaaatgcaaatctagacaggaagaggaaagttagagtaaacggagtatttgcggtgcattacaggaaagttgttgcagcaataatgaactaaactagtatttgcgatgcattacagaatggaatccgcaattcccttgtaaatagaggcaaacagctttctcgtttcggcttgtgctttataaattgctttggctcaaaagacgacgtt

SEQ ID NO: 202804 - DNA, 2660 bp, Zea Mays
gccggctctgccacccctccccggctggatcccctttcccttttcgaaaccacccttcctccgttcctcggctcctccttgcggtgagaaacacggtgtcgccctcgaggctcgaccccgaccttttcctcccctcttctctagatcgcgacgaggcggactccccactcctgctgcccggagcgaagcggaccgcgtccccgccgcgtggcctgatcgatccctcagctctgccggtcgggccaatgctgcgtgcatcgagctgccgctgatcacgttcttcgcggttgcggcccccagtttgtgcggtgtggcgttggcggaaccttgtggaggctagttgctccaggactttgattttgacttatctatggaaatggatgactcacatggcaccatggttaataaaagtgaagagaatgactttgaaaagaaaggcacttctgatcctgtggtttatcagctagttcgggttgaaggtgatggaacacttgttcctgctacagaggatgatgttttgcagtttgaacatttccttcacaacgagaaggttgatcttcctcctattgaagatgcagaccatgtggaagagtttttcaacaatgactgcatgttactgaagaagcctgacttggaagatggatcttccaaattggagactgtggaagcacacacacaaaaattgggtgccaacttagaggaaaacatattacagtcattggatgattcccttagtcctccctcagactttagaattcatagtcagcattcagataaattgcttacagaacaaggggcaaacgtcactcgacaggacaatgcttcaactgagactacaaaatcgacagtgttaaatgactcttgctgtgctgaaaaatataaggctgatgcctgctcaagatctgtatgcgacacatctacagatccatctgtttcgggagttaatagttccatgcctgatttttccatattaagaggagaagtctgtttggatgatcttactattagagaacttcaggaggcgtttagagccacgtttggccggcagactaatgtcaaagacaagatatggctcaaaagacggattacaatgggcttgactaattcctacgatgttccaagttcaggttgtgtagttaaagactacaaaattgttggcaaggatgccaaaaatgatatgtcagacatggatgaaagagctaagactgggcttagagctacttctgtggttatatatccaggaaacgaaggggactctccatctagctcttactatcagagcgaggaccaggaagattcttccaagagggtgccgatccataatgatgaaccacaaggaaatctgctaggcgagcaatgcactgacaagcgaactagaaagccaacaaaaagatacatagaggagctatcagacattgagactcatgactcaactgtaaaaaattcttcaccagcaaaaaggcctgcacatgatgaactgttaatgaacccgcgagtagcacctttcaatgagactggttctctgggcacaatctatcctactagaaaggatacctttggaggatttagtgtacacgttccttacgtttcaaggatgagaagggggcgccctaggaaggacttcatttcatttgcggataagggaccctcggttgaacctaaagggattcagccatcagttgagatgatattagtgaaggatggtgacaagggaaaccacctgaggaaagtacctgaggttccactaaaggttagttctgagaacgagcatgcagaagcagttgatagcaaaggggttcggaacctacaagcaaaggtctgcagtgctgtttccaagcctaaaataaagcatggtttaacgcggaagcatcatcgagcatggacattgagtgaggtcgtgaagctggtggatggtgtggctcggtatggagctggcaagtggtctgagattagaaaactgtccttcgcctcgtattcctaccgcacttcagtggatctcaaggataaatggcgtaatctgatcagagcaacccagacacagcttccggcgcaaaaagatggtgcctgtccacggaagactaacccttctatcataccaataccaccatccattttgttgcgagtgaaggagctacatgagctgcagtcgcaagggggtggcttcacagccccagtcaagttctctgggcaggacggcaaggttctacagggaaaaggctcgggttttttgtgatccgtgtaatgcagatatacgtgtacgcttctggacgatgtggtatatatgagtaaatattatttgaagtaggtgtaaccacgttatccatcacaatgttctctacacgctggaacatgtgtaactcaggacgtccagaaaatattgttatacttagataagggcagacgtctgtcgccatgttttccaaacgtgtcaggcgtacacaatttaaaaagcaaatgcaaatctagacaggaagaggaaagttagagtaaacggagtatttgcggtgcattacaggaaagttgttgcagcaataatgaactaaactagtatttgcgatgcattacagaatggaatccgcaattcccttgtaaatagaggcaaacagctttctcgtttcggcttgtgctttataaattgctttggctcaaaagacgacgtt

SEQ ID NO: 202805 - DNA, 1590 bp, Zea Mays
gccggctctgccacccctccccggctggatcccctttcccttttcgaaaccacccttcctccgttcctcggctcctccttgcggtgagaaacacggtgtcgccctcgaggctcgaccccgaccttttcctcccctcttctctagatcgcgacgaggcggactccccactcctgctgcccggagcgaagcggaccgcgtccccgccgcgtggcctgatcgatccctcagctctgccggtcgggccaatgctgcgtgcatcgagctgccgctgatcacgtgaagagaatgactttgaaaagaaaggcacttctgatcctgtggtttatcagctagttcgggttgaaggtgatggaacacttgttcctgctacagaggatgatgttttgcagtttgaacatttccttcacaacgagaaggttgatcttcctcctattgaagatgcagaccatgtggaagagtttttcaacaatgactgcatgttactgaagaagcctgacttggaagatggatcttccaaattggagactgtggaagcacacacacaaaaattgggtgccaacttagaggataagggaccctcggttgaacctaaagggattcagccatcagttgagatgatattagtgaaggatggtgacaagggaaaccacctgaggaaagtacctgaggttccactaaaggttagttctgagaacgagcatgcagaagcagttgatagcaaaggggttcggaacctacaagcaaaggtctgcagtgctgtttccaagcctaaaataaagcatggtttaacgcggaagcatcatcgagcatggacattgagtgaggtcgtgaagctggtggatggtgtggctcggtatggagctggcaagtggtctgagattagaaaactgtccttcgcctcgtattcctaccgcacttcagtggatctcaaggataaatggcgtaatctgatcagagcaacccagacacagcttccggcgcaaaaagatggtgcctgtccacggaagactaacccttctatcataccaataccaccatccattttgttgcgagtgaaggagctacatgagctgcagtcgcaagggggtggcttcacagccccagtcaagttctctgggcaggacggcaaggttctacagggaaaaggctcgggttttttgtgatccgtgtaatgcagatatacgtgtacgcttctggacgatgtggtatatatgagtaaatattatttgaagtaggtgtaaccacgttatccatcacaatgttctctacacgctggaacatgtgtaactcaggacgtccagaaaatattgttatacttagataagggcagacgtctgtcgccatgttttccaaacgtgtcaggcgtacacaatttaaaaagcaaatgcaaatctagacaggaagaggaaagttagagtaaacggagtatttgcggtgcattacaggaaagttgttgcagcaataatgaactaaactagtatttgcgatgcattacagaatggaatccgcaattcccttgtaaatagaggcaaacagctttctcgtttcggcttgtgctttataaattgctttggctcaaaagacgacgtt

SEQ ID NO: 202806 - DNA, 2610 bp, Zea Mays
cggctggatcccctttcccttttcgaaaccacccttcctccgttcctcggctcctccttgcggtgagaaacacggtgtcgccctcgaggctcgaccccgaccttttcctcccctcttctctagatcgcgacgaggcggactccccactcctgctgcccggagcgaagcggaccgcgtccccgccgcgtggcctgatcgatccctcagctctgccggtcgggccaatgctgcgtgcatcgagctgccgctgatcacgattatagggtttaatacttgtatattttgattgtcacaaatgttggatgaagtttgacttatctatggaaatggatgactcacatggcaccatggttaataaaagtgaagagaatgactttgaaaagaaaggcacttctgatcctgtggtttatcagctagttcgggttgaaggtgatggaacacttgttcctgctacagaggatgatgttttgcagtttgaacatttccttcacaacgagaaggttgatcttcctcctattgaagatgcagaccatgtggaagagtttttcaacaatgactgcatgttactgaagaagcctgacttggaagatggatcttccaaattggagactgtggaagcacacacacaaaaattgggtgccaacttagaggaaaacatattacagtcattggatgattcccttagtcctccctcagactttagaattcatagtcagcattcagataaattgcttacagaacaaggggcaaacgtcactcgacaggacaatgcttcaactgagactacaaaatcgacagtgttaaatgactcttgctgtgctgaaaaatataaggctgatgcctgctcaagatctgtatgcgacacatctacagatccatctgtttcgggagttaatagttccatgcctgatttttccatattaagaggagaagtctgtttggatgatcttactattagagaacttcaggaggcgtttagagccacgtttggccggcagactaatgtcaaagacaagatatggctcaaaagacggattacaatgggcttgactaattcctacgatgttccaagttcaggttgtgtagttaaagactacaaaattgttggcaaggatgccaaaaatgatatgtcagacatggatgaaagagctaagactgggcttagagctacttctgtggttatatatccaggaaacgaaggggactctccatctagctcttactatcagagcgaggaccaggaagattcttccaagagggtgccgatccataatgatgaaccacaaggaaatctgctaggcgagcaatgcactgacaagcgaactagaaagccaacaaaaagatacatagaggagctatcagacattgagactcatgactcaactgtaaaaaattcttcaccagcaaaaaggcctgcacatgatgaactgttaatgaacccgcgagtagcacctttcaatgagactggttctctgggcacaatctatcctactagaaaggatacctttggaggatttagtgtacacgttccttacgtttcaaggatgagaagggggcgccctaggaaggacttcatttcatttgcggataagggaccctcggttgaacctaaagggattcagccatcagttgagatgatattagtgaaggatggtgacaagggaaaccacctgaggaaagtacctgaggttccactaaaggttagttctgagaacgagcatgcagaagcagttgatagcaaaggggttcggaacctacaagcaaaggtctgcagtgctgtttccaagcctaaaataaagcatggtttaacgcggaagcatcatcgagcatggacattgagtgaggtcgtgaagctggtggatggtgtggctcggtatggagctggcaagtggtctgagattagaaaactgtccttcgcctcgtattcctaccgcacttcagtggatctcaaggataaatggcgtaatctgatcagagcaacccagacacagcttccggcgcaaaaagatggtgcctgtccacggaagactaacccttctatcataccaataccaccatccattttgttgcgagtgaaggagctacatgagctgcagtcgcaagggggtggcttcacagccccagtcaagttctctgggcaggacggcaaggttctacagggaaaaggctcgggttttttgtgatccgtgtaatgcagatatacgtgtacgcttctggacgatgtggtatatatgagtaaatattatttgaagtaggtgtaaccacgttatccatcacaatgttctctacacgctggaacatgtgtaactcaggacgtccagaaaatattgttatacttagataagggcagacgtctgtcgccatgttttccaaacgtgtcaggcgtacacaatttaaaaagcaaatgcaaatctagacaggaagaggaaagttagagtaaacggagtatttgcggtgcattacaggaaagttgttgcagcaataatgaactaaactagtatttgcgatgcattacagaatggaatccgcaattcccttgtaaatagaggcaaacagctttctcgtttcggcttgtgctttataaattgctttggctcaaaagacgacgtt

SEQ ID NO: 202807 - DNA, 2547 bp, Zea Mays
cctttcccttttcgaaaccacccttcctccgttcctcggctcctccttgcggtgagaaacacggtgtcgccctcgaggctcgaccccgaccttttcctcccctcttctctagatcgcgacgaggcggactccccactcctgctgcccggagcgaagcggaccgcgtccccgccgcgtggcctgatcgatccctcagctctgccggtcgggccaatgctgcgtgcatcgagctgccgctgatcacgtttgacttatctatggaaatggatgactcacatggcaccatggttaataaaagtgaagagaatgactttgaaaagaaaggcacttctgatcctgtggtttatcagctagttcgggttgaaggtgatggaacacttgttcctgctacagaggatgatgttttgcagtttgaacatttccttcacaacgagaaggttgatcttcctcctattgaagatgcagaccatgtggaagagtttttcaacaatgactgcatgttactgaagaagcctgacttggaagatggatcttccaaattggagactgtggaagcacacacacaaaaattgggtgccaacttagaggaaaacatattacagtcattggatgattcccttagtcctccctcagactttagaattcatagtcagcattcagataaattgcttacagaacaaggggcaaacgtcactcgacaggacaatgcttcaactgagactacaaaatcgacagtgttaaatgactcttgctgtgctgaaaaatataaggctgatgcctgctcaagatctgtatgcgacacatctacagatccatctgtttcgggagttaatagttccatgcctgatttttccatattaagaggagaagtctgtttggatgatcttactattagagaacttcaggaggcgtttagagccacgtttggccggcagactaatgtcaaagacaagatatggctcaaaagacggattacaatgggcttgactaattcctacgatgttccaagttcaggttgtgtagttaaagactacaaaattgttggcaaggatgccaaaaatgatatgtcagacatggatgaaagagctaagactgggcttagagctacttctgtggttatatatccaggaaacgaaggggactctccatctagctcttactatcagagcgaggaccaggaagattcttccaagagggtgccgatccataatgatgaaccacaaggaaatctgctaggcgagcaatgcactgacaagcgaactagaaagccaacaaaaagatacatagaggagctatcagacattgagactcatgactcaactgtaaaaaattcttcaccagcaaaaaggcctgcacatgatgaactgttaatgaacccgcgagtagcacctttcaatgagactggttctctgggcacaatctatcctactagaaaggatacctttggaggatttagtgtacacgttccttacgtttcaaggatgagaagggggcgccctaggaaggacttcatttcatttgcggataagggaccctcggttgaacctaaagggattcagccatcagttgagatgatattagtgaaggatggtgacaagggaaaccacctgaggaaagtacctgaggttccactaaaggttagttctgagaacgagcatgcagaagcagttgatagcaaaggggttcggaacctacaagcaaaggtctgcagtgctgtttccaagcctaaaataaagcatggtttaacgcggaagcatcatcgagcatggacattgagtgaggtcgtgaagctggtggatggtgtggctcggtatggagctggcaagtggtctgagattagaaaactgtccttcgcctcgtattcctaccgcacttcagtggatctcaaggataaatggcgtaatctgatcagagcaacccagacacagcttccggcgcaaaaagatggtgcctgtccacggaagactaacccttctatcataccaataccaccatccattttgttgcgagtgaaggagctacatgagctgcagtcgcaagggggtggcttcacagccccagtcaagttctctgggcaggacggcaaggttctacagggaaaaggctcgggttttttgtgatccgtgtaatgcagatatacgtgtacgcttctggacgatgtggtatatatgagtaaatattatttgaagtaggtgtaaccacgttatccatcacaatgttctctacacgctggaacatgtgtaactcaggacgtccagaaaatattgttatacttagataagggcagacgtctgtcgccatgttttccaaacgtgtcaggcgtacacaatttaaaaagcaaatgcaaatctagacaggaagaggaaagttagagtaaacggagtatttgcggtgcattacaggaaagttgttgcagcaataatgaactaaactagtatttgcgatgcattacagaatggaatccgcaattcccttgtaaatagaggcaaacagctttctcgtttcggcttgtgctttataaattgctttggctcaaaagacgacgtt

SEQ ID NO: 202808 - DNA, 1638 bp, Zea Mays
cctccgttcctcggctcctccttgcggtgagaaacacggtgtcgccctcgaggctcgaccccgaccttttcctcccctcttctctagatcgcgacgaggcggactccccactcctgctgcccggagcgaagcggaccgcgtccccgccgcgtggcctgatcgatccctcagctctgccggtcgggccaatgctgcgtgcatcgagctgccgctgatcacgattatagggtttaatacttgtatattttgattgtcacaaatgttggatgaagtttgacttatctatggaaatggatgactcacatggcaccatggttaataaaagtgaagagaatgactttgaaaagaaaggcacttctgatcctgtggtttatcagctagttcgggttgaaggtgatggaacacttgttcctgctacagaggatgatgttttgcagtttgaacatttccttcacaacgagaaggttgatcttcctcctattgaagatgcagaccatgtggaagagtttttcaacaatgactgcatgttactgaagaagcctgacttggaagatggatcttccaaattggagactgtggaagcacacacacaaaaattgggtgccaacttagaggataagggaccctcggttgaacctaaagggattcagccatcagttgagatgatattagtgaaggatggtgacaagggaaaccacctgaggaaagtacctgaggttccactaaaggttagttctgagaacgagcatgcagaagcagttgatagcaaaggggttcggaacctacaagcaaaggtctgcagtgctgtttccaagcctaaaataaagcatggtttaacgcggaagcatcatcgagcatggacattgagtgaggtcgtgaagctggtggatggtgtggctcggtatggagctggcaagtggtctgagattagaaaactgtccttcgcctcgtattcctaccgcacttcagtggatctcaaggataaatggcgtaatctgatcagagcaacccagacacagcttccggcgcaaaaagatggtgcctgtccacggaagactaacccttctatcataccaataccaccatccattttgttgcgagtgaaggagctacatgagctgcagtcgcaagggggtggcttcacagccccagtcaagttctctgggcaggacggcaaggttctacagggaaaaggctcgggttttttgtgatccgtgtaatgcagatatacgtgtacgcttctggacgatgtggtatatatgagtaaatattatttgaagtaggtgtaaccacgttatccatcacaatgttctctacacgctggaacatgtgtaactcaggacgtccagaaaatattgttatacttagataagggcagacgtctgtcgccatgttttccaaacgtgtcaggcgtacacaatttaaaaagcaaatgcaaatctagacaggaagaggaaagttagagtaaacggagtatttgcggtgcattacaggaaagttgttgcagcaataatgaactaaactagtatttgcgatgcattacagaatggaatccgcaattcccttgtaaatagaggcaaacagctttctcgtttcggcttgtgctttataaattgctttggctcaaaagacgacgtt

SEQ ID NO: 202809 - DNA, 1515 bp, Zea Mays
ctcggctcctccttgcggtgagaaacacggtgtcgccctcgaggctcgaccccgaccttttcctcccctcttctctagatcgcgacgaggcggactccccactcctgctgcccggagcgaagcggaccgcgtccccgccgcgtggcctgatcgatccctcagctctgccggtcgggccaatgctgcgtgcatcgagctgccgctgatcacgattatagggtttaatacttgtatattttgattgtcacaaatgttggatgaagtttgacttatctatggaaatggatgactcacatggcaccatggttaataaaagtgaagagaatgactttgaaaagaaaggcacttctgatcctgtggtttatcagctagttcgggttgaaggtgatggaacacttgttcctgctacagaggatgatgttttgcagtttgaacatttccttcacaacgagaaggttgatcttcctcctattgaagatgcagaccatgtggaagagtttttcaacaatgactgcatgttactgaagaagcctgacttggaagatggatcttccaaattggagactgtggaagcacacacacaaaaattgggtgccaacttagaggttagttctgagaacgagcatgcagaagcagttgatagcaaaggggttcggaacctacaagcaaaggtctgcagtgctgtttccaagcctaaaataaagcatggtttaacgcggaagcatcatcgagcatggacattgagtgaggtcgtgaagctggtggatggtgtggctcggtatggagctggcaagtggtctgagattagaaaactgtccttcgcctcgtattcctaccgcacttcagtggatctcaaggataaatggcgtaatctgatcagagcaacccagacacagcttccggcgcaaaaagatggtgcctgtccacggaagactaacccttctatcataccaataccaccatccattttgttgcgagtgaaggagctacatgagctgcagtcgcaagggggtggcttcacagccccagtcaagttctctgggcaggacggcaaggttctacagggaaaaggctcgggttttttgtgatccgtgtaatgcagatatacgtgtacgcttctggacgatgtggtatatatgagtaaatattatttgaagtaggtgtaaccacgttatccatcacaatgttctctacacgctggaacatgtgtaactcaggacgtccagaaaatattgttatacttagataagggcagacgtctgtcgccatgttttccaaacgtgtcaggcgtacacaatttaaaaagcaaatgcaaatctagacaggaagaggaaagttagagtaaacggagtatttgcggtgcattacaggaaagttgttgcagcaataatgaactaaactagtatttgcgatgcattacagaatggaatccgcaattcccttgtaaatagaggcaaacagctttctcgtttcggcttgtgctttataaattgctttggctcaaaagacgacgtt

SEQ ID NO: 202810 - DNA, 1653 bp, Zea Mays
ctcctccttgcggtgagaaacacggtgtcgccctcgaggctcgaccccgaccttttcctcccctcttctctagatcgcgacgaggcggactccccactcctgctgcccggagcgaagcggaccgcgtccccgccgcgtggcctgatcgatccctcagctctgccggtcgggccaatgctgcgtgcatcgagctgccgctgatcacgttcttcgcggttgcggcccccagtttgtgcggtgtggcgttggcggaaccttgtggaggctagttgctccaggactttgattttgacttatctatggaaatggatgactcacatggcaccatggttaataaaagtgaagagaatgactttgaaaagaaaggcacttctgatcctgtggtttatcagctagttcgggttgaaggtgatggaacacttgttcctgctacagaggatgatgttttgcagtttgaacatttccttcacaacgagaaggttgatcttcctcctattgaagatgcagaccatgtggaagagtttttcaacaatgactgcatgttactgaagaagcctgacttggaagatggatcttccaaattggagactgtggaagcacacacacaaaaattgggtgccaacttagaggataagggaccctcggttgaacctaaagggattcagccatcagttgagatgatattagtgaaggatggtgacaagggaaaccacctgaggaaagtacctgaggttccactaaaggttagttctgagaacgagcatgcagaagcagttgatagcaaaggggttcggaacctacaagcaaaggtctgcagtgctgtttccaagcctaaaataaagcatggtttaacgcggaagcatcatcgagcatggacattgagtgaggtcgtgaagctggtggatggtgtggctcggtatggagctggcaagtggtctgagattagaaaactgtccttcgcctcgtattcctaccgcacttcagtggatctcaaggataaatggcgtaatctgatcagagcaacccagacacagcttccggcgcaaaaagatggtgcctgtccacggaagactaacccttctatcataccaataccaccatccattttgttgcgagtgaaggagctacatgagctgcagtcgcaagggggtggcttcacagccccagtcaagttctctgggcaggacggcaaggttctacagggaaaaggctcgggttttttgtgatccgtgtaatgcagatatacgtgtacgcttctggacgatgtggtatatatgagtaaatattatttgaagtaggtgtaaccacgttatccatcacaatgttctctacacgctggaacatgtgtaactcaggacgtccagaaaatattgttatacttagataagggcagacgtctgtcgccatgttttccaaacgtgtcaggcgtacacaatttaaaaagcaaatgcaaatctagacaggaagaggaaagttagagtaaacggagtatttgcggtgcattacaggaaagttgttgcagcaataatgaactaaactagtatttgcgatgcattacagaatggaatccgcaattcccttgtaaatagaggcaaacagctttctcgtttcggcttgtgctttataaattgctttggctcaaaagacgacgtt

SEQ ID NO: 202811 - DNA, 1566 bp, Zea Mays
cttgcggtgagaaacacggtgtcgccctcgaggctcgaccccgaccttttcctcccctcttctctagatcgcgacgaggcggactccccactcctgctgcccggagcgaagcggaccgcgtccccgccgcgtggcctgatcgatccctcagctctgccggtcgggccaatgctgcgtgcatcgagctgccgctgatcacgtttgacttatctatggaaatggatgactcacatggcaccatggttaataaaagtgaagagaatgactttgaaaagaaaggcacttctgatcctgtggtttatcagctagttcgggttgaaggtgatggaacacttgttcctgctacagaggatgatgttttgcagtttgaacatttccttcacaacgagaaggttgatcttcctcctattgaagatgcagaccatgtggaagagtttttcaacaatgactgcatgttactgaagaagcctgacttggaagatggatcttccaaattggagactgtggaagcacacacacaaaaattgggtgccaacttagaggataagggaccctcggttgaacctaaagggattcagccatcagttgagatgatattagtgaaggatggtgacaagggaaaccacctgaggaaagtacctgaggttccactaaaggttagttctgagaacgagcatgcagaagcagttgatagcaaaggggttcggaacctacaagcaaaggtctgcagtgctgtttccaagcctaaaataaagcatggtttaacgcggaagcatcatcgagcatggacattgagtgaggtcgtgaagctggtggatggtgtggctcggtatggagctggcaagtggtctgagattagaaaactgtccttcgcctcgtattcctaccgcacttcagtggatctcaaggataaatggcgtaatctgatcagagcaacccagacacagcttccggcgcaaaaagatggtgcctgtccacggaagactaacccttctatcataccaataccaccatccattttgttgcgagtgaaggagctacatgagctgcagtcgcaagggggtggcttcacagccccagtcaagttctctgggcaggacggcaaggttctacagggaaaaggctcgggttttttgtgatccgtgtaatgcagatatacgtgtacgcttctggacgatgtggtatatatgagtaaatattatttgaagtaggtgtaaccacgttatccatcacaatgttctctacacgctggaacatgtgtaactcaggacgtccagaaaatattgttatacttagataagggcagacgtctgtcgccatgttttccaaacgtgtcaggcgtacacaatttaaaaagcaaatgcaaatctagacaggaagaggaaagttagagtaaacggagtatttgcggtgcattacaggaaagttgttgcagcaataatgaactaaactagtatttgcgatgcattacagaatggaatccgcaattcccttgtaaatagaggcaaacagctttctcgtttcggcttgtgctttataaattgctttggctcaaaagacgacgtt

SEQ ID NO: 202812 - DNA, 3156 bp, Zea Mays
aatttagagctcattattgtccctgcggtcctgccagccatacgttctgtctcttcatccccatcttcctctcgcctaatgtcatatcccatagctaagagttggctgccctaaacgtctatcttttttcattcatcggaagcaaaagctgtttgtttggctttaatccaaaatggtttctactggctttaatccaaagcgaacaattgcaatatatttcttaagttagtgggggaggataattgcatacccgtaacagcatacatgcgtttacattgagttttttctctctcttcttgttgacctgaggtgtactccatgcattgttcatgaatggtagtggcgagcaaggtcaaaaggtagaggctgaaagccgcaagccatgcaccgcaatgcaccagcacgcagcacatgcattgcccgccaattcacagtcacaggaacgaggaatcctaccaattccgcgtcgtgacaagaaaagcttcccaacatctctgtcacgggctctcgtagcagaggagtaccactcagcgtctcactccttccccttcccttcccttcccttcagggaccaggccatcagttcttcacgagctgggaagagctcgtgagccgtgcattgaaggcaatggccgctgttcgtagatgctgcctgctggccgcggtgctgctgtggtcggcgctcgcttcagcggccacggccgcgccggcgcctgtggtggccgggccggtgtccagggtggaggacgccaccatgttccggatatactacggtcagagcttcaaggtcatcaagaactccggcgatggcaagagctaccttctcatgcagaacacgtccaagatggcatccaagacgaagtactgcacggggaggattaagtcgttcgtcatccccctcgccagcttctccgtcgacaccacgacctctccagtgtcattctttgaggtgagcaatgcatgagactctgcagtgcagtccaattggcaatgggtccttctgcaagggaaagaaaaaaaactcagaaaaatgtctaaatattcaattcctcatctactccgaacttaaagctaaagaaaattgtactcaggacagtgttactaataacaagtatgcatacacattaaaacaagagcagcaaaagaaacagaggagccaatcaagagagagtatgctttaagcttatggcaaactcataagtacacttgacatatatgcagctgcttggagtgctagagagcttgaaaggaataacatcgaaccaagtcgcttctcagtgcgtgctccagtcatatacaagtggaaatgcccagcttgtgaatagaactgatgtgcagacactctcgcagtttactgcgcatttcataagcgatacagatgaagacagaggttgcaactttgcagcatatgtacccttagaagagggcacaccattgcagatggctgagtggatcaagtacctgggaactttcacaaactctgaaaacagggctaatgctgtctacgatgcagtaaagacaaactacctgtgcttaagcaaagtagctgcaaaccttggcacaagattcaagcctgtagtagcgtggattgaattcacacaggtatgcagctgcaaaccagtaaaatgggaatgtggacatttgttaaagaaagttacatcttacagtatgtcacagatgcaggagcagaaattgttgatgcaactattacggataagagatttaatagttcagatccagaggatatggataacttccatgctattctgtgtgtgagtatcaatcactcagaatgtaatattacaactgtaatgttagttgacgagctcactgttgcatgtgagtgtgtgacgtacaaaagacacatcctcttttggccataaaagggattaatgctgacacaattaataattgaaataaactggactggttgtatcaaatgaacaatgcctgcaaaacaccaaatggtctattacttgacacatttttcaaatgactctgcacttagtaacagttaactaagcttggttcacgaatattacagacagtggacgtggtcatagatcagacatatgctttggagcctgcagagtacaaactatccacctttttggagaatattaatgttagccacgactcctgttacagttttgtatcaaatcgcagcatatggagatttgacaaaaggataggagcttctgggacacttggtaaccgaagcaatactattactagtatcatatcttttacctatgtaatgatctaatgaatttttccatctcaaagaaatgatgtcatacacatttactctttttccctttaagattggtccgatggagctatctcacagcctcagttggttcttggagatctcatagaaattttcttcccaacggggaactacataacaatttacttcaggaatcttgcaaaggcatgacctgtgttttcatttcgctacctctttcctttcatttaattgatttatgatttctccagaacaaggttgttgatcagtggaactataataacacaggatgaaggggtcacagagattggtcctgaaatgtgcactaggagcatatccacacccatggatcctataatcctgtcatgtgaatgatgaacccagatgaacacgaagagttgtcaagctactgtactaacagacagtggcaactagttgacagaagcatttaagttactgacaaactgatctggacagaagcatttgcaacaaagattagattacacaatctagaaaaatactttctttcaaatattgagcagcaactgctgtttggtcagttgatcaataagtgattacaaacctcggtgtatccatgttaaaaggaatttgatgtaattatccaagagaccatcttatgaaattcaaacgactgttttcaatatgatatctgcctatgatttgtgatttcttgactgatatgtcctaaaatttataaatgggatactaagttactaggggtgttatatacccaaagttttagccttgaataggagtgcatgaaaaacaattatccatgtacccaaacctagacttgtgcgttctatacttctattgggtttttaattggtgagggtcggcgcgcagcaaaagcgggtccagaagcagcaagctaagctgtcacaaat

SEQ ID NO: 202813 - DNA, 2466 bp, Zea Mays
cacccgtcacatttgatttgattctgtgcgtatgtcttggtttattaactaatgacttaatagaccaagacatgcacacagaatcaaaccaacaatcaaacccttttatttgttccatcatatctatgggaggaatctaattagtacgtaaccctcctatgatacaataataataaataataataataataataataatgaatacaacacatgcaatggagcaagtggacgacgggcagcatacgcaggaaggcgtgtcgacggagcgcgcgttcgaggcagacccgatcccatccttgtcggagacgatcacggcacgggcgatagcggccagcttcatcctgggcgtcgccctctgcgccgtcgccatgaagatcagcctcaactcgggcttcctcccgtcgctcaccgtcccggctggcctcgtcggcttctacctcgtccgggcgtggatccgtgccctcgactgctgcttccaggtgccacaccagctgccattcacgcgccaggagaacaccgtcatccagacgtgcgttgtcgcctgctctgcaataacattcagcggagggtttggcacgtacatcctcgccatgggcaagaacgcggccggaggagacgtcagggacggcaagaacatcgtggagccgagcattggccgaacggttgctttcctcttcctcgtcagtttctccggcatgttcgtcctcatgccgttcaggaaggtcatgatcatccggcaccgcctcacgtaccctaacggaatggccacggcgcacctcatcaacagcttccacacccctcagggagccagtaagacagcaagtggagatgctgtttaggtcactgggaggaaccatgctgtggaacatgttccagtggtttttcgctgctgcaaagggctgtggcttcggagtgttccctatctttggcctcgaggcatataaacacggattctacttcgacttctccatgtccaacatcggcatcggcatgctgtgcccgtacaccatcaccgtgtccatgttcatcgggagcgtcgtctcgtgggggctcgtctcgccgtacctcgcgaccaaggcgggcgtctggtactcttcgcacctcagccccagcagcctcagcggcatcaggggctacaaggtgttcatcggcgtctccatgatactcgccgacggcctcttcaacttcctgtccatcgtggcgtacacgctgcacaccatgcgcaagaggcgcagcaggcagcagccgataataatccaaggcggcggctgcggtggcggtagtgaagccgacgacggtgacacgcagccgctaccgttccactgcctcaacgctgctgccgagcaaccgaagaagagcttcgatgatcgccgccgggcgcaggtgtttctgcgggaccatatatccaactcggtcaacatcgcgtgctacgtcctcctgtcgatggtctccgtcgccgccataccgtacctctacccgcagatgcggcgcgcgcacgtcgccctcatctacctcgccgcgccggtcgtcgcgttctgcgacgcgtacgccttcggcgtgacggacatgaacctgtcgagcacctacggcaagctcgccatggtgctcgtgggctccagcgtggggcgcaacgacggcggcgtcgtcgccggcctcgtggcctgtgggatcgtgatggggaccatgtccaacgccaacaacctgatgcaggacctcaagacggggtacctgacgctgacctcgccgcacaccgtgttcatcagccaggccatcggcacggcgctcgggtgcgtcgtcaacccggtcatgttctgggccttctacagggtggtgcagaacggcgacaccgacgtcttcgacgcgccctacgcccgagtgtaccgcagcatcgccatgctgagcgccgggcaggacgggatacccatgcacagcctctggctctgcaagctcttcttcgcgctggcgctcgcgctcagcgtgttcagggaggtggccatgtggaagcgctggcgtgtggcacgctacattccgagcatcatctgtgtggccatcgcctttgtggtgccggcgcgcatacccatcgacatgttcgtcgggagcttggtgctgtacctgtggaggcgtgccgaccctagcaaggcgccgacgttctcgatggcggtggcgtcagggatgatctgtggggacgggctagggatgctcttgtcatccacgatggcactcatgcatgcgcgggcgcccatctgcatcaagttcatgtctcgtaccgataatgtaaagctagatgccttcttagctacactgcctgtgacatagctagctccgtgcatgtatgcaatgtatcataggagggaacccattccgtagttgtgggttgtatctacttgcaaactcgtcgttgtagtctaaaattgtgagtgaatatagatttcatttgcacatttgagtagtgttgctcgctcgcac

SEQ ID NO: 202814 - DNA, 2793 bp, Zea Mays
ccgcaaatgaaatgaagtccttcctagggcgcccccttctcatccttgaaacgtaaggaacgtgtacactaaatcctccaaaggtatcctttctagtaggatagattgtgcccagagaaccagtctcattgaaaggtgctactcgcgggttcattaacagttcatcatgtgcaggcctttttgctggtgaagaattttttacagttgagtcatgagtctcaatgtctgatagctcctctatgtatctttttgttggctttctagttcgcttgtcagtgcattgctcgcctagcagatttccttgtggttcatcattatggatcggcaccctcttggaagaatcttcctggtcctcgctctgatagtaagagctagatggagagtccccttcgtttcctggatatataaccacagaagtagctctaagcccagtcttagctctttcatccatgtctgacatatcatttttggcatccttgccaacaattttgtagtctttaactacacaacctgaacttggaacatcgtaggaattagtcaagcccattgtaatccgtcttttgagccatatcttgtctttgacattagtctgccggccaaacgtggctctaaacgcctcctgaagttctctaatagtaagatcatccaaacagacttctcctcttaatatggaaaaatcaggcatggaactattaactcccgaaacagatggatctgtagatgtgtcgcatacagatcttgagcaggcatcagccttatatttttcagcacagcaagagtcatttaacactgtcgattttgtagtctcagttgaagcattgtcctgtcgagtgacgtttgccccttgttctctaagttggcacccaatttttgtgtgtgtgcttccacagtctccaatttggaagatccatctgcacaatcaggcttcttcagtaacatgcagtcattgttgaaaaactcttccacatggtctgcatcttcaataggaggaagatcaaccttctcgttgtgaaggaaatgttcaaactgcaaaacatcatcctctgtagcaggaacaagtgttccatcaccttcaacctgaacatatttaaagcatttctcaaaagactcgagtaagcatctaagtttttatattaacatgtggccgacaaatcataaaattaactaagaacttacccgaactagctgataaaccacaggatcagaagtgcctttcttttcaaagtcattctcttcacttttattaaccatggtgccatgtgagtcatccatttccatagataagtcaaacttcatccaacatttgtgacaatcaaaatatacaagtattaaaccctataatctgcaagtgaattaaaaattacaaattcataggattatacggtgaccaatttcatcaatcccagaacaaacaaaggtacgcaatgttctaacacatgtgatgactaattctgggactgggtagacaaatggattttttttgacatcctgaataaaaaaggaggcaaacaaaaggatgcacttgattacatacaaattattgcaagatgaaacaaaacacagctatgtactctatggaggtgttcggtcattgtgcatcgataatggtcaaacacagtcaaactcaaactttaataattaaagtacaaatcagtgatagcttgattaagccatcaattctacttcagtgtagatgcatttatgaatcactgaaatcaagagcataatgttgaatagtttataaaagagaatgcaaagcgagatcaacatgttactacccaagaaacaaggtttgttgcataatccttgtttccatgatctcaatcttgtgttagactatgaactttgtagtaaaaagcgatttcttgcatcatgccaaaatctcttgctcttgataggaatatattggttgggcagaactagtaaatcatgcatcgtgctgatacaaatggtacacaagatattttgagtgagtttctcagcaacaagccacagaaccagttgctcctagaagctaaaatgaactgagagctagtgctatgtaagaaaattgtcactaggcaacactgagaataacagaactgcagaagggatcaagcccaaagcagtcatttgcgaaactaaacctatccatgtttcactgattacagctacgtaccaaaactagtaattctgaccgtttaattcacactataaaccattgagcccactctaaacgagtgtaagaactaagaactcgtatactgatcctggattccccatgtatttacaacataccatatatataaaaagcaatactattactatataaaagtagataaagggaccgagttatggaagcagaaacgaaatccccaccgaaaaataccgaaaccccatgaaatcggaacgatcatactaatttgggaccattaatgactagtactactaaattgctctgctaaagccgtcagaatagtaattgaaggccacggttaagcagaatcgaaccttttcacctgacacgaaagccaccgcgtagcgcgtacaaatgttccagcataaaaataaaattattcagtaatccactcacatcaaagtcctggagcaactagcctccacaaggttccgccaacgccacaccgcacaaactgggggccgcaaccgcgaagaactaaccaagcaagcagaactagacaagtcggaccgcgcagaaaccaaattgagccgcgagccatggaatcgcacgggagctaagcgcgggaagcatcccgaaacgccatcaattaggcggatcggtgcgaagcgactcac

SEQ ID NO: 202815 - DNA, 2883 bp, Zea Mays
atccgcaaatgaaatgaagtccttcctagggcgcccccttctcatccttgaaacgtaaggaacgtgtacactaaatcctccaaaggtatcctttctagtaggatagattgtgcccagagaaccagtctcattgaaaggtgctactcgcgggttcattaacagttcatcatgtgcaggcctttttgctggtgaagaattttttacagttgagtcatgagtctcaatgtctgatagctcctctatgtatctttttgttggctttctagttcgcttgtcagtgcattgctcgcctagcagatttccttgtggttcatcattatggatcggcaccctcttggaagaatcttcctggtcctcgctctgatagtaagagctagatggagagtccccttcgtttcctggatatataaccacagaagtagctctaagcccagtcttagctctttcatccatgtctgacatatcatttttggcatccttgccaacaattttgtagtctttaactacacaacctgaacttggaacatcgtaggaattagtcaagcccattgtaatccgtcttttgagccatatcttgtctttgacattagtctgccggccaaacgtggctctaaacgcctcctgaagttctctaatagtaagatcatccaaacagacttctcctcttaatatggaaaaatcaggcatggaactattaactcccgaaacagatggatctgtagatgtgtcgcatacagatcttgagcaggcatcagccttatatttttcagcacagcaagagtcatttaacactgtcgattttgtagtctcagttgaagcattgtcctgtcgagtgacgtttgccccttgttctgtaagcaatttatctgaatgctgactatgaattctaaagtctgagggaggactaagggaatcatccaatgactacaaacaacatacctctaagttggcacccaatttttgtgtgtgtgcttccacagtctccaatttggaagatccatctgcacaatcaggcttcttcagtaacatgcagtcattgttgaaaaactcttccacatggtctgcatcttcaataggaggaagatcaaccttctcgttgtgaaggaaatgttcaaactgcaaaacatcatcctctgtagcaggaacaagtgttccatcaccttcaacctgaacatatttaaagcatttctcaaaagactcgagtaagcatctaagtttttatattaacatgtggccgacaaatcataaaattaactaagaacttacccgaactagctgataaaccacaggatcagaagtgcctttcttttcaaagtcattctcttcacttttattaaccatggtgccatgtgagtcatccatttccatagataagtcaaacttcatccaacatttgtgacaatcaaaatatacaagtattaaaccctataatctgcaagtgaattaaaaattacaaattcataggattatacggtgaccaatttcatcaatcccagaacaaacaaaggtacgcaatgttctaacacatgtgatgactaattctgggactgggtagacaaatggattttttttgacatcctgaataaaaaaggaggcaaacaaaaggatgcacttgattacatacaaattattgcaagatgaaacaaaacacagctatgtactctatggaggtgttcggtcattgtgcatcgataatggtcaaacacagtcaaactcaaactttaataattaaagtacaaatcagtgatagcttgattaagccatcaattctacttcagtgtagatgcatttatgaatcactgaaatcaagagcataatgttgaatagtttataaaagagaatgcaaagcgagatcaacatgttactacccaagaaacaaggtttgttgcataatccttgtttccatgatctcaatcttgtgttagactatgaactttgtagtaaaaagcgatttcttgcatcatgccaaaatctcttgctcttgataggaatatattggttgggcagaactagtaaatcatgcatcgtgctgatacaaatggtacacaagatattttgagtgagtttctcagcaacaagccacagaaccagttgctcctagaagctaaaatgaactgagagctagtgctatgtaagaaaattgtcactaggcaacactgagaataacagaactgcagaagggatcaagcccaaagcagtcatttgcgaaactaaacctatccatgtttcactgattacagctacgtaccaaaactagtaattctgaccgtttaattcacactataaaccattgagcccactctaaacgagtgtaagaactaagaactcgtatactgatcctggattccccatgtatttacaacataccatatatataaaaagcaatactattactatataaaagtagataaagggaccgagttatggaagcagaaacgaaatccccaccgaaaaataccgaaaccccatgaaatcggaacgatcatactaatttgggaccattaatgactagtactactaaattgctctgctaaagccgtcagaatagtaattgaaggccacggttaagcagaatcgaaccttttcacctgacacgaaagccaccgcgtagcgcgtacaaatgttccagcataaaaataaaattattcagtaatccactcacatcaaagtcctggagcaactagcctccacaaggttccgccaacgccacaccgcacaaactgggggccgcaaccgcgaagaactaaccaagcaagcagaactagacaagtcggaccgcgcagaaaccaaattgagccgcgagccatggaatcgcacgggagctaagcgcgggaagcatcccgaaacgccatcaattaggcggatcggtgcgaagcgactcac

SEQ ID NO: 202816 - DNA, 3101 bp, Zea Mays
cccttatccgcaaatgaaatgaagtccttcctagggcgcccccttctcatccttgaaacgtaaggaacgtgtacactaaatcctccaaaggtatcctttctagtaggatagattgtgcccagagaaccagtctcattgaaaggtgctactcgcgggttcattaacagttcatcatgtgcaggcctttttgctggtgaagaattttttacagttgagtcatgagtctcaatgtctgatagctcctctatgtatctttttgttggctttctagttcgcttgtcagtgcattgctcgcctagcagatttccttgtggttcatcattatggatcggcaccctcttggaagaatcttcctggtcctcgctctgatagtaagagctagatggagagtccccttcgtttcctggatatataaccacagaagtagctctaagcccagtcttagctctttcatccatgtctgacatatcatttttggcatccttgccaacaattttgtagtctttaactacacaacctgaacttggaacatcgtaggaattagtcaagcccattgtaatccgtcttttgagccatatcttgtctttgacattagtctgccggccaaacgtggctctaaacgcctcctgaagttctctaatagtaagatcatccaaacagacttctcctcttaatatggaaaaatcaggcatggaactattaactcccgaaacagatggatctgtagatgtgtcgcatacagatcttgagcaggcatcagccttatatttttcagcacagcaagagtcatttaacactgtcgattttgtagtctcagttgaagcattgtcctgtcgagtgacgtttgccccttgttctgtaagcaatttatctgaatgctgactatgaattctaaagtctgagggaggactaagggaatcatccaatgactgtaatatgttttcctgtgcaattatgtggatcttcttaaagttgagttgacttgaatatgtacaaaagtagtttcagttaaatttaacataatatatagaaaaaattattcaagcggggcaaattgaactcaaaattctacaaaaaaacactatctagtagcaatgtagcacaaacatattatggcagataagataattacgccgaacaagagacaaacaacatacctctaagttggcacccaatttttgtgtgtgtgcttccacagtctccaatttggaagatccatctgcacaatcaggcttcttcagtaacatgcagtcattgttgaaaaactcttccacatggtctgcatcttcaataggaggaagatcaaccttctcgttgtgaaggaaatgttcaaactgcaaaacatcatcctctgtagcaggaacaagtgttccatcaccttcaacctgaacatatttaaagcatttctcaaaagactcgagtaagcatctaagtttttatattaacatgtggccgacaaatcataaaattaactaagaacttacccgaactagctgataaaccacaggatcagaagtgcctttcttttcaaagtcattctcttcacttttattaaccatggtgccatgtgagtcatccatttccatagataagtcaaacttcatccaacatttgtgacaatcaaaatatacaagtattaaaccctataatctgcaagtgaattaaaaattacaaattcataggattatacggtgaccaatttcatcaatcccagaacaaacaaaggtacgcaatgttctaacacatgtgatgactaattctgggactgggtagacaaatggattttttttgacatcctgaataaaaaaggaggcaaacaaaaggatgcacttgattacatacaaattattgcaagatgaaacaaaacacagctatgtactctatggaggtgttcggtcattgtgcatcgataatggtcaaacacagtcaaactcaaactttaataattaaagtacaaatcagtgatagcttgattaagccatcaattctacttcagtgtagatgcatttatgaatcactgaaatcaagagcataatgttgaatagtttataaaagagaatgcaaagcgagatcaacatgttactacccaagaaacaaggtttgttgcataatccttgtttccatgatctcaatcttgtgttagactatgaactttgtagtaaaaagcgatttcttgcatcatgccaaaatctcttgctcttgataggaatatattggttgggcagaactagtaaatcatgcatcgtgctgatacaaatggtacacaagatattttgagtgagtttctcagcaacaagccacagaaccagttgctcctagaagctaaaatgaactgagagctagtgctatgtaagaaaattgtcactaggcaacactgagaataacagaactgcagaagggatcaagcccaaagcagtcatttgcgaaactaaacctatccatgtttcactgattacagctacgtaccaaaactagtaattctgaccgtttaattcacactataaaccattgagcccactctaaacgagtgtaagaactaagaactcgtatactgatcctggattccccatgtatttacaacataccatatatataaaaagcaatactattactatataaaagtagataaagggaccgagttatggaagcagaaacgaaatccccaccgaaaaataccgaaaccccatgaaatcggaacgatcatactaatttgggaccattaatgactagtactactaaattgctctgctaaagccgtcagaatagtaattgaaggccacggttaagcagaatcgaaccttttcacctgacacgaaagccaccgcgtagcgcgtacaaatgttccagcataaaaataaaattattcagtaatccactcacatcaaagtcctggagcaactagcctccacaaggttccgccaacgccacaccgcacaaactgggggccgcaaccgcgaagaactaaccaagcaagcagaactagacaagtcggaccgcgcagaaaccaaattgagccgcgagccatggaatcgcacgggagctaagcgcgggaagcatcccgaaacgccatcaattaggcggatcggtgcgaagcgactcac

SEQ ID NO: 202817 - DNA, 8778 bp, Zea Mays
caaacacggaagccggccggtcctatgttgtcttgaacgatccctccccctataaattaaagcttcgaagacagaggataatagaagtgagatcgtaagcacaagcaacagcttgaaaacgggcagaaaatagaacattctttgaaaaggagccaacgaaccgatcgatcgatcaagcaccaagagaactcgcgcaacacaaaatctctgcaaggattttccggccgctgcgccggcgagcaccatcctctggcaaccggcggggcagcagcagcatcaataaggggatccttgtctcgcttcgtgatcgtccgccgcgctggggtcgactcactcgcgccactcttcccgttccctaccgtggtggcggaaccctaatgcgggcccgagtctagcctccatggactttgccagccgccacgccgcagcggaggctgccacatcgtctgctgcatccgcctccgcccccgcggcggtcgctgaggagcctgagtacctcgcccggtacatcgtcgtcaagcactcgtggaggggaaggtatcgccgggtcctttgcatcgcctcttcctgcgtcgtcacgctcgaccccaccactctcaacctcaccaactcctacgatgtcggctccaagttcgaccatgctgaggctctcactgccaccgacgagttcacgctcgcagtccgcaccgatgcccgcggcaagttcaagcctatgcgcttctcatccccgctccgcccggggatcctcaccgaactccaccgcctccgcccggtccaggactccttcgacttccccgtcctccatctccgccgacgcacccacgagtgggcccccttcaaacttaaggttactcctgtgggtgttgagctccttgaggcttctggttatatgcgctggtgcttggaattcagagatatgaattctccagcaattattctcttggggaatagctatgggagcaagactactgaaggtggagggtttgtgctatgcccgctttatggtcggaagtcaaaagcttttatggctgcttcaggaactacaaacactgcaattatatcgcatctgacgaaaactgccaaattaaagattggattatcactatctgtggataattcacaatcaatgaaagcggacgagttcatagcaaaaagagctatggaggcagttggagctgctgaaacacgacatggagagtggtcagtaacaagattacgttctgctgcacatggcactgcttatattgagagcttaagtttgggtgttggaccaaggggtgggcttggagaacagggcgattctgtctcttgtctgcttgttcttacaagcacttcacttgttgaaagacgtccagagaactatgaggctgtcatagtacgaccactctcagcagtaagtgctcttgttcgatttgtagaagaaccacagatatttgcatttgaattcaatgatggctgcccaattcatgtatatgcaagcacttcccgtgataatctacttgcaacagttcttgatgttttagaaacccagagacagtgtgcaattccagtgctaccaaggttaacaatgtctggtcatcgcatagatccgccttgtggggtagcacatcttgagatgccctatcatggttctgttgacatggagtcagcttccatgcacacaaaacatttggccgcaattgctaaagaggctgtagtgtcatctgacactgttcctggagcaaaaatcagattgtggcgtagaataagggagtttaatgcatgtgtaccatacactggagtgcccgtcaatattgaagtacctgaagtggtcgtactggccttgatcagtcttcttccaaccataccacatagccttcctgctgatgctcctcctcttctgcctccatctccaaaagcagcagcaacaataatgggttttgttgcatgcttacgcaggctacttacatcaagaagtgtggcatcacatgtgatgtcgtttcctgtcgctgttgggagaataatgggtttgcttaggaatggttcggaaggagtagcagctgaagctgctggacttgtggctatgctaattggtggtggtcccggtgattcatccatcttaatggatgcaaggggagaatcccatgccacctacatgcatgcaaagtctgtactgttctcgcaaccaatgtatgttccgatccttgttaacaggttgaggccaatatcggtgtcaccgttgttatctttgtctgttgtggaagtccttgaagctatgctttgtgaaccccatggtgaaacaacccaacatgctacatttgttgagctactgcgtcaagttgctggtttgcgccgtcgtttgtttgcattatttgcacatccagctgaaagtgtgcgagagactatttctgttataatgcggacaattgctgaggaagatgcaatagcagcagagttcatgcgtgatgctgccttgaaggatggtgctcttctgaggcatttactaaatgctttcttcttgcctgctggagaacagcgtgatgttagtcggcaacttgttgctctttgggctgattcctatcaacctgcacttgatttgctatcaagaatacttcctcctggacttgttgcttacctccatacacgttcagatgaagaatcacagagccagtatgatgaagcaccgttgagcagaaggcagagacgaatacttcagcagaggagggtccgtggtagtaaaagtatgtcagtacaagaacaaggggtaccccccaatggtgttgaggatggggaacccttcaggcacaccagtgcgggcacttatggagtagcagatgttcatcagaggcatgttggcccatactcttccacccactctcctttgccaggtataagcattgatccttcttgtgcagttacagtgccacatggttttgtacctgaggccctttctgaaaataatcatcaaattggggaaccacagctggattcacatgtttattcagtggactccaatgccaatggtgatcttgtgagctcatcgcattcagatttttcagtccctgcacaggttgtggtggaaaacactcctgtgggatctggcaggctcctgtgcaattggtatggattttggagggcattcagtctagatcacaacagagcagatttgatatggaatgaacgcaccagacaggaactgagggaagcattgcaagctgaagttcataacctggatgtcgagaaagcaagaacaaatgatattgtccctggaagttcagtcactgaggacgctggtggtagtgacaacttacctcgaatgtcatggaattatgctgaatttttagtgagctacccaagcttgtccaaagaagtctgtgtggggcaatactatttgcgactgctgcttgaaattggaagcaactatcgagcacacaattttccactacgagatccggttgccttttttagggctctgtaccatcaatttttgtgtgatgcagatattggtcttactgtggatggtgcagtacctgacgagttgggatcatctgatgattggtgtgacattgggagattagatggctttggtggtggtggagggtcttctgtaagagaactctgttcaagggcaatgactatagtttatgagcaacattataaagttattggggcttttgatggcactccacatattactgtcctcttagaccgaaccgatgatagggttttgaggcatcgtttgttactacttttaaaggtcttgatgaatgacctttcaaatgttgaagcatgtgttttggttggaggctgtgttttggctgttgatttgcttactgttgcacatgaaacatctgagcggactgctattcctttgcaatctaacctcatcgcggcaactgcatttatggaaccttcaaaagaatggatgtacattgataaagatggcacacaagttgggccacttgaaaaagatgcaataagaaggctgtggtcaaagaagtcaattgattggacaacaaaatgttgggcttctggcatgtcagactggaaagggctacgggatatacgggaactgcgatgggcactttctgtaagagtgcctgttttgactcccactcagattggggatgctgcattatctatattacacagtatgacatctgcacggtccgatcttgatgatgcaggttatgcttactggggaaccaagcattgttgaagcagctgcctcattgcttatggctattgttacaagaaaccctaaagctatgattcgattatacattactggtgccttttactttgcattggcatatcctggttcaaatctcctatcaattgcacatttgttttcggccacacatactcatcaagcttttcatggtggtgaagaggcagcactatcttcatctttgcctttggcaaagcgtagtgtactgggtggactcctcccagaatctttgctgtatgtcttggagcgcagtggcccttctgcttttgccggtgcaatggtgtctgattctgacacaccagaaattatatggacccacaagatgcgagcagaaaaccttatttgtcaggttctgcagcatctcggtgaatttcctcagaaattggcacagcattgccattcattgtatgattatgctcctatgccacctgtgacttacccgaatctgaaagatgagatgtggtgccatcgttactacctccgcaacctatgtgatgagattaggtttcctaactggcccattgtagaacatgtggagtttttgcagtcattgttggtgatgtggcgtgaagagttaactcgtcgtccaatggatttatctgaagaagaagtctgtaagatactcgagatttctcttgatgatcttgtgcttggtgagaacggtagcatcaagcagtcatctgacttaagtttggctaattccggaaacaaaattgaaaacattgatgaggagaagcttaagcgccaataccgaaagctagcaataaaatatcatccagacaagaaccctgaaggaagggagaaatttgttgctgtgcaaaaggcttatgagcgattgcaggctagtatgcagggattgcagggaccacaagtctggaggctgctactcttgctgaaggcacaacgcatcttgtacaagagatatggagatgtcttgggaccattcaaatatgctggttatcctatgttgctaaatgcagttactgtagataaagatgacagcaattttctttcatttgataggacccctcttctgatagctgcttcggagctaatttggttgacatgtgcatcatcttcattaaatggagaagaacttataagggatggtggtatccccttgttggcaacacttctttctcgctgtatgtgtgttgttcagccaactacaccagcaaatgaaccagctgcaagaatagtcaccaacataatgcataccttctctgttctcagtcagtttgaatcaggaagagttgagattcttaagtttggtggccttgccgatggcattgtgcattgcacagaacttgagtttgttccctcagctgtggatgctgcgctgctgacagctgcgaatgttttggtttcatctgagttgcaaaatgctctgctcagggctggatttttatggtatgtgctacccctgctgcttcaatacgattcgacagcagaagagaatgagacatgtgaagcacatggtgttggggcaagggtgcagattgccaaaaatctgcatgctgttcatgcaactcaagctttgtctaagctttgtggtctcagtggcgatgatatcctgtacccagataacaaacctgcatacaatgcactgaaggctcttcttactccaaagcttgctgacatgctgagaaaccacccacctaaagagttattatcaaatctaaattcaaatttggaatcaccagagatcatatggaattcatccaccagaggggagcttctcaaatttgttgaccagcagcgtgctagtcaaggccctgatggttcatatgatttgacagaatcacattctttcacctatgaagctttatctaaagaattgaacgttggtaatgtatacttgagagtttacaacaaccaaccggattttgaaataagtgaccaggaggaattttgcattgccctgcttaagtttatagtagagttagtactacagtggaattccattaatttggagacgattcatcaacatggttcagttactgaagcatctatgtctggaaatgatgaagtcagtgattcaactattgaaggaaaaatggataattcatcaggaaaacaaagtacagatggagattctgaagttattataaacctccaaagtggactaacatcacttcagaatcttcttacaagtaatccaggcttagctgctgtttttgcttccaaggagcgtctgattcctctttttgaatgccttgcactgcatgttccttctgaaagcaccagcccacaaatctgtttaagtgttctttctctgttgactaagcatgcttcttgtttggaggctatggttgcagaaaggatgagcctgattttgctatttcagatactccactgcaatcccccttgcagggacggagctcttgctgtactgtattctttagccagcacaccagagcttgcctgggcagctgccaagcatggtggtgttgtttacattcttgaacttatgttgccacttcaagaggaaatccctgtgcagcaaagagctgtagctgcatctttattgggcaaacttgttgggcaaccaatgcatggccccagggtagcaatcacccttgccaggttcctgcctgatggtttggtttctgccattaaagatggacctggtgaagcggttgtttcttctcttgagctgacaactgaaactcctgaactagtatggacacccgcaatggcagcttctctttctgcacagttggcaacaatggcatcagacctctatcaagagcagatgaaaggacgtgttgttgattgggatgtacctgaacaagcttccggacaacatgtaatgaaggatgaaccacaggttggtggaatttatgtaagactttttcttaaggatcccaagtttccactgagaaaccctaaaagattccttgaagggctcctagatcagtatgtctcctctgttgctgctacacatcatgaagcaattgctacagatccagagcttcctttgctactgtccgcggcattggtttccttactacgagttcatccagtgcttgctgaccatgttggctacctcggttatgttccaaagcttgttgcagctatggcttatgagggacaaagggaaactatggcatctgggcaggcttccagtggatcgcaggcagaacctggtgaacatgacaattcatctcactctgaggccactgtgcagactccacaagaacgtgtccgccttagttgtttgcgtgttctgcatcagcttgcgtctagcacaacctgtgcagaagctatggcatcaacaagtgcaggaactcctcaggtcataccactgcttatgaaagcaattggatggcaaggtggaagtatactggcattggagacattaaagcgtgtagtcggtgctggtaatcgggctcgtgatgctcttgttgcacaggggcttaaggttggtcttgttgaagtgctccttggtattcttgactggcgtgctggtggaagacagggactccgtaataaaatgaagtggaacgaatcagaggcttcaattgggcgtgttttggctgtggaggtgcttcatgcttttgcaaccgaaggtgcacactgtgctagagttcgtgaagtcctgaattcctctgatgtatggagtgcttacaaagaccagaagcacgaccttttccttccatccagtgcacaatcttctgctgctggagttgctgggctcattgagagctcgtcaagattcacttacgccctcgccgcaccgccatcttcttctctctctccaccatcagctccagcaaaccctagtggacggcaatattatcagcattcgtagtggaaaacgaaacacttaatctctgctccttggagtatgaccatgaaggcaccaccatggtaacgatttgtagagtgaggccaccttgagtgggcttgttactgtcaccaaatacagctcgtgtctccattcccaccaatgagcagctgatcagttgcccgcatttcagtacatagcatagcatagcataccattgtacagttttccattacataagggtcggggtcggttttgtgtgtgtgttttttttttgtaaagcatatgattttttttgggtaccatagatgtccatagaatacgcgagctgaatattgtatccattcattactgggttgatgcactcccttgttcggatcacacgacttacttgtgacgagagaaataaatgttttttttgcctttgtttgatgagcattttctggtgtcagttaaccttttacagtcatattgtcgtgtatgaccaccgagtgtgtgtaggttttatatagcctgtccgtcactacttttggttagagtttgctatttcatttgtaatgaagttgtttgctgacacctttgcgtgtaacaaaagaaaagcacacaaaaaataacatgctccctcagcctcggtgacacgatgcgtgacatacaaaaaaaacaaaatcctgctgcttcacatatagcctgtccgtcacaacttgtgggtagagtttgctatttcatctgtaatgaaagttttgcgtgtaacaaaagaaaagcacacaaaaaataacat

SEQ ID NO: 202818 - DNA, 8853 bp, Zea Mays
caaacacggaagccggccggtcctatgttgtcttgaacgatccctccccctataaattaaagcttcgaagacagaggataatagaagtgagatcgtaagcacaagcaacagcttgaaaacgggcagaaaatagaacattctttgaaaaggagccaacgaaccgatcgatcgatcaagcaccaagagaactcgcgcaacacaaaatctctgcaaggattttccggccgctgcgccggcgagcaccatcctctggcaaccggcggggcagcagcagcatcaataaggggatccttgtctcgcttcgtgatcgtccgccgcgctggggtcgactcactcgcgccactcttcccgttccctaccgtggtggcggaaccctaatgcgggcccgagtctagcctccatggactttgccagccgccacgccgcagcggaggctgccacatcgtctgctgcatccgcctccgcccccgcggcggtcgctgaggagcctgagtacctcgcccggtacatcgtcgtcaagcactcgtggaggggaaggtatcgccgggtcctttgcatcgcctcttcctgcgtcgtcacgctcgaccccaccactctcaacctcaccaactcctacgatgtcggctccaagttcgaccatgctgaggctctcactgccaccgacgagttcacgctcgcagtccgcaccgatgcccgcggcaagttcaagcctatgcgcttctcatccccgctccgcccggggatcctcaccgaactccaccgcctccgcccggtccaggactccttcgacttccccgtcctccatctccgccgacgcacccacgagtgggcccccttcaaacttaaggttactcctgtgggtgttgagctccttgaggcttctggttatatgcgctggtgcttggaattcagagatatgaattctccagcaattattctcttggggaatagctatgggagcaagactactgaaggtggagggtttgtgctatgcccgctttatggtcggaagtcaaaagcttttatggctgcttcaggaactacaaacactgcaattatatcgcatctgacgaaaactgccaaattaaagattggattatcactatctgtggataattcacaatcaatgaaagcggacgagttcatagcaaaaagagctatggaggcagttggagctgctgaaacacgacatggagagtggtcagtaacaagattacgttctgctgcacatggcactgcttatattgagagcttaagtttgggtgttggaccaaggggtgggcttggagaacagggcgattctgtctcttgtctgcttgttcttacaagcacttcacttgttgaaagacgtccagagaactatgagggctgtcatagtacgaccactctcagcagtaagtgctcttgttcgatttgtagaagaaccacagatatttgcatttgaattcaatgatggctgcccaattcatgtatatgcaagcacttcccgtgataatctacttgcaacagttcttgatgttttagaaacccagagacagtgtgcaattccagtgctaccaaggttaacaatgtctggtcatcgcatagatccgccttgtggggtagcacatcttgagatgccctatcatggttctgttgacatggagtcagcttccatgcacacaaaacatttggccgcaattgctaaagaggctgtagtgtcatctgacactgttcctggagcaaaaatcagattgtggcgtagaataagggagtttaatgcatgtgtaccatacactggagtgcccgtcaatattgaagtacctgaagtggtcgtactggccttgatcagtcttcttccaaccataccacatagccttcctgctgatgctcctcctcttctgcctccatctccaaaagcagcagcaacaataatgggttttgttgcatgcttacgcaggctacttacatcaagaagtgtggcatcacatgtgatgtcgtttcctgtcgctgttgggagaataatgggtttgcttaggaatggttcggaaggagtagcagctgaagctgctggacttgtggctatgctaattggtggtggtcccggtgattcatccatcttaatggatgcaaggggagaatcccatgccacctacatgcatgcaaagtctgtactgttctcgcaaccaatgtatgttccgatccttgttaacaggttgaggccaatatcggtgtcaccgttgttatctttgtctgttgtggaagtccttgaagctatgctttgtgaaccccatggtgaaacaacccaacatgctacatttgttgagctactgcgtcaagttgctggtttgcgccgtcgtttgtttgcattatttgcacatccagctgaaagtgtgcgagagactatttctgttataatgcggacaattgctgaggaagatgcaatagcagcagagttcatgcgtgatgctgccttgaaggatggtgctcttctgaggcatttactaaatgctttcttcttgcctgctggagaacagcgtgatgttagtcggcaacttgttgctctttgggctgattcctatcaacctgcacttgatttgctatcaagaatacttcctcctggacttgttgcttacctccatacacgttcagatgaagaatcacagagccagtatgatgaagcaccgttgagcagaaggcagagacgaatacttcagcagaggagggtccgtggtagtaaaagtatgtcagtacaagaacaaggggtaccccccaatggtgttgaggatggggaacccttcaggcacaccagtgcgggcacttatggagtagcagatgttcatcagaggcatgttggcccatactcttccacccactctcctttgccaggtataagcattgatccttcttgtgcagttacagtgccacatggttttgtacctgaggccctttctgaaaataatcatcaaattggggaaccacagctggattcacatgtttattcagtggactccaatgccaatggtgatcttgtgagctcatcgcattcagatttttcagtccctgcacaggttgtggtggaaaacactcctgtgggatctggcaggctcctgtgcaattggtatggattttggagggcattcagtctagatcacaacagagcagatttgatatggaatgaacgcaccagacaggaactgagggaagcattgcaagctgaagttcataacctggatgtcgagaaagcaagaacaaatgatattgtccctggaagttcagtcactgaggacgctggtggtagtgacaacttacctcgaatgtcatggaattatgctgaatttttagtgagctacccaagcttgtccaaagaagtctgtgtggggcaatactatttgcgactgctgcttgaaattggaagcaactatcgagcacacaattttccactacgagatccggttgccttttttagggctctgtaccatcaatttttgtgtgatgcagatattggtcttactgtggatggtgcagtacctgacgagttgggatcatctgatgattggtgtgacattgggagattagatggctttggtggtggtggagggtcttctgtaagagaactctgttcaagggcaatgactatagtttatgagcaacattataaagttattggggcttttgatggcactccacatattactgtcctcttagaccgaaccgatgatagggttttgaggcatcgtttgttactacttttaaaggtcttgatgaatgacctttcaaatgttgaagcatgtgttttggttggaggctgtgttttggctgttgatttgcttactgttgcacatgaaacatctgagcggactgctattcctttgcaatctaacctcatcgcggcaactgcatttatggaaccttcaaaagaatggatgtacattgataaagatggcacacaagttgggccacttgaaaaagatgcaataagaaggctgtggtcaaagaagtcaattgattggacaacaaaatgttgggcttctggcatgtcagactggaaagggctacgggatatacgggaactgcgatgggcactttctgtaagagtgcctgttttgactcccactcagattggggatgctgcattatctatattacacagtatgacatctgcacggtccgatcttgatgatgcaggtgaaatagtaactccaactcctagggtgaaacgtatattgtcaagtccaagatgccttcctcatgtggcccaggttatgcttactggggaaccaagcattgttgaagcagctgcctcattgcttatggctattgttacaagaaaccctaaagctatgattcgattatacattactggtgccttttactttgcattggcatatcctggttcaaatctcctatcaattgcacatttgttttcggccacacatactcatcaagcttttcatggtggtgaagaggcagcactatcttcatctttgcctttggcaaagcgtagtgtactgggtggactcctcccagaatctttgctgtatgtcttggagcgcagtggcccttctgcttttgccggtgcaatggtgtctgattctgacacaccagaaattatatggacccacaagatgcgagcagaaaaccttatttgtcaggttctgcagcatctcggtgaatttcctcagaaattggcacagcattgccattcattgtatgattatgctcctatgccacctgtgacttacccgaatctgaaagatgagatgtggtgccatcgttactacctccgcaacctatgtgatgagattaggtttcctaactggcccattgtagaacatgtggagtttttgcagtcattgttggtgatgtggcgtgaagagttaactcgtcgtccaatggatttatctgaagaagaagtctgtaagatactcgagatttctcttgatgatcttgtgcttggtgagaacggtagcatcaagcagtcatctgacttaagtttggctaattccggaaacaaaattgaaaacattgatgaggagaagcttaagcgccaataccgaaagctagcaataaaatatcatccagacaagaaccctgaaggaagggagaaatttgttgctgtgcaaaaggcttatgagcgattgcaggctagtatgcagggattgcagggaccacaagtctggaggctgctactcttgctgaaggcacaacgcatcttgtacaagagatatggagatgtcttgggaccattcaaatatgctggttatcctatgttgctaaatgcagttactgtagataaagatgacagcaattttctttcatttgataggacccctcttctgatagctgcttcggagctaatttggttgacatgtgcatcatcttcattaaatggagaagaacttataagggatggtggtatccccttgttggcaacacttctttctcgctgtatgtgtgttgttcagccaactacaccagcaaatgaaccagctgcaagaatagtcaccaacataatgcataccttctctgttctcagtcagtttgaatcaggaagagttgagattcttaagtttggtggccttgccgatggcattgtgcattgcacagaacttgagtttgttccctcagctgtggatgctgcgctgctgacagctgcgaatgttttggtttcatctgagttgcaaaatgctctgctcagggctggatttttatggtatgtgctacccctgctgcttcaatacgattcgacagcagaagagaatgagacatgtgaagcacatggtgttggggcaagggtgcagattgccaaaaatctgcatgctgttcatgcaactcaagctttgtctaagctttgtggtctcagtggcgatgatatcctgtacccagataacaaacctgcatacaatgcactgaaggctcttcttactccaaagcttgctgacatgctgagaaaccacccacctaaagagttattatcaaatctaaattcaaatttggaatcaccagagatcatatggaattcatccaccagaggggagcttctcaaatttgttgaccagcagcgtgctagtcaaggccctgatggttcatatgatttgacagaatcacattctttcacctatgaagctttatctaaagaattgaacgttggtaatgtatacttgagagtttacaacaaccaaccggattttgaaataagtgaccaggaggaattttgcattgccctgcttaagtttatagtagagttagtactacagtggaattccattaatttggagacgattcatcaacatggttcagttactgaagcatctatgtctggaaatgatgaagtcagtgattcaactattgaaggaaaaatggataattcatcaggaaaacaaagtacagatggagattctgaagttattataaacctccaaagtggactaacatcacttcagaatcttcttacaagtaatccaggcttagctgctgtttttgcttccaaggagcgtctgattcctctttttgaatgccttgcactgcatgttccttctgaaagcaccagcccacaaatctgtttaagtgttctttctctgttgactaagcatgcttcttgtttggaggctatggttgcagaaaggatgagcctgattttgctatttcagatactccactgcaatcccccttgcagggacggagctcttgctgtactgtattctttagccagcacaccagagcttgcctgggcagctgccaagcatggtggtgttgtttacattcttgaacttatgttgccacttcaagaggaaatccctgtgcagcaaagagctgtagctgcatctttattgggcaaacttgttgggcaaccaatgcatggccccagggtagcaatcacccttgccaggttcctgcctgatggtttggtttctgccattaaagatggacctggtgaagcggttgtttcttctcttgagctgacaactgaaactcctgaactagtatggacacccgcaatggcagcttctctttctgcacagttggcaacaatggcatcagacctctatcaagagcagatgaaaggacgtgttgttgattgggatgtacctgaacaagcttccggacaacatgtaatgaaggatgaaccacaggttggtggaatttatgtaagactttttcttaaggatcccaagtttccactgagaaaccctaaaagattccttgaagggctcctagatcagtatgtctcctctgttgctgctacacatcatgaagcaattgctacagatccagagcttcctttgctactgtccgcggcattggtttccttactacgagttcatccagtgcttgctgaccatgttggctacctcggttatgttccaaagcttgttgcagctatggcttatgagggacaaagggaaactatggcatctgggcaggcttccagtggatcgcaggcagaacctggtgaacatgacaattcatctcactctgaggccactgtgcagactccacaagaacgtgtccgccttagttgtttgcgtgttctgcatcagcttgcgtctagcacaacctgtgcagaagctatggcatcaacaagtgcaggaactcctcaggtcataccactgcttatgaaagcaattggatggcaaggtggaagtatactggcattggagacattaaagcgtgtagtcggtgctggtaatcgggctcgtgatgctcttgttgcacaggggcttaaggttggtcttgttgaagtgctccttggtattcttgactggcgtgctggtggaagacagggactccgtaataaaatgaagtggaacgaatcagaggcttcaattgggcgtgttttggctgtggaggtgcttcatgcttttgcaaccgaaggtgcacactgtgctagagttcgtgaagtcctgaattcctctgatgtatggagtgcttacaaagaccagaagcacgaccttttccttccatccagtgcacaatcttctgctgctggagttgctgggctcattgagagctcgtcaagattcacttacgccctcgccgcaccgccatcttcttctctctctccaccatcagctccagcaaaccctagtggacggcaatattatcagcattcgtagtggaaaacgaaacacttaatctctgctccttggagtatgaccatgaaggcaccaccatggtaacgatttgtagagtgaggccaccttgagtgggcttgttactgtcaccaaatacagctcgtgtctccattcccaccaatgagcagctgatcagttgcccgcatttcagtacatagcatagcatagcataccattgtacagttttccattacataagggtcggggtcggttttgtgtgtgtgttttttttttgtaaagcatatgattttttttgggtaccatagatgtccatagaatacgcgagctgaatattgtatccattcattactgggttgatgcactcccttgttcggatcacacgacttacttgtgacgagagaaataaatgttttttttgcctttgtttgatgagcattttctggtgtcagttaaccttttacagtcatattgtcgtgtatgaccaccgagtgtgtgtaggttttatatagcctgtccgtcactacttttggttagagtttgctatttcatttgtaatgaagttgtttgctgacacctttgcgtgtaacaaaagaaaagcacacaaaaaataacatgctccctcagcctcggtgacacgatgcgtgacatacaaaaaaaacaaaatcctgctgcttcacatatagcctgtccgtcacaacttgtgggtagagtttgctatttcatctgtaatgaaagttttgcgtgtaacaaaagaaaagcacacaaaaaataacat

SEQ ID NO: 202819 - DNA, 1427 bp, Zea Mays
gattacctcctaccgtccgacccggctccctcggtccctccctcggtccctcccggtctcgcagttcctccccgtcgtcttccaccgcaaatcgccgaagcaagcaggcgagctcgggaccagatccactgcgggcagctggagcggaagggccatggggacgccgccgcctttccaggagtccggccactgcgacgtctgccgctgcaccttcaacaccttccgccgccgtgctctcccgcagtatgggatatatacagacgtcagagtctgctacggttgcttcaacaaatcctccagccaaggacacgctgataatccggtgtcagctggtagcatttctggagcagctgactctttttcagggctgagtttgggtaaggaggatgattcgtcgcctatgaagaattcaacggttcagagcacggcagcccttattgagtgcaaatgtgggatgcctttgtgtatatgtgaagcaccaaaaccagaaccttctcctacacctgtaaagtcaaatccaaggccaaagaagcctgctaacactcaacagaaggcttcagctacttccagtagcaactcaagcccattcttaaatattggattaatgaacaacgatagcaatgataagggcattgttgactatgaagttagtggggagggactgagagaagcaattaaaggcggggatgttaagggtgtaaagaaacttcttacacagggagtggattctaactactgcgacaaacaaggatttactttgctgcatttggctgctttgtttaaccaaactgaaattgctcttattctcatggaccatggggcaaatgttgaaagcaaaaatgggcaaggggaaactcctttggactgtgctccggcaatgctgcaatacaaaatgcgccaacgggtggaagaactcgcggcttcggcttcgaagggaccactagggtgaactgtgctcgtgctagtttctgctgagttcctcctattccagtttgtgtcaaatgtggtgtcaagaataaaatagttaagtcagctgaaagcttcttgctggtgggacagtgtttggtccgccagtgtataccatctagaaacgttgaatgccagtcacggctcacgcgtgtgaaataatatatattcagcttcatcctacattcctactcatgtactctgtagccggtgaatacttccaaacatttaccacgtacaatatgtttttcttttactgaaacagcattcctctaggagatgcatgacagcagaaagcttcctgccggtggcctggtgccggtgggatagtgctcgtgctcccagtaccacctgcaaactttggaatcccagccataatttgccagtgcgaaatactgtaattcattcagcttcacctgcaaactttggattctgccgttaccaagtctgccgtttagtat

SEQ ID NO: 202820 - DNA, 1228 bp, Zea Mays
gattacctcctaccgtccgacccggctccctcggtccctccctcggtccctcccggtctcgcagttcctccccgtcgtcttccaccgcaaatcgccgaagcaagcaggcgagctcgggaccagatccactgcgggcagctggagcggaagggccatggggacgccgccgcctttccaggagtccggccactgcgacgtctgccgctgcaccttcaacaccttccgccgccgtcatcactgccgcagctgcggacggacgctctgtcacgagcattcttcgtactacatggctctcccgcagtatgggatatatacagacgtcagagtctgctacggttgcttcaacaaatcctccagccaaggacacgctgataatccggtgtcagctggtagcatttctggagcagctgactctttttcagggctgagtttgggtaaggaggatgattcgtcgcctatgaagaattcaacggttcagagcacggcagcccttattgagtgcaaatgtgggatgcctttgtgtatatgtgaagcaccaaaaccagaaccttctcctacacctgtaaagaatatcaacaccgttcccccaaccacacagtcaaatccaaggccaaagaagcctgctaacactcaacagaaggcttcagctacttccagtagcaactcaagcccattcttaaatattggattaatgaacaacgatagcaatgataagggcattgttgactatgaagttagtggggagggactgagagaagcaattaaaggcggggatgttaagggtgtaaagaaacttcttacacagggagtggattctaactactgcgacaaacaaggatttactttgctgcatttggctgctttgtttaaccaaactgaaattgctcttattctcatggaccatggggcaaatgttgaaagcaaaaatgggcaaggggaaactcctttggactgtgctccggcaatgctgcaatacaaaatgcgccaacgggtggaagaactcgcggcttcggcttcgaagggaccactaggcattcctctaggagatgcatgacagcagaaagcttcctgccggtggcctggtgccggtgggatagtgctcgtgctcccagtaccacctgcaaactttggaatcccagccataatttgccagtgcgaaatactgtaattcattcagcttcacctgcaaactttggattctgccgttaccaagtctgccgtttagtat

SEQ ID NO: 202821 - DNA, 1134 bp, Zea Mays
actgatccgattacctcctaccgtccgacccggctccctcggtccctccctcggtccctcccggtctcgcagttcctccccgtcgtcttccaccgcaaatcgccgaagcaagcaggcgagctcgggaccagatccactgcgggcagctggagcggaagggccatggggacgccgccgcctttccaggagtccggccactgcgacgtctgccgctgcaccttcaacaccttccgccgccgtcatcactgccgcagctgcggacggacgctctgtcacgagcattcttcgtactacatggctctcccgcagtatgggatatatacagacgtcagagtctgctacggttgcttcaacaaatcctccagccaaggacacgctgataatccggtgtcagctggtagcatttctggagcagctgactctttttcagggctgagtttgggtaaggaggatgattcgtcgcctatgaagaattcaacggttcagagcacggcagcccttattgagtgcaaatgtgggatgcctttgtgtatatgtgaagcaccaaaaccagaaccttctcctacacctgtaaagaatatcaacaccgttcccccaaccacacagtcaaatccaaggccaaagaagcctgctaacactcaacagaaggcttcagctacttccagtagcaactcaagcccattcttaaatattggattaatgaacaacgatagcaatgataagggcattgttgactatgaagttagtggggagggactgagagaagcaattaaaggcggggatgttaagggtgtaaagaaacttcttacacagggagtggattctaactactgcgacaaacaaggatttactttgctgcatttggctgctttgtttaaccaaactgaaattgctcttattctcatggaccatggggcaaatgttgaaagcaaaaatgggcaagatcccactcatgtggaagcctccgacgatgggtctgctcttaagctctcgaaaaaaatgttcaatgtagagccaaagaggagagagtatgacaaagggaaaagtggcttgagttccatgctcaatttggttctgttgagagttatcatcgtcatatatttagttactcacccgattttgaaattgaagtag

SEQ ID NO: 202822 - DNA, 3167 bp, Zea Mays
ccagtttcacaccacacgctccacggctggggatcacgctgtcacgctcacgcgcccctccccccgccgccaacgcccacgctgcgagcgcgaatccatcttctctacctcctcgtccattcctagggttcctcctctgccgaatcgcggggaactctgcgggcccaatttggtagggtaatctcctaccaggaggtcaaattccagtcaacgccgcttggttttgtagccgaccggtcgatttgaatccaggggcaccgattggctgggtgagagggcaggctcgatttgaacccgcctctgcccttttcgtggaagttttgggtcttattaggcgcggattactggggtctagggatgtggtagttactagctgcttgggttaggcggcgcgccgaggtgcttccgtgcttggctgactagtgtcaatggcgggatctgtcggcaaggccagggcggcgctgcggtcgtccccgaagcggtacagcggcacggacccaccgttgtctctggcggggccgacgttggcggatctgcagaggacggccgagctggagaagttcttggttgaagcgggcctctatgagggtaaagaggagtccgcgaagcgggaagatgtgctatccgagattggtctgatagtcaaggaatgggtgaagcagttgactcgtaagaaaggatatgctgagcaattggttgaacaagcaaatgcaatcctttttacttttgggtcttacagattgggggttcatggacctggagctgatattgataccctttgtgttggaccttcatatgtgaaccgagaggaggatttctttgtcacactgcatggcatattagctgagaaggaagaagttgctgagttgcaacctgtacctgatgctcatgtacctgtattgaaatttaagttccgtgggatatcaattgaccttctctatgctagcatctctctttcagtgataccagcggatttcgatatttctcaaggatctgtactttgtgatgttgacgaagcaactgtgcgaagtcttaatggttgcagagtggcggatcagattcttcggcttgttccaaatgttgagaatttccggacaacactcagatgcttgaagtactgggcaaagagaaggggtgtttattctaacattactggtttccttgggggtgtgaactgggctctgctggttgctcgtgtatgccaactctatcctaatgctgtgccaagtatgctggtttctaggttcttcagagtttttactcagtggcaatggccaaatccagtgatgctatgtgcgattgagaataatgatcttggtttttctatatgggatccacgcaaaaatccacgtgacagaaaccatctcatgcccatcatcactccagcctacccatgcatgaactctagttacaatgtttcaaccagcacactgagggttataatggagcaatttcaatttggcaacaaagtttgtcaggaaattgaacttaataaggccaattggaatgccttatttgagcctttccatttttttgaggcatacagaaagtttctagtggttgacatagttgcagaggatgacgatgatcttcgtctttggaagggatggatcgagtctcgtttgagacaacttactttaaagattgagcgggatactaaaggaattttgcagtgccatccgtacccatgcgagtattcagatcccacaatagagtgtgcacattgtgccttctacatgggcttatcaaggaaagaggggttgaaaaaacgtggtcaacagtttgatatccgtgggacagtagatgaatttatgcgtgaaattggcatgtattcattgtggaagcctgggatggatctggctgtcacccatgttcatagggagcaggtcccatcttatgtatttgagcaaggatacaagaaaccctgccctacaatgcatgcaaaccaacaagagcagtctgatggagatggaacatttagcccatatctggagagtcagcttaagagaaagtacatttccgatggagatggtcatgtggatctttgcaaatctgtaaaaagggcttcagtaagcccacctggtgtgggaaccccacctcatcttggaaatagtgtcagtaacgttgtttgtgacagtccagtcaaattcgtttcaagtgtcgtttgcagcggagcgcatgcttcctcatcacatgatgatataaatatagaacaagcacaattaactacttcaccatatggatctgaggatacctcagcatcaggtacaagctgtgcagcagtgggagcagttattttggctgatgaatccagcaagctcggtaacttgacatcagatcttgaagttgatacaattcagacaatgccactgcacacatctttagaatgcgtcgctcaaaagggtgaaacaaagcttgaggaaatcagaaggttggcgagcaacaattgtgctgagtttctagagagctaagttcttgctgacaaggtacacttagacttaggtgggcatgaagtgaattgaaacatcattccagacaagtcaatgaaacatgtggttcgaagcggtttcgaaaggtgatgcaggggtgaagtttgcatagcatcgataggccggaaatcggatttgaggacccaatgatatgccgctgcatggaaagtttcatcatttcatgcctgtggtcggtttgctcgtgaagattgcttttgttcgctgtggaagcgggtgcaagtattacacagcagcaatatcgggactgttgtgaaggatgaagttgagagtcaacatctgagaaccatggagctcaccatacgccacaaaggaactaagctgctggtttaggcatggttaagagagtcagtgctggtcctttaggttaaataaaaactttgcggggctgcacggtgtgcagaaaaggttgagtctagggcactaggctgatggtctatgtatgtgatgtacgcagataggcagatacctatgcgttcaaagtagcgcatcaaattttggccccattattttcactgcagtatcatgatgtgatgttgatagtagagatagagcaagtatgatactccctccgtccaaaagtttgtcgttcttgctttttaaggagtcaaacatcttgaactttgaccatatttatataaaaatattattatttatagt

SEQ ID NO: 202823 - DNA, 3123 bp, Zea Mays
ccagtttcacaccacacgctccacggctggggatcacgctgtcacgctcacgcgcccctccccccgccgccaacgcccacgctgcgagcgcgaatccatcttctctacctcctcgtccattcctagggttcctcctctgccgaatcgcggggaactctgcgggcccaatttggtagggtaatctcctaccaggaggtcaaattccagtcaacgccgcttggttttgtagccgaccggtcgatttgaatccaggggcaccgattggctgggtgagagggcaggctcgatttgaacccgcctctgcccttttcgtggaagttttgggtcttattaggcgcggattactggggtctagggatgtggtagttactagctgcttgggttaggcggcgcgccgaggtgcttccgtgcttggctgactagtgtcaatggcgggatctgtcggcaaggccagggcggcgctgcggtcgtccccgaagcggtacagcggcacggacccaccgttgtctctggcggggccgacgttggcggatctgcagaggacggccgagctggagaagttcttggttgaagcgggcctctatgagggtaaagaggagtccgcgaagcgggaagatgtgctatccgagattggtctgatagtcaaggaatgggtgaagcagttgactcgtaagaaaggatatgctgagcaattggttgaacaagcaaatgcaatcctttttacttttgggtcttacagattgggggttcatggacctggagctgatattgataccctttgtgttggaccttcatatgtgaaccgagaggaggatttctttgtcacactgcatggcatattagctgagaaggaagaagttgctgagttgcaacctgtacctgatgctcatgtacctgtattgaaatttaagttccgtgggatatcaattgaccttctctatgctagcatctctctttcagtgataccagcggatttcgatatttctcaaggatctgtactttgtgatgttgacgaagcaactgtgcgaagtcttaatggttgcagagtggcggatcagattcttcggcttgttccaaatgttgagaatttccggacaacactcagatgcttgaagtactgggcaaagagaaggggtgtttattctaacattactggtttccttgggggtgtgaactgggctctgctggttgctcgtgtatgccaactctatcctaatgctgtgccaagtatgctggtttctaggttcttcagagtttttactcagtggcaatggccaaatccagtgatgctatgtgcgattgagaataatgatcttggtttttctatatgggatccacgcaaaaatccacgtgacagaaaccatctcatgcccatcatcactccagcctacccatgcatgaactctagttacaatgtttcaaccagcacactgagggttataatggagcaatttcaatttggcaacaaagtttgtcaggaaattgaacttaataaggccaattggaatgccttatttgagcctttccatttttttgaggcatacagaaagtttctagtggttgacatagttgcagaggatgacgatgatcttcgtctttggaagggatggatcgagtctcgtttgagacaacttactttaaagattgagcgggatactaaaggaattttgcagtgccatccgtacccatgcgagtattcagatcccacaatagagtgtgcacattgtgccttctacatgggcttatcaaggaaagaggggttgaaaaaacgtggtcaacagtttgatatccgtgggacagtagatgaatttatgcgtgaaattggcatgtattcattgtggaagcctgggatggatctggctgtcacccatgttcatagggagcaggtcccatcttatgtatttgagcaaggatacaagaaaccctgccctacaatgcatgcaaaccaacaagagcagtctgatggagatggaacatttagcccatatctggagagtcagcttaagagaaagtacatttccgatggagatggtcatgtggatctttgcaaatctgtaaaaagggcttcagtaagcccacctggtgtgggaaccccacctcatcttggaaatagtgtcagtaacgttgtttgtgacagtccagtcaaattcgtttcaagtgtcgtttgcagcggagcgcatgcttcctcatcacatgatgatataaatatagaacaagcacaattaactacttcaccatatggatctgaggatacctcagcatcaggtacaagctgtgcagcagtgggagcagttattttggctgatgaatccagcaagctcggtaacttgacatcagatcttgaagttgatacaattcagacaatgccactgcacacatctttagaatgcgtcgctcaaaagggtgaaacaaagcttgaggaaatcagaaggttggcgagcaacaattgtgctgagtttctagagagctaagttcttgctgacaaggtacacttagacttaggtgggcatgaagtgaattgaaacatcattccagacaaggggtgaagtttgcatagcatcgataggccggaaatcggatttgaggacccaatgatatgccgctgcatggaaagtttcatcatttcatgcctgtggtcggtttgctcgtgaagattgcttttgttcgctgtggaagcgggtgcaagtattacacagcagcaatatcgggactgttgtgaaggatgaagttgagagtcaacatctgagaaccatggagctcaccatacgccacaaaggaactaagctgctggtttaggcatggttaagagagtcagtgctggtcctttaggttaaataaaaactttgcggggctgcacggtgtgcagaaaaggttgagtctagggcactaggctgatggtctatgtatgtgatgtacgcagataggcagatacctatgcgttcaaagtagcgcatcaaattttggccccattattttcactgcagtatcatgatgtgatgttgatagtagagatagagcaagtatgatactccctccgtccaaaagtttgtcgttcttgctttttaaggagtcaaacatcttgaactttgaccatatttatataaaaatattattatttatagt

SEQ ID NO: 202824 - DNA, 3132 bp, Zea Mays
ccagtttcacaccacacgctccacggctggggatcacgctgtcacgctcacgcgcccctccccccgccgccaacgcccacgctgcgagcgcgaatccatcttctctacctcctcgtccattcctagggttcctcctctgccgaatcgcggggaactctgcgggcccaatttggtagggtaatctcctaccaggaggtcaaattccagtcaacgccgcttggttttgtagccgaccggtcgatttgaatccaggggcaccgattggctgggtgagagggcaggctcgatttgaacccgcctctgcccttttcgtggaagttttgggtcttattaggcgcggattactggggtctagggatgtggtagttactagctgcttgggttaggcggcgcgccgaggtgcttccgtgcttggctgactagtgtcaatggcgggatctgtcggcaaggccagggcggcgctgcggtcgtccccgaagcggtacagcggcacggacccaccgttgtctctggcggggccgacgttggcggatctgcagaggacggccgagctggagaagttcttggttgaagcgggcctctatgagggtaaagaggagtccgcgaagcgggaagatgtgctatccgagattggtctgatagtcaaggaatgggtgaagcagttgactcgtaagaaaggatatgctgagcaattggttgaacaagcaaatgcaatcctttttacttttgggtcttacagattgggggttcatggacctggagctgatattgataccctttgtgttggaccttcatatgtgaaccgagaggaggatttctttgtcacactgcatggcatattagctgagaaggaagaagttgctgagttgcaacctgtacctgatgctcatgtacctgtattgaaatttaagttccgtgggatatcaattgaccttctctatgctagcatctctctttcagtgataccagcggatttcgatatttctcaaggatctgtactttgtgatgttgacgaagcaactgtgcgaagtcttaatggttgcagagtggcggatcagattcttcggcttgttccaaatgttgagaatttccggacaacactcagatgcttgaagtactgggcaaagagaaggggtgtttattctaacattactggtttccttgggggtgtgaactgggctctgctggttgctcgtgtatgccaactctatcctaatgctgtgccaagtatgctggtttctaggttcttcagagtttttactcagtggcaatggccaaatccagtgatgctatgtgcgattgagaataatgatcttggtttttctatatgggatccacgcaaaaatccacgtgacagaaaccatctcatgcccatcatcactccagcctacccatgcatgaactctagttacaatgtttcaaccagcacactgagggttataatggagcaatttcaatttggcaacaaagtttgtcaggaaattgaacttaataaggccaattggaatgccttatttgagcctttccatttttttgaggcatacagaaagtttctagtggttgacatagttgcagaggatgacgatgatcttcgtctttggaagggatggatcgagtctcgtttgagacaacttactttaaagattgagcgggatactaaaggaattttgcagtgccatccgtacccatgcgagtattcagatcccacaatagagtgtgcacattgtgccttctacatgggcttatcaaggaaagaggggttgaaaaaacgtggtcaacagtttgatatccgtgggacagtagatgaatttatgcgtgaaattggcatgtattcattgtggaagcctgggatggatctggctgtcacccatgttcatagggagcaggtcccatcttatgtatttgagcaaggatacaagaaaccctgccctacaatgcatgcaaaccaacaagagcagtctgatggagatggaacatttagcccatatctggagagtcagcttaagagaaagtacatttccgatggagatggtcatgtggatctttgcaaatctgtaaaaagggcttcagtaagcccacctggtgtgggaaccccacctcatcttggaaatagtgtcagtaacgttgtttgtgacagtccagtcaaattcgtttcaagtgtcgtttgcagcggagcgcatgcttcctcatcacatgatgatataaatatagaacaagcacaattaactacttcaccatatggatctgaggatacctcagcatcaggtacaagctgtgcagcagtgggagcagttattttggctgatgaatccagcaagctcggtaacttgacatcagatcttgaagttgatacaattcagacaatgccactgcacacatctttagaatgcgtcgctcaaaagggtgaaacaaagcttgaggaaatcagaaggttggcgagcaacaattgtgctgagtttctagagagctaagttcttgctgacaaggtacacttagacttaggtgggcatgaagtgaattgaaacatcattccagacaaggtgatgcaggggtgaagtttgcatagcatcgataggccggaaatcggatttgaggacccaatgatatgccgctgcatggaaagtttcatcatttcatgcctgtggtcggtttgctcgtgaagattgcttttgttcgctgtggaagcgggtgcaagtattacacagcagcaatatcgggactgttgtgaaggatgaagttgagagtcaacatctgagaaccatggagctcaccatacgccacaaaggaactaagctgctggtttaggcatggttaagagagtcagtgctggtcctttaggttaaataaaaactttgcggggctgcacggtgtgcagaaaaggttgagtctagggcactaggctgatggtctatgtatgtgatgtacgcagataggcagatacctatgcgttcaaagtagcgcatcaaattttggccccattattttcactgcagtatcatgatgtgatgttgatagtagagatagagcaagtatgatactccctccgtccaaaagtttgtcgttcttgctttttaaggagtcaaacatcttgaactttgaccatatttatataaaaatattattatttatagt

SEQ ID NO: 202825 - DNA, 3064 bp, Zea Mays
cacgctccacggctggggatcacgctgtcacgctcacgcgcccctccccccgccgccaacgcccacgctgcgagcgcgaatccatcttctctacctcctcgtccattcctagggttcctcctctgccgaatcgcggggaactctgcgggcccaatttggtagggtaatctcctaccaggaggtcaaattccagtcaacgccgcttggttttgtagccgaccggtcgatttgaatccaggggcaccgattggctgggtgagagggcaggctcgatttgaacccgcctctgcccttttcgtggaagttttgggtcttattaggcgcggattactggggtctagggatgtggtagttactagctgcttgggttaggcggcgcgccgaggtgcttccgtgcttggctgactagtgtcaatggcgggatctgtcggcaaggccagggcggcgctgcggtcgtccccgaagcggtacagcggcacggacccaccgttgtctctggcggggccgacgttggcggatctgcagaggacggccgagctggagaagttcttggttgaagcgggcctctatgagggtaaagaggagtccgcgaagcgggaagatgtgctatccgagattggtctgatagtcaaggaatgggtgaagcagttgactcgtaagaaaggatatgctgagcaattggttgaacaagcaaatgcaatcctttttacttttgggtcttacagattgggggttcatggacctggagctgatattgataccctttgtgttggaccttcatatgtgaaccgagaggaggatttctttgtcacactgcatggcatattagctgagaaggaagaagttgctgagttgcaacctgtacctgatgctcatgtacctgtattgaaatttaagttccgtgggatatcaattgaccttctctatgctagcatctctctttcagtgataccagcggatttcgatatttctcaaggatctgtactttgtgatgttgacgaagcaactgtgcgaagtcttaatggttgcagagtggcggatcagattcttcggcttgttccaaatgttgagaatttccggacaacactcagatgcttgaagtactgggcaaagagaaggggtgtttattctaacattactggtttccttgggggtgtgaactgggctctgctggttgctcgtgtatgccaactctatcctaatgctgtgccaagtatgctggtttctaggttcttcagagtttttactcagtggcaatggccaaatccagtgatgctatgtgcgattgagaataatgatcttggtttttctatatgggatccacgcaaaaatccacgtgacagaaaccatctcatgcccatcatcactccagcctacccatgcatgaactctagttacaatgtttcaaccagcacactgagggttataatggagcaatttcaatttggcaacaaagtttgtcaggaaattgaacttaataaggccaattggaatgccttatttgagcctttccatttttttgaggcatacagaaagtttctagtggttgacatagttgcagaggatgacgatgatcttcgtctttggaagggatggatcgagtctcgtttgagacaacttactttaaagattgagcgggatactaaaggaattttgcagtgccatccgtacccatgcgagtattcagatcccacaatagagtgtgcacattgtgccttctacatgggcttatcaaggaaagaggggttgaaaaaacgtggtcaacagtttgatatccgtgggacagtagatgaatttatgcgtgaaattggcatgtattcattgtggaagcctgggatggatctggctgtcacccatgttcatagggagcaggtcccatcttatgtatttgagcaaggatacaagaaaccctgccctacaatgcatgcaaaccaacaagagcagtctgatggagatggaacatttagcccatatctggagagtcagcttaagagaaagtacatttccgatggagatggtcatgtggatctttgcaaatctgtaaaaagggcttcagtaagcccacctggtgtgggaaccccacctcatcttggaaatagtgtcagtaacgttgtttgtgacagtccagtcaaattcgtttcaagtgtcgtttgcagcggagcgcatgcttcctcatcacatgatgatataaatatagaacaagcacaattaactacttcaccatatggatctgaggatacctcagcatcaggtacaagctgtgcagcagtgggagcagttattttggctgatgaatccagcaagctcggtaacttgacatcagatcttgaagttgatacaattcagacaatgccactgcacacatctttagaatgcgtcgctcaaaagggtgaaacaaagcttgaggaaatcagaaggttggcgagcaacaattgtgctgagtttctagagagctaagttcttgctgacaaggtgatgcaggggtgaagtttgcatagcatcgataggccggaaatcggatttgaggacccaatgatatgccgctgcatggaaagtttcatcatttcatgcctgtggtcggtttgctcgtgaagattgcttttgttcgctgtggaagcgggtgcaagtattacacagcagcaatatcgggactgttgtgaaggatgaagttgagagtcaacatctgagaaccatggagctcaccatacgccacaaaggaactaagctgctggtttaggcatggttaagagagtcagtgctggtcctttaggttaaataaaaactttgcggggctgcacggtgtgcagaaaaggttgagtctagggcactaggctgatggtctatgtatgtgatgtacgcagataggcagatacctatgcgttcaaagtagcgcatcaaattttggccccattattttcactgcagtatcatgatgtgatgttgatagtagagatagagcaagtatgatactccctccgtccaaaagtttgtcgttcttgctttttaaggagtcaaacatcttgaactttgaccatatttatataaaaatattattatttatagt

SEQ ID NO: 202826 - DNA, 3424 bp, Zea Mays
gctggggatcacgctgtcacgctcacgcgcccctccccccgccgccaacgcccacgctgcgagcgcgaatccatcttctctacctcctcgtccattcctagggttcctcctctgccgaatcgcggggaactctgcgggcccaatttggtagggtaatctcctaccaggaggtcaaattccagtcaacgccgcttggttttgtagccgaccggtcgatttgaatccaggggcaccgattggctgggtgagagggcaggctcgatttgaacccgcctctgcccttttcgtggaagttttgggtcttattaggcgcggattactggggtctagggatgtggtagttactagctgcttgggttaggcggcgcgccgaggtgcttccgtgcttggctgactagtgtcaatggcgggatctgtcggcaaggccagggcggcgctgcggtcgtccccgaagcggtacagcggcacggacccaccgttgtctctggcggggccgacgttggcggatctgcagaggacggccgagctggagaagttcttggttgaagcgggcctctatgagggtaaagaggagtccgcgaagcgggaagatgtgctatccgagattggtctgatagtcaaggaatgggtgaagcagttgactcgtaagaaaggatatgctgagcaattggttgaacaagcaaatgcaatcctttttacttttgggtcttacagattgggggtatcggcttctttggttcttttatcatataacaacttttcttgacattcagatattgaaatagcacaactcattgtatctatagtcttattaacagcattcaagttccacttgctgaatataacctagatttgttagttttcttcagggttcagaacctcgacttagttttatgttctgcataagcagaagggcttgcaacttaagaactagttcatggacctggagctgatattgataccctttgtgttggaccttcatatgtgaaccgagaggaggatttctttgtcacactgcatggcatattagctgagaaggaagaagttgctgagttgcaacctgtacctgatgctcatgtacctgtattgaaatttaagttccgtgggatatcaattgaccttctctatgctagcatctctctttcagtgataccagcggatttcgatatttctcaaggatctgtactttgtgatgttgacgaagcaactgtgcgaagtcttaatggttgcagagtggcggatcagattcttcggcttgttccaaatgttgagaatttccggacaacactcagatgcttgaagtactgggcaaagagaaggggtgtttattctaacattactggtttccttgggggtgtgaactgggctctgctggttgctcgtgtatgccaactctatcctaatgctgtgccaagtatgctggtttctaggttcttcagagtttttactcagtggcaatggccaaatccagtgatgctatgtgcgattgagaataatgatcttggtttttctatatgggatccacgcaaaaatccacgtgacagaaaccatctcatgcccatcatcactccagcctacccatgcatgaactctagttacaatgtttcaaccagcacactgagggttataatggagcaatttcaatttggcaacaaagtttgtcaggtacttcctgaaaatttacagctgatagctaatgttcttggtatggtctcactgcgtatcttttatgcaggaaattgaacttaataaggccaattggaatgccttatttgagcctttccatttttttgaggcatacagaaagtttctagtggttgacatagttgcagaggatgacgatgatcttcgtctttggaagggatggatcgagtctcgtttgagacaacttactttaaagattgagcgggatactaaaggaattttgcagtgccatccgtacccatgcgagtattcagatcccacaatagagtgtgcacattgtgccttctacatgggcttatcaaggaaagaggggttgaaaaaacgtggtcaacagtttgatatccgtgggacagtagatgaatttatgcgtgaaattggcatgtattcattgtggaagcctgggatggatctggctgtcacccatgttcatagggagcaggtcccatcttatgtatttgagcaaggatacaagaaaccctgccctacaatgcatgcaaaccaacaagagcagtctgatggagatggaacatttagcccatatctggagagtcagcttaagagaaagtacatttccgatggagatggtcatgtggatctttgcaaatctgtaaaaagggcttcagtaagcccacctggtgtgggaaccccacctcatcttggaaatagtgtcagtaacgttgtttgtgacagtccagtcaaattcgtttcaagtgtcgtttgcagcggagcgcatgcttcctcatcacatgatgatataaatatagaacaagcacaattaactacttcaccatatggatctgaggatacctcagcatcaggtacaagctgtgcagcagtgggagcagttattttggctgatgaatccagcaagctcggtaacttgacatcagatcttgaagttgatacaattcagacaatgccactgcacacatctttagaatgcgtcgctcaaaagggtgaaacaaagcttgaggaaatcagaaggttggcgagcaacaattgtgctgagtttctagagagctaagttcttgctgacaaggtacacttagacttaggtgggcatgaagtgaattgaaacatcattccagacaagtcaatgaaacatgtggttcgaagcggtttcgaaaggtgatgcaggggtgaagtttgcatagcatcgataggccggaaatcggatttgaggacccaatgatatgccgctgcatggaaagtttcatcatttcatgcctgtggtcggtttgctcgtgaagattgcttttgttcgctgtggaagcgggtgcaagtattacacagcagcaatatcgggactgttgtgaaggatgaagttgagagtcaacatctgagaaccatggagctcaccatacgccacaaaggaactaagctgctggtttaggcatggttaagagagtcagtgctggtcctttaggttaaataaaaactttgcggggctgcacggtgtgcagaaaaggttgagtctagggcactaggctgatggtctatgtatgtgatgtacgcagataggcagatacctatgcgttcaaagtagcgcatcaaattttggccccattattttcactgcagtatcatgatgtgatgttgatagtagagatagagcaagtatgatactccctccgtccaaaagtttgtcgttcttgctttttaaggagtcaaacatcttgaactttgaccatatttatataaaaatattattatttatagt

SEQ ID NO: 202827 - DNA, 3152 bp, Zea Mays
gctggggatcacgctgtcacgctcacgcgcccctccccccgccgccaacgcccacgctgcgagcgcgaatccatcttctctacctcctcgtccattcctagggttcctcctctgccgaatcgcggggaactctgcgggcccaatttggtagggtaatctcctaccaggaggtcaaattccagtcaacgccgcttggttttgtagccgaccggtcgatttgaatccaggggcaccgattggctgggtgagagggcaggctcgatttgaacccgcctctgcccttttcgtggaagttttgggtcttattaggcgcggattactggggtctagggatgtggtagttactagctgcttgggttaggcggcgcgccgaggtgcttccgtgcttggctgactagtgtcaatggcgggatctgtcggcaaggccagggcggcgctgcggtcgtccccgaagcggtacagcggcacggacccaccgttgtctctggcggggccgacgttggcggatctgcagaggacggccgagctggagaagttcttggttgaagcgggcctctatgagggtaaagaggagtccgcgaagcgggaagatgtgctatccgagattggtctgatagtcaaggaatgggtgaagcagttgactcgtaagaaaggatatgctgagcaattggttgaacaagcaaatgcaatcctttttacttttgggtcttacagattggggggttcagaacctcgacttagttttatgttctgcataagcagaagggcttgcaacttaagaactagttcatggacctggagctgatattgataccctttgtgttggaccttcatatgtgaaccgagaggaggatttctttgtcacactgcatggcatattagctgagaaggaagaagttgctgagttgcaacctgtacctgatgctcatgtacctgtattgaaatttaagttccgtgggatatcaattgaccttctctatgctagcatctctctttcagtgataccagcggatttcgatatttctcaaggatctgtactttgtgatgttgacgaagcaactgtgcgaagtcttaatggttgcagagtggcggatcagattcttcggcttgttccaaatgttgagaatttccggacaacactcagatgcttgaagtactgggcaaagagaaggggtgtttattctaacattactggtttccttgggggtgtgaactgggctctgctggttgctcgtgtatgccaactctatcctaatgctgtgccaagtatgctggtttctaggttcttcagagtttttactcagtggcaatggccaaatccagtgatgctatgtgcgattgagaataatgatcttggtttttctatatgggatccacgcaaaaatccacgtgacagaaaccatctcatgcccatcatcactccagcctacccatgcatgaactctagttacaatgtttcaaccagcacactgagggttataatggagcaatttcaatttggcaacaaagtttgtcaggaaattgaacttaataaggccaattggaatgccttatttgagcctttccatttttttgaggcatacagaaagtttctagtggttgacatagttgcagaggatgacgatgatcttcgtctttggaagggatggatcgagtctcgtttgagacaacttactttaaagattgagcgggatactaaaggaattttgcagtgccatccgtacccatgcgagtattcagatcccacaatagagtgtgcacattgtgccttctacatgggcttatcaaggaaagaggggttgaaaaaacgtggtcaacagtttgatatccgtgggacagtagatgaatttatgcgtgaaattggcatgtattcattgtggaagcctgggatggatctggctgtcacccatgttcatagggagcaggtcccatcttatgtatttgagcaaggatacaagaaaccctgccctacaatgcatgcaaaccaacaagagcagtctgatggagatggaacatttagcccatatctggagagtcagcttaagagaaagtacatttccgatggagatggtcatgtggatctttgcaaatctgtaaaaagggcttcagtaagcccacctggtgtgggaaccccacctcatcttggaaatagtgtcagtaacgttgtttgtgacagtccagtcaaattcgtttcaagtgtcgtttgcagcggagcgcatgcttcctcatcacatgatgatataaatatagaacaagcacaattaactacttcaccatatggatctgaggatacctcagcatcaggtacaagctgtgcagcagtgggagcagttattttggctgatgaatccagcaagctcggtaacttgacatcagatcttgaagttgatacaattcagacaatgccactgcacacatctttagaatgcgtcgctcaaaagggtgaaacaaagcttgaggaaatcagaaggttggcgagcaacaattgtgctgagtttctagagagctaagttcttgctgacaagtcaatgaaacatgtggttcgaagcggtttcgaaaggtgatgcaggggtgaagtttgcatagcatcgataggccggaaatcggatttgaggacccaatgatatgccgctgcatggaaagtttcatcatttcatgcctgtggtcggtttgctcgtgaagattgcttttgttcgctgtggaagcgggtgcaagtattacacagcagcaatatcgggactgttgtgaaggatgaagttgagagtcaacatctgagaaccatggagctcaccatacgccacaaaggaactaagctgctggtttaggcatggttaagagagtcagtgctggtcctttaggttaaataaaaactttgcggggctgcacggtgtgcagaaaaggttgagtctagggcactaggctgatggtctatgtatgtgatgtacgcagataggcagatacctatgcgttcaaagtagcgcatcaaattttggccccattattttcactgcagtatcatgatgtgatgttgatagtagagatagagcaagtatgatactccctccgtccaaaagtttgtcgttcttgctttttaaggagtcaaacatcttgaactttgaccatatttatataaaaatattattatttatagt

SEQ ID NO: 202828 - DNA, 2680 bp, Zea Mays
gcctagtcgccgccaaggtgtccagtcagccgagactggatgccatggctgttcgcctcgcccagaggaagttaggcaggtgcctgggtgggtccggattcaccgtgctgcctaggcgtccgctcagggacgccgtgacttcgccgcgccgccccagcccatttggcccacctcttatctctaattctccttcccctcaaacagcgcctccagcccttcactcaccctccagctgcctcccctcctctcctacccgccagcatccgccagcccctcctctccaactgccagccgccaccagcagatttcgatatttctcaaggatctgtactttgtgatgttgacgaagcaactgtgcgaagtcttaatggttgcagagtggcggatcagattcttcggcttgttccaaatgttgagaatttccggacaacactcagatgcttgaagtactgggcaaagagaaggggtgtttattctaacattactggtttccttgggggtgtgaactgggctctgctggttgctcgtgtatgccaactctatcctaatgctgtgccaagtatgctggtttctaggttcttcagagtttttactcagtggcaatggccaaatccagtgatgctatgtgcgattgagaataatgatcttggtttttctatatgggatccacgcaaaaatccacgtgacagaaaccatctcatgcccatcatcactccagcctacccatgcatgaactctagttacaatgtttcaaccagcacactgagggttataatggagcaatttcaatttggcaacaaagtttgtcaggtacttcctgaaaatttacagctgatagctaatgttcttggtatggtctcactgcgtatcttttatgcaggaaattgaacttaataaggccaattggaatgccttatttgagcctttccatttttttgaggcatacagaaagtttctagtggttgacatagttgcagaggatgacgatgatcttcgtctttggaagggatggatcgagtctcgtttgagacaacttactttaaagattgagcgggatactaaaggaattttgcagtgccatccgtacccatgcgagtattcagatcccacaatagagtgtgcacattgtgccttctacatgggcttatcaaggaaagaggggttgaaaaaacgtggtcaacagtttgatatccgtgggacagtagatgaatttatgcgtgaaattggcatgtattcattgtggaagcctgggatggatctggctgtcacccatgttcatagggagcaggtcccatcttatgtatttgagcaaggatacaagaaaccctgccctacaatgcatgcaaaccaacaagagcagtctgatggagatggaacatttagcccatatctggagagtcagcttaagagaaagtacatttccgatggagatggtcatgtggatctttgcaaatctgtaaaaagggcttcagtaagcccacctggtgtgggaaccccacctcatcttggaaatagtgtcagtaacgttgtttgtgacagtccagtcaaattcgtttcaagtgtcgtttgcagcggagcgcatgcttcctcatcacatgatgatataaatatagaacaagcacaattaactacttcaccatatggatctgaggatacctcagcatcaggtacaagctgtgcagcagtgggagcagttattttggctgatgaatccagcaagctcggtaacttgacatcagatcttgaagttgatacaattcagacaatgccactgcacacatctttagaatgcgtcgctcaaaagggtgaaacaaagcttgaggaaatcagaaggttggcgagcaacaattgtgctgagtttctagagagctaagttcttgctgacaaggtacacttagacttaggtgggcatgaagtgaattgaaacatcattccagacaaggtttttcttcctatacttcttgtcaaattaagattgtagtttgatatgatctgaactctatgcctgcctttctattcttttcattgattaactgtttggatccattaaaagtcaatgaaacatgtggttcgaagcggtttcgaaaggtgatgcaggggtgaagtttgcatagcatcgataggccggaaatcggatttgaggacccaatgatatgccgctgcatggaaagtttcatcatttcatgcctgtggtcggtttgctcgtgaagattgcttttgttcgctgtggaagcgggtgcaagtattacacagcagcaatatcgggactgttgtgaaggatgaagttgagagtcaacatctgagaaccatggagctcaccatacgccacaaaggaactaagctgctggtttaggcatggttaagagagtcagtgctggtcctttaggttaaataaaaactttgcggggctgcacggtgtgcagaaaaggttgagtctagggcactaggctgatggtctatgtatgtgatgtacgcagataggcagatacctatgcgttcaaagtagcgcatcaaattttggccccattattttcactgcagtatcatgatgtgatgttgatagtagagatagagcaagtatgatactccctccgtccaaaagtttgtcgttcttgctttttaaggagtcaaacatcttgaactttgaccatatttatataaaaatattattatttatagt

SEQ ID NO: 202829 - DNA, 3341 bp, Zea Mays
cacggagccaagtggagagagggcatggtacttgagagttatgagcgagcgtataataacatggtgcgtgttcaacaactttcagaactggaagaggtgattgattactgcactcttcccatggaaagcccgattgctgacggacggagggaacttattcgcaatatgtggaatgaacggattaaaggaacaaaacggaatgtcgaggtgtggcaagccctacttgctgtcagggagttggttcttccccctaacgaagacagagacacctggataaagttcgctgaactttgctggaagaacggtcgtattagtcaggctagatctacgttagtcaaacttttacagtttgatcctgaatcttcccctgaattgacactgtatcatgcacatccacaagtagctctggcttatctaaaataccagtatgcagttggtgatgagcttaaaaggagggatgcattttctaaactgcaagagttgtctgtgcaggttgctaccaccatgggcaatttacctggaacatcagcaaaccatggcaccatgtcaaatgctggagtaccactcattgctcgtgtctacttgacacttggtagctggaagaaggcactatcacctgcattagatgacgattccattcaagaaattttgatttcttaccataatgccacgctaagtgcaaaggactgggggaaggcctggcacatatgggctttgttcaacacagaagtcatgtcacgctatactttccgaggccgaccagatattgctggaaaatatgttgttgcagcagtaactgggtatttttattctattgcttgtgcatctactacgaaaggggtcgatgatagcttgcaggatatccttcgtctgttaactctttggttcaaccatggggatacctcagaagttcaaacagcgttgcagaaaggtttttcccttgtcaagattgagatgtggctggttgtgctgccccagataattgctaggattcattcgaacaatagagtagttagagaactgatacaatctttgctagttcgaattggaaaggggcatccacaggctttgatgtatcctctcttggttgcctgcaaatcaataagtatattgagacaacgtgcagcgcaggaggtcgttgataagatccgccagcacagtggaggtcttgttgaccaggcacaacttgtgtcgaaggaactgatacgggtagcaattttgtggcatgaaatgtggcatgaggcactcgaggaagctagcaggatgtattttggtgagcacaatatcgaaggaatgcttgctgtacttgagccattgcatgcaatgcttgagaggggggatgagacaattaaagaaaatgccttcattcaggcttatgggcatgaattactggaagctcatgaatgctgtttgaaatatcgggctacaggagaggatgctgagctaactaaggcctgggatttgtattaccatgttttcagaagaatcgacaaacagcttccaagtcttacgaccctcgatctgcactctgtttcgcctgagctactcaaatgtcgaaagttggaacttgctgtgccaggaacttatgctgcagattcaccacttgtgacgattgagtattttgttccccaattgatttgttataacgtccaaacaaaggccaagaaagctgacaattcatggaagtgatggcaatgattatgcattcttgcttaaaggccacgaagatttgcggcaagatgaacgagtaatgcagctttttggtttggtgaatactctcctagagaactcaaggaaaacatcagagaaggatttatcaatccaaagatatgctgttatacctttgtcacctaacagtggtttaattggatgggttccaaactgtgacacacttcatgctctgatccgtgaatacagagatgccaggaagattttcttgaatcaggagcacagacttatgttggcttttgcacccgattatgatcacttacccctcattgcaaaggtggaagtgtttcagcatgctttgcaaaatactgagggaaatgaccttgcgaaggttctgtggctgaagagtcgaacttcggaagtatggcttgagcgccgcacaaactacgctagaagcctggctgttatgagcatggttgggtatttgcttggtttaggagatcggcatccaagcaaccttatgttagatcgctatagtggaaaaatattacacatcgacttcggagattgctttgaggcttcaatgaatcgagaaaagttccctgaaaaagtaccattccgtttgactcgaatgcttgtgaaagctatggaagttagcggtattgagggtacattccgaacaacttgtgaaaatgtgatgcaagtccttcgcacaaacagagacagcgttatggccatgatggaggcatttgtacatgacccgttaatcaattggcgtctgttcaatttcaatgaggttcctcaagtgtcgaactatggtaatgttcatgctcacacggttgtcagtagtgaagaagcagtggctaaccgagagctcatgcaacctcagcgaggagcacgtgagagggaactgctacaggctgtcaatcaactcggtgatgccaatgaggttttgaatgagcgtgctgtagctgtgatggcacggatgagtgacaaactaacagggcgtgacttctcttctgggtcagctttggctggagcaggtagctctatccaacatggcagtgagcatttggcttcaggagatgcccgggatgcccaacctggtctctcagtgaaggttcaggttcagaagctcatactccaagcgacttcacacgaaaatttgtgccaaaactatgtcgggtggtgtccgttctggtgagctctcttggaaacagtagcagtttataacatgtaaatattgtgaataccgtgtgcatagaagtttcgtggtgacagtttgtatgtgcagctttgtaattagcagaacttcaagatgccttggaccatccttttgtcagtttcttagaccgtgtttagcagttcacccttatggccatccaaaacactgtttttgtactgtagattgtattgtttgtagattgtactgttcgcagggtggatttttgaatatgagtataagaatgtgtaagctgttgaagatagccttaggttttcttccgtgccacttgagggtttgttcgattagctctcaatttatgtggattgagtgagatcggattggtttaaatctcaagcaagttaaattttcttcttaatttttctaatctcatcaaatccatgtgtaacgggaataaccgaacaaggtctgactgaaaatgttaagaggg

SEQ ID NO: 202830 - DNA, 4772 bp, Zea Mays
atgacctatctacctcttctagaaaaccctccaagcgcggccaaaaacattcaaagtgaaatcgcctcctcccttgggagaactcatgcaaacccagcagaagggggcaatggtctgaaatcgtggaccaacaatgatgatctgcggaaagatgctgcagaagcgctctgctgcctcgcacatgcccttggagaagactttactatcttcataccatcaatacgcaaaattcttgtgaagcaccacttgcggtacagaaaatgggatgagattgaaaatcggctactgaggcgagagctactcatcactgaaaacttgtctgtgcaaaagtacacacaatgtccacctgatgtcattagagacccccttgatgattgtgatggtacaccttctgagatagctgatgatacacagcgacaagcaagaagtcatcaagtcaatgatgtccggttgcggagtgccggtgaggcttctcaaaggagtactagggaagactgggctgaatggatgagacatttcagtattgcgcttctcaaagagtcaccatctccagctttacgcacctgtgcaaggctagctcagcttcagccttctgttggccgcgagttgtttgctgcaggttttgcaagttgctgggcccaaatgagtgaatcctcccaggaacagctagtgagaagtctcaagacagccttctcatctcagacattcctcctgaaattcttgccacgctgctgaacttagcagaatttatggaacatgatgagaagccacttcctattgatacaagactgcttggtgcacttgctgagaagtgtcgagcatttgcaaaggcactccattataaagaaatggaatttgaagctgtgtgcaccaagaagatgggtgcaaatcctgttacagtggttgaatcccttattcatattaacaatcaactacagcagcatgaggcagctattggcatattgacttactcacagcaaaattcggaagttcaattgaaagaatcatggtatgaaaagttgcaccgttgggatgaggctcttaaagcatacaccgtgaaatcatctcaaacatctggtccctttacaaaacttggatgctacattaggtcgaatgaggtgtctagcagctttggctcggtgggaagatttaagtgcattgtgtagagagcaatggacgggtgcagaaccatctgctcgactggaaatggctccaatggctgcaaatgctgcttggcatatgggtgagtgggaccatatggcagactatgtttctcgcctggatgatgcagatgaaaataagctccgtatgttgggtaacgcaacagctagtggtgacggaagcagtaatggtgctttcttccgggcagttcttttagttcgttacaaaaagtatgatgacgctcggatgtatgttgagcgagctcggcggtgtttagctacagaacttgcagcactggtacttgagagttatgagcgagcgtataataacatggtgcgtgttcaacaactttcagaactggaagaggtgattgattactgcactcttcccatggaaagcccgattgctgacggacggagggaacttattcgcaatatgtggaatgaacggattaaaggaacaaaacggaatgtcgaggtgtggcaagccctacttgctgtcagggagttggttcttccccctaacgaagacagagacacctggataaagttcgctgaactttgctggaagaacggtcgtattagtcaggctagatctacgttagtcaaacttttacagtttgatcctgaatcttcccctgaattgacactgtatcatgcacatccacaagtagctctggcttatctaaaataccagtatgcagttggtgatgagcttaaaaggagggatgcattttctaaactgcaagagttgtctgtgcaggttgctaccaccatgggcaatttacctggaacatcagcaaaccatggcaccatgtcaaatgctggagtaccactcattgctcgtgtctacttgacacttggtagctggaagaaggcactatcacctgcattagatgacgattccattcaagaaattttgatttcttaccataatgccacgctaagtgcaaaggactgggggaaggcctggcacatatgggctttgttcaacacagaagtcatgtcacgctatactttccgaggccgaccagatattgctggaaaatatgttgttgcagcagtaactgggtatttttattctattgcttgtgcatctactacgaaaggggtcgatgatagcttgcaggatatccttcgtctgttaactctttggttcaaccatggggatacctcagaagttcaaacagcgttgcagaaaggtttttcccttgtcaagattgagatgtggctggttgtgctgccccagataattgctaggattcattcgaacaatagagtagttagagaactgatacaatctttgctagttcgaattggaaaggggcatccacaggctttgatgtatcctctcttggttgcctgcaaatcaataagtatattgagacaacgtgcagcgcaggaggtcgttgataagatccgccagcacagtggaggtcttgttgaccaggcacaacttgtgtcgaaggaactgatacgggtagcaattttgtggcatgaaatgtggcatgaggcactcgaggaagctagcaggatgtattttggtgagcacaatatcgaaggaatgcttgctgtacttgagccattgcatgcaatgcttgagaggggggatgagacaattaaagaaaatgccttcattcaggcttatgggcatgaattactggaagctcatgaatgctgtttgaaatatcgggctacaggagaggatgctgagctaactaaggcctgggatttgtattaccatgttttcagaagaatcgacaaacagcttccaagtcttacgaccctcgatctgcactctgtttcgcctgagctactcaaatgtcgaaagttggaacttgctgtgccaggaacttatgctgcagattcaccacttgtgacgattgagtattttgttccccaattgatttgttataacgtccaaacaaaggccaagaaagctgacaattcatggaagtgatggcaatgattatgcattcttgcttaaaggccacgaagatttgcggcaagatgaacgagtaatgcagctttttggtttggtgaatactctcctagagaactcaaggaaaacatcagagaaggatttatcaatccaaagatatgctgttatacctttgtcacctaacagtggtttaattggatgggttccaaactgtgacacacttcatgctctgatccgtgaatacagagatgccaggaagattttcttgaatcaggagcacagacttatgttggcttttgcacccgattatgatcacttacccctcattgcaaaggtggaagtgtttcagcatgctttgcaaaatactgagggaaatgaccttgcgaaggttctgtggctgaagagtcgaacttcggaagtatggcttgagcgccgcacaaactacgctagaagcctggctgttatgagcatggttgggtatttgcttggtttaggagatcggcatccaagcaaccttatgttagatcgctatagtggaaaaatattacacatcgacttcggagattgctttgaggcttcaatgaatcgagaaaagttccctgaaaaagtaccattccgtttgactcgaatgcttgtgaaagctatggaagttagcggtattgagggtacattccgaacaacttgtgaaaatgtgatgcaagtccttcgcacaaacagagacagcgttatggccatgatggaggcatttgtacatgacccgttaatcaattggcgtctgttcaatttcaatgaggttcctcaagtgtcgaactatggtaatgttcatgctcacacggttgtcagtagtgaagaagcagtggctaaccgagagctcatgcaacctcagcgaggagcacgtgagagggaactgctacaggctgtcaatcaactcggtgatgccaatgaggttttgaatgagcgtgctgtagctgtgatggcacggatgagtgacaaactaacagggcgtgacttctcttctgggtcagctttggctggagcaggtagctctatccaacatggcagtgagcatttggcttcaggagatgcccgggatgcccaacctggtctctcagtgaaggttcaggttcagaagctcatactccaagcgacttcacacgaaaatttgtgccaaaactatgtcgggtggtgtccgttctggtgagctctcttggaaacagtagcagtttataacatgtaaatattgtgaataccgtgtgcatagaagtttcgtggtgacagtttgtatgtgcagctttgtaattagcagaacttcaagatgccttggaccatccttttgtcagtttcttagaccgtgtttagcagttcacccttatggccatccaaaacactgtttttgtactgtagattgtattgtttgtagattgtactgttcgcagggtggatttttgaatatgagtataagaatgtgtaagctgttgaagatagccttaggttttcttccgtgccacttgagggtttgttcgattagctctcaatttatgtggattgagtgagatcggattggtttaaatctcaagcaagttaaattttcttcttaatttttctaatctcatcaaatccatgtgtaacgggaataaccgaacaaggtctgactgaaaatgttaagaggg

SEQ ID NO: 202831 - DNA, 6734 bp, Zea Mays
gggagtttatgatgtctcggtacagagaagtggctgatattgtcctcgattatttaaagcatcgagatcagcttgttcgacgtagtataacatcacttcttcctcgaattgcccacttcctgcgtgacagatttgtgactaattacctgaagatttgtatggatcatatcttgtttgttctacgtacaccagacgagcgcgctagtggttttgttgcccttggagagatggctggggctctgggtgttgaacttgtgccttatttaccagcaattacctcacatttgcaagatgcgattgctcctcgcagaggaaggccatctcttgaggcaatttcttgtgtaggaagctttgcaaaagctatgggtcctgcaatggaacctcatattcgtagcggacttctagatgctatgttttttgctggtctttctgataaacttatagatgcactcgagtctataagcacaagcatcccgtctttactacccacaatacaggagcgtttattggattgtatatctcaagcactaccaaagtcatcaataaggccaggtgcttctgttggtcgagcaagcaggtcaaacaatttgcaacagtttgtggactctaatagtcctgttcttgtgcaacttgcactgtggactctagcaaacttcaactttaagggccatgaacttctggaattcgctagagagagtgtcatactttatttggaagatgaagatagcagtaccagaaaagctgcctctttgtgctgttgcaaattagttgcacactccctttctgcttcttcagcttcacagttcggttcaaataggacaaatcgtattggaggagctaagcgccgccggcttgtagaggagatagtggagaaacttcttatggctgcagttgctgatgctgatgttggtgttagaagttcagtcttcaaggctttgtatcgaaatccagcttttgatgatttcttggcccaagctgacatcttgacttcaatttttgttgccttaaatgatgagtatggatagcaagtgtagagaggaaagtgctagattattgggttgtttaattaggagctgcgcgcggctcattcttccttacattgctccagttcacaaggcgctagtgactagattgtgtgaaggaacgggaccaaatgctaataatgctcttgctgcgggagtgcttgccactgttggagaactggccaaagtgggtggctttgctatgaggcaatatcttcctgagctgatgcctgtagttgtggattctcttttagatggaggtgctgttagtaaaagggaagtggcagtgtcaactctgggacagattatccagagcacaggctatgttattgccccctataatgagtacccgccattgcttggcttactcttgaagttgcttaatggtgaattggaatggtcaactagactagaagtgctgaaggttttagggattatgggtgcattggaccctcacgcacacaagcgaaatcagcacaatctacctggtcagcatagagaggtcctacggccaacaatcgagaccgcacaacatattgtttccatggaagagttaccgactgactactggccttctttttcagcatccgaggactactattcaacagttgcaattagctccctcatgcgaattcttcgagatccttctctttcaagttatcaccaaatggtggttggctcccttatctttatttttaagtcaatgggcctcggctgtgttccatacttaccaaaggttcttcctgatttattccgtgctgttcgcatgtgcgaggatggtgctttaaaagagttcataacctggaaacttggaacattgatatctattgtccggcagcacatccgaaaatatttacaagacatactttccctcatctctgagctgtggacttcctcattcagcttggctgcaccaaatcggaccatacagggcccacagggttcaccggttcttcaccttgtcgagcagctatgcttagctttaaatgatgagttcagaatgtatttacttcacattctaccgagttgtatccaagtcttaggtgacgctgaacgttgcaatgattattactatgttcctgacatattacacacacttgaagtttttggcggaaatttggatgagcacatgcacttggttgctccggtgcttgttcgtttatttaaagtggagctggttgatatcaggcggcgtgcaattgttactttgactaatcttatacctaaggttcaggttggtactcatgtttcggctttagtgcatcatctgaagcttgtcttggatggcaacaatgatgatctgcggaaagatgctgcagaagcgctctgctgcctcgcacatgcccttggagaagactttactatcttcataccatcaatacgcaaaattcttgtgaagcaccacttgcggtacagaaaatgggatgagattgaaaatcggctactgaggcgagagctactcatcactgaaaacttgtctgtgcaaaagtacacacaatgtccacctgatgtcattagagacccccttgatgattgtgatggtacaccttctgagatagctgatgatacacagcgacaagcaagaagtcatcaagtcaatgatgtccggttgcggagtgccggtgaggcttctcaaaggagtactagggaagactgggctgaatggatgagacatttcagtattgcgcttctcaaagagtcaccatctccagctttacgcacctgtgcaaggctagctcagcttcaggcagaatttatggaacatgatgagaagccacttcctattgatacaagactgcttggtgcacttgctgagaagtgtcgagcatttgcaaaggcactccattataaagaaatggaatttgaagctgtgtgcaccaagaagatgggtgcaaatcctgttacagtggttgaatcccttattcatattaacaatcaactacagcagcatgaggcagctattggcatattgacttactcacagcaaaattcggaagttcaattgaaagaatcatggtatgaaaagttgcaccgttgggatgaggctcttaaagcatacaccgtgaaatcatctcaaacatctggtccctttacaaaacttggatgctacattaggtcgaatgaggtgtctagcagctttggctcggtgggaagatttaagtgcattgtgtagagagcaatggacgggtgcagaaccatctgctcgactggaaatggctccaatggctgcaaatgctgcttggcatatgggtgagtgggaccatatggcagactatgtttctcgcctggatgatgcagatgaaaataagctccgtatgttgggtaacgcaacagctagtggtgacggaagcagtaatggtgctttcttccgggcagttcttttagttcgttacaaaaagtatgatgacgctcggatgtatgttgagcgagctcggcggtgtttagctacagaacttgcagcactggtacttgagagttatgagcgagcgtataataacatggtgcgtgttcaacaactttcagaactggaagaggtgattgattactgcactcttcccatggaaagcccgattgctgacggacggagggaacttattcgcaatatgtggaatgaacggattaaaggaacaaaacggaatgtcgaggtgtggcaagccctacttgctgtcagggagttggttcttccccctaacgaagacagagacacctggataaagttcgctgaactttgctggaagaacggtcgtattagtcaggctagatctacgttagtcaaacttttacagtttgatcctgaatcttcccctgaattgacactgtatcatgcacatccacaagtagctctggcttatctaaaataccagtatgcagttggtgatgagcttaaaaggagggatgcattttctaaactgcaagagttgtctgtgcaggttgctaccaccatgggcaatttacctggaacatcagcaaaccatggcaccatgtcaaatgctggagtaccactcattgctcgtgtctacttgacacttggtagctggaagaaggcactatcacctgcattagatgacgattccattcaagaaattttgatttcttaccataatgccacgctaagtgcaaaggactgggggaaggcctggcacatatgggctttgttcaacacagaagtcatgtcacgctatactttccgaggccgaccagatattgctggaaaatatgttgttgcagcagtaactgggtatttttattctattgcttgtgcatctactacgaaaggggtcgatgatagcttgcagctttactttgaccaaaggaaaaataactcggccggggagggaaagaccgccctcccggatatccttcgtctgttaactctttggttcaaccatggggatacctcagaagttcaaacagcgttgcagaaaggtttttcccttgtcaagattgagatgtggctggttgtgctgccccagataattgctaggattcattcgaacaatagagtagttagagaactgatacaatctttgctagttcgaattggaaaggggcatccacaggctttgatgtatcctctcttggttgcctgcaaatcaataagtatattgagacaacgtgcagcgcaggaggtcgttgataagatccgccagcacagtggaggtcttgttgaccaggcacaacttgtgtcgaaggaactgatacgggtagcaattttgtggcatgaaatgtggcatgaggcactcgaggaagctagcaggatgtattttggtgagcacaatatcgaaggaatgcttgctgtacttgagccattgcatgcaatgcttgagaggggggatgagacaattaaagaaaatgccttcattcaggcttatgggcatgaattactggaagctcatgaatgctgtttgaaatatcgggctacaggagaggatgctgagctaactaaggcctgggatttgtattaccatgttttcagaagaatcgacaaacagcttccaagtcttacgaccctcgatctgcactctgtttcgcctgagctactcaaatgtcgaaagttggaacttgctgtgccaggaacttatgctgcaggccacgaagatttgcggcaagatgaacgagtaatgcagctttttggtttggtgaatactctcctagagaactcaaggaaaacatcagagaaggatttatcaatccaaagatatgctgttatacctttgtcacctaacagtggtttaattggatgggttccaaactgtgacacacttcatgctctgatccgtgaatacagagatgccaggaagattttcttgaatcaggagcacagacttatgttggcttttgcacccgattatgatcacttacccctcattgcaaaggtggaagtgtttcagcatgctttgcaaaatactgagggaaatgaccttgcgaaggttctgtggctgaagagtcgaacttcggaagtatggcttgagcgccgcacaaactacgctagaagcctggctgttatgagcatggttgggtatttgcttggtttaggagatcggcatccaagcaaccttatgttagatcgctatagtggaaaaatattacacatcgacttcggagattgctttgaggcttcaatgaatcgagaaaagttccctgaaaaagtaccattccgtttgactcgaatgcttgtgaaagctatggaagttagcggtattgagggtacattccgaacaacttgtgaaaatgtgatgcaagtccttcgcacaaacagagacagcgttatggccatgatggaggcatttgtacatgacccgttaatcaattggcgtctgttcaatttcaatgaggttcctcaagtgtcgaactatggtaatgttcatgctcacacggttgtcagtagtgaagaagcagtggctaaccgagagctcatgcaacctcagcgaggagcacgtgagagggaactgctacaggctgtcaatcaactcggtgatgccaatgaggttttgaatgagcgtgctgtagctgtgatggcacggatgagtgacaaactaacagggcgtgacttctcttctgggtcagctttggctggagcaggtagctctatccaacatggcagtgagcatttggcttcaggagatgcccgggatgcccaacctggtctctcagtgaaggttcaggttcagaagctcatactccaagcgacttcacacgaaaatttgtgccaaaactatgtcgggtggtgtccgttctggtgagctctcttggaaacagtagcagtttataacatgtaaatattgtgaataccgtgtgcatagaagtttcgtggtgacagtttgtatgtgcagctttgtaattagcagaacttcaagatgccttggaccatccttttgtcagtttcttagaccgtgtttagcagttcacccttatggccatccaaaacactgtttttgtactgtagattgtattgtttgtagattgtactgttcgcagggtggatttttgaatatgagtataagaatgtgtaagctgttgaagatagccttaggttttcttccgtgccacttgagggtttgttcgattagctctcaatttatgtggattgagtgagatcggattggtttaaatctcaagcaagttaaattttcttcttaatttttctaatctcatcaaatccatgtgtaacgggaataaccgaacaaggtctgactgaaaatgttaagaggg

SEQ ID NO: 202832 - DNA, 7276 bp, Zea Mays
ttctccgccaccgcggcccaaccgcgccgccgcacagccgcgccgccgccgagccgcgcgttctgcactcttcgcgccatcgctctcctcgcgccgtcgcccggccgcgccgtcgccctcctcggcctgccctgctcgcgtggagcgtccgcgtgagcgagacagggagacggagcaagacggcgtctcggtgggacgagcgcattcggccgatttgagagagcgagctcgtccattcctgcagtgcgcgttcgcatagttaaacccttgacagttcccctgcccccgcctctatccggcgcgccggccttgcagccgccaacatcgccatgaaaccctcgccgcacttcccggagatcggaaagaagcctaaagatttgtatggatcatatcttgtttgttctacgtacaccagacgagcgcgctagtggttttgttgcccttggagagatggctggggctctgggtgttgaacttgtgccttatttaccagcaattacctcacatttgcaagatgcgattgctcctcgcagaggaaggccatctcttgaggcaatttcttgtgtaggaagctttgcaaaagctatgggtcctgcaatggaacctcatattcgtagcggacttctagatgctatgttttttgctggtctttctgataaacttatagatgcactcgagtctataagcacaagcatcccgtctttactacccacaatacaggagcgtttattggattgtatatctcaagcactaccaaagtcatcaataaggccaggtgcttctgttggtcgagcaagcaggtcaaacaatttgcaacagtttgtggactctaatagtcctgttcttgtgcaacttgcactgtggactctagcaaacttcaactttaagggccatgaacttctggaattcgctagagagagtgtcatactttatttggaagatgaagatagcagtaccagaaaagctgcctctttgtgctgttgcaaattagttgcacactccctttctgcttcttcagcttcacagttcggttcaaataggacaaatcgtattggaggagctaagcgccgccggcttgtagaggagatagtggagaaacttcttatggctgcagttgctgatgctgatgttggtgttagaagttcagtcttcaaggctttgtatcgaaatccagcttttgatgatttcttggcccaagctgacatcttgacttcaatttttgttgccttaaatgatgaggaatatgatgtcagagaattggcaatttctgttgctggtcgattgtctgaaaagaatcctgcatatgtactgcctgcccttcgtcgctatcttatacaattgctcacatatcttgaccagagtatggatagcaagtgtagagaggaaagtgctagattattgggttgtttaattaggagctgcgcgcggctcattcttccttacattgctccagttcacaaggcgctagtgactagattgtgtgaaggaacgggaccaaatgctaataatgctcttgctgcgggagtgcttgccactgttggagaactggccaaagtgggtggctttgctatgaggcaatatcttcctgagctgatgcctgtagttgtggattctcttttagatggaggtgctgttagtaaaagggaagtggcagtgtcaactctgggacagattatccagagcacaggctatgttattgccccctataatgagtacccgccattgcttggcttactcttgaagttgcttaatggtgaattggaatggtcaactagactagaagtgctgaaggttttagggattatgggtgcattggaccctcacgcacacaagcgaaatcagcacaatctacctggtcagcatagagaggtcctacggccaacaatcgagaccgcacaacatattgtttccatggaagagttaccgactgactactggccttctttttcagcatccgaggactactattcaacagttgcaattagctccctcatgcgaattcttcgagatccttctctttcaagttatcaccaaatggtggttggctcccttatctttatttttaagtcaatgggcctcggctgtgttccatacttaccaaaggttcttcctgatttattccgtgctgttcgcatgtgcgaggatggtgctttaaaagagttcataacctggaaacttggaacattgatatctattgtccggcagcacatccgaaaatatttacaagacatactttccctcatctctgagctgtggacttcctcattcagcttggctgcaccaaatcggaccatacagggcccacagggttcaccggttcttcaccttgtcgagcagctatgcttagctttaaatgatgagttcagaatgtatttacttcacattctaccgagttgtatccaagtcttaggtgacgctgaacgttgcaatgattattactatgttcctgacatattacacacacttgaagtttttggcggaaatttggatgagcacatgcacttggttgctccggtgcttgttcgtttatttaaagtggagctggttgatatcaggcggcgtgcaattgttactttgactaatcttatacctaaggttcaggttggtactcatgtttcggctttagtgcatcatctgaagcttgtcttggatggcaacaatgatgatctgcggaaagatgctgcagaagcgctctgctgcctcgcacatgcccttggagaagactttactatcttcataccatcaatacgcaaaattcttgtgaagcaccacttgcggtacagaaaatgggatgagattgaaaatcggctactgaggcgagagctactcatcactgaaaacttgtctgtgcaaaagtacacacaatgtccacctgatgtcattagagacccccttgatgattgtgatggtacaccttctgagatagctgatgatacacagcgacaagcaagaagtcatcaagtcaatgatgtccggttgcggagtgccggtgaggcttctcaaaggagtactagggaagactgggctgaatggatgagacatttcagtattgcgcttctcaaagagtcaccatctccagctttacgcacctgtgcaaggctagctcagcttcagccttctgttggccgcgagttgtttgctgcaggttttgcaagttgctgggcccaaatgagtgaatcctcccaggaacagctagtgagaagtctcaagacagccttctcatctcagacattcctcctgaaattcttgccacgctgctgaacttagcagaatttatggaacatgatgagaagccacttcctattgatacaagactgcttggtgcacttgctgagaagtgtcgagcatttgcaaaggcactccattataaagaaatggaatttgaagctgtgtgcaccaagaagatgggtgcaaatcctgttacagtggttgaatcccttattcatattaacaatcaactacagcagcatgaggcagctattggcatattgacttactcacagcaaaattcggaagttcaattgaaagaatcatggtatgaaaagttgcaccgttgggatgaggctcttaaagcatacaccgtgaaatcatctcaaacatctggtccctttacaaaacttggatgctacattaggtcgaatgaggtgtctagcagctttggctcggctgcaaatgctgcttggcatatgggtgagtgggaccatatggcagactatgtttctcgcctggatgatgcagatgaaaataagctccgtatgttgggtaacgcaacagctagtggtgacggaagcagtaatggtgctttcttccgggcagttcttttagttcgttacaaaaagtatgatgacgctcggatgtatgttgagcgagctcggcggtgtttagctacagaacttgcagcactggtacttgagagttatgagcgagcgtataataacatggtgcgtgttcaacaactttcagaactggaagaggtgattgattactgcactcttcccatggaaagcccgattgctgacggacggagggaacttattcgcaatatgtggaatgaacggattaaaggaacaaaacggaatgtcgaggtgtggcaagccctacttgctgtcagggagttggttcttccccctaacgaagacagagacacctggataaagttcgctgaactttgctggaagaacggtcgtattagtcaggctagatctacgttagtcaaacttttacagtttgatcctgaatcttcccctgaattgacactgtatcatgcacatccacaagtagctctggcttatctaaaataccagtatgcagttggtgatgagcttaaaaggagggatgcattttctaaactgcaagagttgtctgtgcaggttgctaccaccatgggcaatttacctggaacatcagcaaaccatggcaccatgtcaaatgctggagtaccactcattgctcgtgtctacttgacacttggtagctggaagaaggcactatcacctgcattagatgacgattccattcaagaaattttgatttcttaccataatgccacgctaagtgcaaaggactgggggaaggcctggcacatatgggctttgttcaacacagaagtcatgtcacgctatactttccgaggccgaccagatattgctggaaaatatgttgttgcagcagtaactgggtatttttattctattgcttgtgcatctactacgaaaggggtcgatgatagcttgcagctttactttgaccaaaggaaaaataactcggccggggagggaaagaccgccctcccggatatccttcgtctgttaactctttggttcaaccatggggatacctcagaagttcaaacagcgttgcagaaaggtttttcccttgtcaagattgagatgtggctggttgtgctgccccagataattgctaggattcattcgaacaatagagtagttagagaactgatacaatctttgctagttcgaattggaaaggggcatccacaggctttgatgtatcctctcttggttgcctgcaaatcaataagtatattgagacaacgtgcagcgcaggaggtcgttgataagatccgccagcacagtggaggtcttgttgaccaggcacaacttgtgtcgaaggaactgatacgggtagcaattttgtggcatgaaatgtggcatgaggcactcgaggaagctagcaggatgtattttggtgagcacaatatcgaaggaatgcttgctgtacttgagccattgcatgcaatgcttgagaggggggatgagacaattaaagaaaatgccttcattcaggcttatgggcatgaattactggaagctcatgaatgctgtttgaaatatcgggctacaggagaggatgctgagctaactaaggcctgggatttgtattaccatgttttcagaagaatcgacaaacagcttccaagtcttacgaccctcgatctgcactctgtttcgcctgagctactcaaatgtcgaaagttggaacttgctgtgccaggaacttatgctgcagattcaccacttgtgacgattgagtattttgttccccaattgatttgttataacgtccaaacaaaggccaagaaagctgacaattcatggaagtgatggcaatgattatgcattcttgcttaaaggccacgaagatttgcggcaagatgaacgagtaatgcagctttttggtttggtgaatactctcctagagaactcaaggaaaacatcagagaaggatttatcaatccaaagatatgctgttatacctttgtcacctaacagtggtttaattggatgggttccaaactgtgacacacttcatgctctgatccgtgaatacagagatgccaggaagattttcttgaatcaggagcacagacttatgttggcttttgcacccgattatgatcacttacccctcattgcaaaggtggaagtgtttcagcatgctttgcaaaatactgagggaaatgaccttgcgaaggttctgtggctgaagagtcgaacttcggaagtatggcttgagcgccgcacaaactacgctagaagcctggctgttatgagcatggttgggtatttgcttggtttaggagatcggcatccaagcaaccttatgttagatcgctatagtggaaaaatattacacatcgacttcggagattgctttgaggcttcaatgaatcgagaaaagttccctgaaaaagtaccattccgtttgactcgaatgcttgtgaaagctatggaagttagcggtattgagggtacattccgaacaacttgtgaaaatgtgatgcaagtccttcgcacaaacagagacagcgttatggccatgatggaggcatttgtacatgacccgttaatcaattggcgtctgttcaatttcaatgaggttcctcaagtgtcgaactatggtaatgttcatgctcacacggttgtcagtagtgaagaagcagtggctaaccgagagctcatgcaacctcagcgaggagcacgtgagagggaactgctacaggctgtcaatcaactcggtgatgccaatgaggttttgaatgagcgtgctgtagctgtgatggcacggatgagtgacaaactaacagggcgtgacttctcttctgggtcagctttggctggagcaggtagctctatccaacatggcagtgagcatttggcttcaggagatgcccgggatgcccaacctggtctctcagtgaaggttcaggttcagaagctcatactccaagcgacttcacacgaaaatttgtgccaaaactatgtcgggtggtgtccgttctggtgagctctcttggaaacagtagcagtttataacatgtaaatattgtgaataccgtgtgcatagaagtttcgtggtgacagtttgtatgtgcagctttgtaattagcagaacttcaagatgccttggaccatccttttgtcagtttcttagaccgtgtttagcagttcacccttatggccatccaaaacactgtttttgtactgtagattgtattgtttgtagattgtactgttcgcagggtggatttttgaatatgagtataagaatgtgtaagctgttgaagatagccttaggttttcttccgtgccacttgagggtttgttcgattagctctcaatttatgtggattgagtgagatcggattggtttaaatctcaagcaagttaaattttcttcttaatttttctaatctcatcaaatccatgtgtaacgggaataaccgaacaaggtctgactgaaaatgttaagaggg

SEQ ID NO: 202833 - DNA, 7241 bp, Zea Mays
ttctccgccaccgcggcccaaccgcgccgccgcacagccgcgccgccgccgagccgcgcgttctgcactcttcgcgccatcgctctcctcgcgccgtcgcccggccgcgccgtcgccctcctcggcctgccctgctcgcgtggagcgtccgcgtgagcgagacagggagacggagcaagacggcgtctcggtgggacgagcgcattcggccgatttgagagagcgagctcgtccattcctgcagtgcgcgttcgcatagttaaacccttgacagttcccctgcccccgcctctatccggcgcgccggccttgcagccgccaacatcgccatgaaaccctcgccgcacttcccggagatcggaaagaagcctaaagatttgtgactaattacctgaagatttgtatggatcatatcttgtttgttctacgtacaccagacgagcgcgctagtggttttgttgcccttggagagatggctggggctctgggtgttgaacttgtgccttatttaccagcaattacctcacatttgcaagatgcgattgctcctcgcagaggaaggccatctcttgaggcaatttcttgtgtaggaagctttgcaaaagctatgggtcctgcaatggaacctcatattcgtagcggacttctagatgctatgttttttgctggtctttctgataaacttatagatgcactcgagtctataagcacaagcatcccgtctttactacccacaatacaggagcgtttattggattgtatatctcaagcactaccaaagtcatcaataaggccaggtgcttctgttggtcgagcaagcaggtcaaacaatttgcaacagtttgtggactctaatagtcctgttcttgtgcaacttgcactgtggactctagcaaacttcaactttaagggccatgaacttctggaattcgctagagagagtgtcatactttatttggaagatgaagatagcagtaccagaaaagctgcctctttgtgctgttgcaaattagttgcacactccctttctgcttcttcagcttcacagttcggttcaaataggacaaatcgtattggaggagctaagcgccgccggcttgtagaggagatagtggagaaacttcttatggctgcagttgctgatgctgatgttggtgttagaagttcagtcttcaaggctttgtatcgaaatccagcttttgatgatttcttggcccaagctgacatcttgacttcaatttttgttgccttaaatgatgaggaatatgatgtcagagaattggcaatttctgttgctggtcgattgtctgaaaagaatcctgcatatgtactgcctgcccttcgtcgctatcttatacaattgctcacatatcttgaccagagtatggatagcaagtgtagagaggaaagtgctagattattgggttgtttaattaggagctgcgcgcggctcattcttccttacattgctccagttcacaaggcgctagtgactagattgtgtgaaggaacgggaccaaatgctaataatgctcttgctgcgggagtgcttgccactgttggagaactggccaaagtgggtggctttgctatgaggcaatatcttcctgagctgatgcctgtagttgtggattctcttttagatggaggtgctgttagtaaaagggaagtggcagtgtcaactctgggacagattatccagagcacaggctatgttattgccccctataatgagtacccgccattgcttggcttactcttgaagttgcttaatggtgaattggaatggtcaactagactagaagtgctgaaggttttagggattatgggtgcattggaccctcacgcacacaagcgaaatcagcacaatctacctggtcagcatagagaggtcctacggccaacaatcgagaccgcacaacatattgtttccatggaagagttaccgactgactactggccttctttttcagcatccgaggactactattcaacagttgcaattagctccctcatgcgaattcttcgagatccttctctttcaagttatcaccaaatggtggttggctcccttatctttatttttaagtcaatgggcctcggctgtgttccatacttaccaaaggttcttcctgatttattccgtgctgttcgcatgtgcgaggatggtgctttaaaagagttcataacctggaaacttggaacattgatatctattgtccggcagcacatccgaaaatatttacaagacatactttccctcatctctgagctgtggacttcctcattcagcttggctgcaccaaatcggaccatacagggcccacagggttcaccggttcttcaccttgtcgagcagctatgcttagctttaaatgatgagttcagaatgtatttacttcacattctaccgagttgtatccaagtcttaggtgacgctgaacgttgcaatgattattactatgttcctgacatattacacacacttgaagtttttggcggaaatttggatgagcacatgcacttggttgctccggtgcttgttcgtttatttaaagtggagctggttgatatcaggcggcgtgcaattgttactttgactaatcttatacctaaggttcaggttggtactcatgtttcggctttagtgcatcatctgaagcttgtcttggatggcaacaatgatgatctgcggaaagatgctgcagaagcgctctgctgcctcgcacatgcccttggagaagactttactatcttcataccatcaatacgcaaaattcttgtgaagcaccacttgcggtacagaaaatgggatgagattgaaaatcggctactgaggcgagagctactcatcactgaaaacttgtctgtgcaaaagtacacacaatgtccacctgatgtcattagagacccccttgatgattgtgatggtacaccttctgagatagctgatgatacacagcgacaagcaagaagtcatcaagtcaatgatgtccggttgcggagtgccggtgaggcttctcaaaggagtactagggaagactgggctgaatggatgagacatttcagtattgcgcttctcaaagagtcaccatctccagctttacgcacctgtgcaaggctagctcagcttcagccttctgttggccgcgagttgtttgctgcaggttttgcaagttgctgggcccaaatgagtgaatcctcccaggaacagctagtgagaagtctcaagacagccttctcatctcagacattcctcctgaaattcttgccacgctgctgaacttagcagaatttatggaacatgatgagaagccacttcctattgatacaagactgcttggtgcacttgctgagaagtgtcgagcatttgcaaaggcactccattataaagaaatggaatttgaagctgtgtgcaccaagaagatgggtgcaaatcctgttacagtggttgaatcccttattcatattaacaatcaactacagcagcatgaggcagctattggcatattgacttactcacagcaaaattcggaagttcaattgaaagaatcatggtatgaaaagttgcaccgttgggatgaggctcttaaagcatacaccgtgaaatcatctcaaacatctggtccctttacaaaacttggatgctacattaggtcgaatgaggtgtctagcagctttggctcggctgcaaatgctgcttggcatatgggtgagtgggaccatatggcagactatgtttctcgcctggatgatgcagatgaaaataagctccgtatgttgggtaacgcaacagctagtggtgacggaagcagtaatggtgctttcttccgggcagttcttttagttcgttacaaaaagtatgatgacgctcggatgtatgttgagcgagctcggcggtgtttagctacagaacttgcagcactggtacttgagagttatgagcgagcgtataataacatggtgcgtgttcaacaactttcagaactggaagaggtgattgattactgcactcttcccatggaaagcccgattgctgacggacggagggaacttattcgcaatatgtggaatgaacggattaaaggaacaaaacggaatgtcgaggtgtggcaagccctacttgctgtcagggagttggttcttccccctaacgaagacagagacacctggataaagttcgctgaactttgctggaagaacggtcgtattagtcaggctagatctacgttagtcaaacttttacagtttgatcctgaatcttcccctgaattgacactgtatcatgcacatccacaagtagctctggcttatctaaaataccagtatgcagttggtgatgagcttaaaaggagggatgcattttctaaactgcaagagttgtctgtgcaggttgctaccaccatgggcaatttacctggaacatcagcaaaccatggcaccatgtcaaatgctggagtaccactcattgctcgtgtctacttgacacttggtagctggaagaaggcactatcacctgcattagatgacgattccattcaagaaattttgatttcttaccataatgccacgctaagtgcaaaggactgggggaaggcctggcacatatgggctttgttcaacacagaagtcatgtcacgctatactttccgaggccgaccagatattgctggaaaatatgttgttgcagcagtaactgggtatttttattctattgcttgtgcatctactacgaaaggggtcgatgatagcttgcaggatatccttcgtctgttaactctttggttcaaccatggggatacctcagaagttcaaacagcgttgcagaaaggtttttcccttgtcaagattgagatgtggctggttgtgctgccccagataattgctaggattcattcgaacaatagagtagttagagaactgatacaatctttgctagttcgaattggaaaggggcatccacaggctttgatgtatcctctcttggttgcctgcaaatcaataagtatattgagacaacgtgcagcgcaggaggtcgttgataagatccgccagcacagtggaggtcttgttgaccaggcacaacttgtgtcgaaggaactgatacgggtagcaattttgtggcatgaaatgtggcatgaggcactcgaggaagctagcaggatgtattttggtgagcacaatatcgaaggaatgcttgctgtacttgagccattgcatgcaatgcttgagaggggggatgagacaattaaagaaaatgccttcattcaggcttatgggcatgaattactggaagctcatgaatgctgtttgaaatatcgggctacaggagaggatgctgagctaactaaggcctgggatttgtattaccatgttttcagaagaatcgacaaacagcttccaagtcttacgaccctcgatctgcactctgtttcgcctgagctactcaaatgtcgaaagttggaacttgctgtgccaggaacttatgctgcagattcaccacttgtgacgattgagtattttgttccccaattgatttgttataacgtccaaacaaaggccaagaaagctgacaattcatggaagtgatggcaatgattatgcattcttgcttaaaggccacgaagatttgcggcaagatgaacgagtaatgcagctttttggtttggtgaatactctcctagagaactcaaggaaaacatcagagaaggatttatcaatccaaagatatgctgttatacctttgtcacctaacagtggtttaattggatgggttccaaactgtgacacacttcatgctctgatccgtgaatacagagatgccaggaagattttcttgaatcaggagcacagacttatgttggcttttgcacccgattatgatcacttacccctcattgcaaaggtggaagtgtttcagcatgctttgcaaaatactgagggaaatgaccttgcgaaggttctgtggctgaagagtcgaacttcggaagtatggcttgagcgccgcacaaactacgctagaagcctggctgttatgagcatggttgggtatttgcttggtttaggagatcggcatccaagcaaccttatgttagatcgctatagtggaaaaatattacacatcgacttcggagattgctttgaggcttcaatgaatcgagaaaagttccctgaaaaagtaccattccgtttgactcgaatgcttgtgaaagctatggaagttagcggtattgagggtacattccgaacaacttgtgaaaatgtgatgcaagtccttcgcacaaacagagacagcgttatggccatgatggaggcatttgtacatgacccgttaatcaattggcgtctgttcaatttcaatgaggttcctcaagtgtcgaactatggtaatgttcatgctcacacggttgtcagtagtgaagaagcagtggctaaccgagagctcatgcaacctcagcgaggagcacgtgagagggaactgctacaggctgtcaatcaactcggtgatgccaatgaggttttgaatgagcgtgctgtagctgtgatggcacggatgagtgacaaactaacagggcgtgacttctcttctgggtcagctttggctggagcaggtagctctatccaacatggcagtgagcatttggcttcaggagatgcccgggatgcccaacctggtctctcagtgaaggttcaggttcagaagctcatactccaagcgacttcacacgaaaatttgtgccaaaactatgtcgggtggtgtccgttctggtgagctctcttggaaacagtagcagtttataacatgtaaatattgtgaataccgtgtgcatagaagtttcgtggtgacagtttgtatgtgcagctttgtaattagcagaacttcaagatgccttggaccatccttttgtcagtttcttagaccgtgtttagcagttcacccttatggccatccaaaacactgtttttgtactgtagattgtattgtttgtagattgtactgttcgcagggtggatttttgaatatgagtataagaatgtgtaagctgttgaagatagccttaggttttcttccgtgccacttgagggtttgttcgattagctctcaatttatgtggattgagtgagatcggattggtttaaatctcaagcaagttaaattttcttcttaatttttctaatctcatcaaatccatgtgtaacgggaataaccgaacaaggtctgactgaaaatgttaagaggg

SEQ ID NO: 202834 - DNA, 8137 bp, Zea Mays
gcgggacccacgtgtcatacaaaggcttctttccctttcttcttcgttcttccgttcaccgttctccgccaccgcggcccaaccgcgccgccgcacagccgcgccgccgccgagccgcgcgttctgcactcttcgcgccatcgctctcctcgcgccgtcgcccggccgcgccgtcgccctcctcggcctgccctgctcgcgtggagcgtccgcgtgagcgagacagggagacggagcaagacggcgtctcggtgggacgagcgcattcggccgatttgagagagcgagctcgtccattcctgcagtgcgcgttcgcatagttaaacccttgacagttcccctgcccccgcctctatccggcgcgccggccttgcagccgccaacatcgccatgaaaccctcgccgcacttcccggagatcggaaagaagcctaaagatttgattgctaaggaccacacatttaacatcgcggcttacatctcgtctggagcggatgttattgctgccgcgctccgtaaacatgttgaggaggaagcccgagatctcagcggtgaagcttttttaaggtttatggatcagctctatgagcagatatctagtttactgcagagcaacgatgttaatgaaaatttactggctctccgtgctatcgatgcattaattgatatgccctttggagaaggcgcttccaaagtttctaagtttgccagcttcttgagaaacgtatttgaagtgaagcgcgaccctgaaatcctagttcccgcaagtgaagtgctgggtcatttagcaaaagcgggaggagcaatgactgcagatgaagtggagcggcagattaaaacggctttggggtggcttactggtgaacgagtggaatatcgccgatttgcagctgtactcattctcaaagagatggcagaaaatgcgtcaacagttttcaatgttcatgttcctgagtttgttgatgctatatgggtagcactgagagaccctaaacaagctgttcgtgaaaaagcagttgaagccttgcgcgcttgtctccatgttattgaaaaacgggagacacgttggcgtgtacaatggtattaccggatgtgtgaagccgcacaagttgggcttggcagaaatgcttctgttcatagtattcatggatcattattggccgttggagaattgctgaggaatacaggggagtttatgatgtctcggtacagagaagtggctgatattgtcctcgattatttaaagcatcgagatcagcttgttcgacgtagtataacatcacttcttcctcgaattgcccacttcctgcgtgacagatttgtgactaattacctgaagatttgtatggatcatatcttgtttgttctacgtacaccagacgagcgcgctagtggttttgttgcccttggagagatggctggggctctgggtgttgaacttgtgccttatttaccagcaattacctcacatttgcaagatgcgattgctcctcgcagaggaaggccatctcttgaggcaatttcttgtgtaggaagctttgcaaaagctatgggtcctgcaatggaacctcatattcgtagcggacttctagatgctatgttttttgctggtctttctgataaacttatagatgcactcgagtctataagcacaagcatcccgtctttactacccacaatacaggagcgtttattggattgtatatctcaagcactaccaaagtcatcaataaggccaggtgcttctgttggtcgagcaagcaggtcaaacaatttgcaacagtttgtggactctaatagtcctgttcttgtgcaacttgcactgtggactctagcaaacttcaactttaagggccatgaacttctggaattcgctagagagagtgtcatactttatttggaagatgaagatagcagtaccagaaaagctgcctctttgtgctgttgcaaattagttgcacactccctttctgcttcttcagcttcacagttcggttcaaataggacaaatcgtattggaggagctaagcgccgccggcttgtagaggagatagtggagaaacttcttatggctgcagttgctgatgctgatgttggtgttagaagttcagtcttcaaggctttgtatcgaaatccagcttttgatgatttcttggcccaagctgacatcttgacttcaatttttgttgccttaaatgatgaggaatatgatgtcagagaattggcaatttctgttgctggtcgattgtctgaaaagaatcctgcatatgtactgcctgcccttcgtcgctatcttatacaattgctcacatatcttgaccagagtatggatagcaagtgtagagaggaaagtgctagattattgggttgtttaattaggagctgcgcgcggctcattcttccttacattgctccagttcacaaggcgctagtgactagattgtgtgaaggaacgggaccaaatgctaataatgctcttgctgcgggagtgcttgccactgttggagaactggccaaagtgggtggctttgctatgaggcaatatcttcctgagctgatgcctgtagttgtggattctcttttagatggaggtgctgttagtaaaagggaagtggcagtgtcaactctgggacagattatccagagcacaggctatgttattgccccctataatgagtacccgccattgcttggcttactcttgaagttgcttaatggtgaattggaatggtcaactagactagaagtgctgaaggttttagggattatgggtgcattggaccctcacgcacacaagcgaaatcagcacaatctacctggtcagcatagagaggtcctacggccaacaatcgagaccgcacaacatattgtttccatggaagagttaccgactgactactggccttctttttcagcatccgaggactactattcaacagttgcaattagctccctcatgcgaattcttcgagatccttctctttcaagttatcaccaaatggtggttggctcccttatctttatttttaagtcaatgggcctcggctgtgttccatacttaccaaaggttcttcctgatttattccgtgctgttcgcatgtgcgaggatggtgctttaaaagagttcataacctggaaacttggaacattgatatctattgtccggcagcacatccgaaaatatttacaagacatactttccctcatctctgagctgtggacttcctcattcagcttggctgcaccaaatcggaccatacagggcccacagggttcaccggttcttcaccttgtcgagcagctatgcttagctttaaatgatgagttcagaatgtatttacttcacattctaccgagttgtatccaagtcttaggtgacgctgaacgttgcaatgattattactatgttcctgacatattacacacacttgaagtttttggcggaaatttggatgagcacatgcacttggttgctccggtgcttgttcgtttatttaaagtggagctggttgatatcaggcggcgtgcaattgttactttgactaatcttatacctaaggttcaggttggtactcatgtttcggctttagtgcatcatctgaagcttgtcttggatggcaacaatgatgatctgcggaaagatgctgcagaagcgctctgctgcctcgcacatgcccttggagaagactttactatcttcataccatcaatacgcaaaattcttgtgaagcaccacttgcggtacagaaaatgggatgagattgaaaatcggctactgaggcgagagctactcatcactgaaaacttgtctgtgcaaaagtacacacaatgtccacctgatgtcattagagacccccttgatgattgtgatggtacaccttctgagatagctgatgatacacagcgacaagcaagaagtcatcaagtcaatgatgtccggttgcggagtgccggtgaggcttctcaaaggagtactagggaagactgggctgaatggatgagacatttcagtattgcgcttctcaaagagtcaccatctccagctttacgcacctgtgcaaggctagctcagcttcagccttctgttggccgcgagttgtttgctgcaggttttgcaagttgctgggcccaaatgagtgaatcctcccaggaacagctagtgagaagtctcaagacagccttctcatctcagacattcctcctgaaattcttgccacgctgctgaacttagcagaatttatggaacatgatgagaagccacttcctattgatacaagactgcttggtgcacttgctgagaagtgtcgagcatttgcaaaggcactccattataaagaaatggaatttgaagctgtgtgcaccaagaagatgggtgcaaatcctgttacagtggttgaatcccttattcatattaacaatcaactacagcagcatgaggcagctattggcatattgacttactcacagcaaaattcggaagttcaattgaaagaatcatggtatgaaaagttgcaccgttgggatgaggctcttaaagcatacaccgtgaaatcatctcaaacatctggtccctttacaaaacttggatgctacattaggtcgaatgaggtgtctagcagctttggctcggtgggaagatttaagtgcattgtgtagagagcaatggacgggtgcagaaccatctgctcgactggaaatggctccaatggctgcaaatgctgcttggcatatgggtgagtgggaccatatggcagactatgtttctcgcctggatgatgcagatgaaaataagctccgtatgttgggtaacgcaacagctagtggtgacggaagcagtaatggtgctttcttccgggcagttcttttagttcgttacaaaaagtatgatgacgctcggatgtatgttgagcgagctcggcggtgtttagctacagaacttgcagcactggtacttgagagttatgagcgagcgtataataacatggtgcgtgttcaacaactttcagaactggaagaggtgattgattactgcactcttcccatggaaagcccgattgctgacggacggagggaacttattcgcaatatgtggaatgaacggattaaaggaacaaaacggaatgtcgaggtgtggcaagccctacttgctgtcagggagttggttcttccccctaacgaagacagagacacctggataaagttcgctgaactttgctggaagaacggtcgtattagtcaggctagatctacgttagtcaaacttttacagtttgatcctgaatcttcccctgaattgacactgtatcatgcacatccacaagtagctctggcttatctaaaataccagtatgcagttggtgatgagcttaaaaggagggatgcattttctaaactgcaagagttgtctgtgcaggttgctaccaccatgggcaatttacctggaacatcagcaaaccatggcaccatgtcaaatgctggagtaccactcattgctcgtgtctacttgacacttggtagctggaagaaggcactatcacctgcattagatgacgattccattcaagaaattttgatttcttaccataatgccacgctaagtgcaaaggactgggggaaggcctggcacatatgggctttgttcaacacagaagtcatgtcacgctatactttccgaggccgaccagatattgctggaaaatatgttgttgcagcagtaactgggtatttttattctattgcttgtgcatctactacgaaaggggtcgatgatagcttgcaggatatccttcgtctgttaactctttggttcaaccatggggatacctcagaagttcaaacagcgttgcagaaaggtttttcccttgtcaagattgagatgtggctggttgtgctgccccagataattgctaggattcattcgaacaatagagtagttagagaactgatacaatctttgctagttcgaattggaaaggggcatccacaggctttgatgtatcctctcttggttgcctgcaaatcaataagtatattgagacaacgtgcagcgcaggaggtcgttgataagatccgccagcacagtggaggtcttgttgaccaggcacaacttgtgtcgaaggaactgatacgggtagcaattttgtggcatgaaatgtggcatgaggcactcgaggaagctagcaggatgtattttggtgagcacaatatcgaaggaatgcttgctgtacttgagccattgcatgcaatgcttgagaggggggatgagacaattaaagaaaatgccttcattcaggcttatgggcatgaattactggaagctcatgaatgctgtttgaaatatcgggctacaggagaggatgctgagctaactaaggcctgggatttgtattaccatgttttcagaagaatcgacaaacagcttccaagtcttacgaccctcgatctgcactctgtttcgcctgagctactcaaatgtcgaaagttggaacttgctgtgccaggaacttatgctgcaggccacgaagatttgcggcaagatgaacgagtaatgcagctttttggtttggtgaatactctcctagagaactcaaggaaaacatcagagaaggatttatcaatccaaagatatgctgttatacctttgtcacctaacagtggtttaattggatgggttccaaactgtgacacacttcatgctctgatccgtgaatacagagatgccaggaagattttcttgaatcaggagcacagacttatgttggcttttgcacccgattatgatcacttacccctcattgcaaaggtggaagtgtttcagcatgctttgcaaaatactgagggaaatgaccttgcgaaggttctgtggctgaagagtcgaacttcggaagtatggcttgagcgccgcacaaactacgctagaagcctggctgttatgagcatggttgggtatttgcttggtttaggagatcggcatccaagcaaccttatgttagatcgctatagtggaaaaatattacacatcgacttcggagattgctttgaggcttcaatgaatcgagaaaagttccctgaaaaagtaccattccgtttgactcgaatgcttgtgaaagctatggaagttagcggtattgagggtacattccgaacaacttgtgaaaatgtgatgcaagtccttcgcacaaacagagacagcgttatggccatgatggaggcatttgtacatgacccgttaatcaattggcgtctgttcaatttcaatgaggttcctcaagtgtcgaactatggtaatgttcatgctcacacggttgtcagtagtgaagaagcagtggctaaccgagagctcatgcaacctcagcgaggagcacgtgagagggaactgctacaggctgtcaatcaactcggtgatgccaatgaggttttgaatgagcgtgctgtagctgtgatggcacggatgagtgacaaactaacagggcgtgacttctcttctgggtcagctttggctggagcaggtagctctatccaacatggcagtgagcatttggcttcaggagatgcccgggatgcccaacctggtctctcagtgaaggttcaggttcagaagctcatactccaagcgacttcacacgaaaatttgtgccaaaactatgtcgggtggtgtccgttctggtgagctctcttggaaacagtagcagtttataacatgtaaatattgtgaataccgtgtgcatagaagtttcgtggtgacagtttgtatgtgcagctttgtaattagcagaacttcaagatgccttggaccatccttttgtcagtttcttagaccgtgtttagcagttcacccttatggccatccaaaacactgtttttgtactgtagattgtattgtttgtagattgtactgttcgcagggtggatttttgaatatgagtataagaatgtgtaagctgttgaagatagccttaggttttcttccgtgccacttgagggtttgttcgattagctctcaatttatgtggattgagtgagatcggattggtttaaatctcaagcaagttaaattttcttcttaatttttctaatctcatcaaatccatgtgtaacgggaataaccgaacaaggtctgactgaaaatgttaagaggg

SEQ ID NO: 202835 - DNA, 8261 bp, Zea Mays
gcgggacccacgtgtcatacaaaggcttctttccctttcttcttcgttcttccgttcaccgttctccgccaccgcggcccaaccgcgccgccgcacagccgcgccgccgccgagccgcgcgttctgcactcttcgcgccatcgctctcctcgcgccgtcgcccggccgcgccgtcgccctcctcggcctgccctgctcgcgtggagcgtccgcgtgagcgagacagggagacggagcaagacggcgtctcggtgggacgagcgcattcggccgatttgagagagcgagctcgtccattcctgcagtgcgcgttcgcatagttaaacccttgacagttcccctgcccccgcctctatccggcgcgccggccttgcagccgccaacatcgccatgaaaccctcgccgcacttcccggagatcggaaagaagcctaaagatttgattgctaaggaccacacatttaacatcgcggcttacatctcgtctggagcggatgttattgctgccgcgctccgtaaacatgttgaggaggaagcccgagatctcagcggtgaagcttttttaaggtttatggatcagctctatgagcagatatctagtttactgcagagcaacgatgttaatgaaaatttactggctctccgtgctatcgatgcattaattgatatgccctttggagaaggcgcttccaaagtttctaagtttgccagcttcttgagaaacgtatttgaagtgaagcgcgaccctgaaatcctagttcccgcaagtgaagtgctgggtcatttagcaaaagcgggaggagcaatgactgcagatgaagtggagcggcagattaaaacggctttggggtggcttactggtgaacgagtggaatatcgccgatttgcagctgtactcattctcaaagagatggcagaaaatgcgtcaacagttttcaatgttcatgttcctgagtttgttgatgctatatgggtagcactgagagaccctaaacaagctgttcgtgaaaaagcagttgaagccttgcgcgcttgtctccatgttattgaaaaacgggagacacgttggcgtgtacaatggtattaccggatgtgtgaagccgcacaagttgggcttggcagaaatgcttctgttcatagtattcatggatcattattggccgttggagaattgctgaggaatacaggggagtttatgatgtctcggtacagagaagtggctgatattgtcctcgattatttaaagcatcgagatcagcttgttcgacgtagtataacatcacttcttcctcgaattgcccacttcctgcgtgacagatttgtgactaattacctgaagatttgtatggatcatatcttgtttgttctacgtacaccagacgagcgcgctagtggttttgttgcccttggagagatggctggggctctgggtgttgaacttgtgccttatttaccagcaattacctcacatttgcaagatgcgattgctcctcgcagaggaaggccatctcttgaggcaatttcttgtgtaggaagctttgcaaaagctatgggtcctgcaatggaacctcatattcgtagcggacttctagatgctatgttttttgctggtctttctgataaacttatagatgcactcgagtctataagcacaagcatcccgtctttactacccacaatacaggagcgtttattggattgtatatctcaagcactaccaaagtcatcaataaggccaggtgcttctgttggtcgagcaagcaggtcaaacaatttgcaacagtttgtggactctaatagtcctgttcttgtgcaacttgcactgtggactctagcaaacttcaactttaagggccatgaacttctggaattcgctagagagagtgtcatactttatttggaagatgaagatagcagtaccagaaaagctgcctctttgtgctgttgcaaattagttgcacactccctttctgcttcttcagcttcacagttcggttcaaataggacaaatcgtattggaggagctaagcgccgccggcttgtagaggagatagtggagaaacttcttatggctgcagttgctgatgctgatgttggtgttagaagttcagtcttcaaggctttgtatcgaaatccagcttttgatgatttcttggcccaagctgacatcttgacttcaatttttgttgccttaaatgatgaggaatatgatgtcagagaattggcaatttctgttgctggtcgattgtctgaaaagaatcctgcatatgtactgcctgcccttcgtcgctatcttatacaattgctcacatatcttgaccagagtatggatagcaagtgtagagaggaaagtgctagattattgggttgtttaattaggagctgcgcgcggctcattcttccttacattgctccagttcacaaggcgctagtgactagattgtgtgaaggaacgggaccaaatgctaataatgctcttgctgcgggagtgcttgccactgttggagaactggccaaagtgggtggctttgctatgaggcaatatcttcctgagctgatgcctgtagttgtggattctcttttagatggaggtgctgttagtaaaagggaagtggcagtgtcaactctgggacagattatccagagcacaggctatgttattgccccctataatgagtacccgccattgcttggcttactcttgaagttgcttaatggtgaattggaatggtcaactagactagaagtgctgaaggttttagggattatgggtgcattggaccctcacgcacacaagcgaaatcagcacaatctacctggtcagcatagagaggtcctacggccaacaatcgagaccgcacaacatattgtttccatggaagagttaccgactgactactggccttctttttcagcatccgaggactactattcaacagttgcaattagctccctcatgcgaattcttcgagatccttctctttcaagttatcaccaaatggtggttggctcccttatctttatttttaagtcaatgggcctcggctgtgttccatacttaccaaaggttcttcctgatttattccgtgctgttcgcatgtgcgaggatggtgctttaaaagagttcataacctggaaacttggaacattgatatctattgtccggcagcacatccgaaaatatttacaagacatactttccctcatctctgagctgtggacttcctcattcagcttggctgcaccaaatcggaccatacagggcccacagggttcaccggttcttcaccttgtcgagcagctatgcttagctttaaatgatgagttcagaatgtatttacttcacattctaccgagttgtatccaagtcttaggtgacgctgaacgttgcaatgattattactatgttcctgacatattacacacacttgaagtttttggcggaaatttggatgagcacatgcacttggttgctccggtgcttgttcgtttatttaaagtggagctggttgatatcaggcggcgtgcaattgttactttgactaatcttatacctaaggttcaggttggtactcatgtttcggctttagtgcatcatctgaagcttgtcttggatggcaacaatgatgatctgcggaaagatgctgcagaagcgctctgctgcctcgcacatgcccttggagaagactttactatcttcataccatcaatacgcaaaattcttgtgaagcaccacttgcggtacagaaaatgggatgagattgaaaatcggctactgaggcgagagctactcatcactgaaaacttgtctgtgcaaaagtacacacaatgtccacctgatgtcattagagacccccttgatgattgtgatggtacaccttctgagatagctgatgatacacagcgacaagcaagaagtcatcaagtcaatgatgtccggttgcggagtgccggtgaggcttctcaaaggagtactagggaagactgggctgaatggatgagacatttcagtattgcgcttctcaaagagtcaccatctccagctttacgcacctgtgcaaggctagctcagcttcagccttctgttggccgcgagttgtttgctgcaggttttgcaagttgctgggcccaaatgagtgaatcctcccaggaacagctagtgagaagtctcaagacagccttctcatctcagacattcctcctgaaattcttgccacgctgctgaacttagcagaatttatggaacatgatgagaagccacttcctattgatacaagactgcttggtgcacttgctgagaagtgtcgagcatttgcaaaggcactccattataaagaaatggaatttgaagctgtgtgcaccaagaagatgggtgcaaatcctgttacagtggttgaatcccttattcatattaacaatcaactacagcagcatgaggcagctattggcatattgacttactcacagcaaaattcggaagttcaattgaaagaatcatggtatgaaaagttgcaccgttgggatgaggctcttaaagcatacaccgtgaaatcatctcaaacatctggtccctttacaaaacttggatgctacattaggtcgaatgaggtgtctagcagctttggctcggtgggaagatttaagtgcattgtgtagagagcaatggacgggtgcagaaccatctgctcgactggaaatggctccaatggctgcaaatgctgcttggcatatgggtgagtgggaccatatggcagactatgtttctcgcctggatgatgcagatgaaaataagctccgtatgttgggtaacgcaacagctagtggtgacggaagcagtaatggtgctttcttccgggcagttcttttagttcgttacaaaaagtatgatgacgctcggatgtatgttgagcgagctcggcggtgtttagctacagaacttgcagcactggtacttgagagttatgagcgagcgtataataacatggtgcgtgttcaacaactttcagaactggaagaggtgattgattactgcactcttcccatggaaagcccgattgctgacggacggagggaacttattcgcaatatgtggaatgaacggattaaaggaacaaaacggaatgtcgaggtgtggcaagccctacttgctgtcagggagttggttcttccccctaacgaagacagagacacctggataaagttcgctgaactttgctggaagaacggtcgtattagtcaggctagatctacgttagtcaaacttttacagtttgatcctgaatcttcccctgaattgacactgtatcatgcacatccacaagtagctctggcttatctaaaataccagtatgcagttggtgatgagcttaaaaggagggatgcattttctaaactgcaagagttgtctgtgcaggttgctaccaccatgggcaatttacctggaacatcagcaaaccatggcaccatgtcaaatgctggagtaccactcattgctcgtgtctacttgacacttggtagctggaagaaggcactatcacctgcattagatgacgattccattcaagaaattttgatttcttaccataatgccacgctaagtgcaaaggactgggggaaggcctggcacatatgggctttgttcaacacagaagtcatgtcacgctatactttccgaggccgaccagatattgctggaaaatatgttgttgcagcagtaactgggtatttttattctattgcttgtgcatctactacgaaaggggtcgatgatagcttgcaggatatccttcgtctgttaactctttggttcaaccatggggatacctcagaagttcaaacagcgttgcagaaaggtttttcccttgtcaagattgagatgtggctggttgtgctgccccagataattgctaggattcattcgaacaatagagtagttagagaactgatacaatctttgctagttcgaattggaaaggggcatccacaggctttgatgtatcctctcttggttgcctgcaaatcaataagtatattgagacaacgtgcagcgcaggaggtcgttgataagatccgccagcacagtggaggtcttgttgaccaggcacaacttgtgtcgaaggaactgatacgggtagcaattttgtggcatgaaatgtggcatgaggcactcgaggaagctagcaggatgtattttggtgagcacaatatcgaaggaatgcttgctgtacttgagccattgcatgcaatgcttgagaggggggatgagacaattaaagaaaatgccttcattcaggcttatgggcatgaattactggaagctcatgaatgctgtttgaaatatcgggctacaggagaggatgctgagctaactaaggcctgggatttgtattaccatgttttcagaagaatcgacaaacagcttccaagtcttacgaccctcgatctgcactctgtttcgcctgagctactcaaatgtcgaaagttggaacttgctgtgccaggaacttatgctgcagattcaccacttgtgacgattgagtattttgttccccaattgatttgttataacgtccaaacaaaggccaagaaagctgacaattcatggaagtgatggcaatgattatgcattcttgcttaaaggccacgaagatttgcggcaagatgaacgagtaatgcagctttttggtttggtgaatactctcctagagaactcaaggaaaacatcagagaaggatttatcaatccaaagatatgctgttatacctttgtcacctaacagtggtttaattggatgggttccaaactgtgacacacttcatgctctgatccgtgaatacagagatgccaggaagattttcttgaatcaggagcacagacttatgttggcttttgcacccgattatgatcacttacccctcattgcaaaggtggaagtgtttcagcatgctttgcaaaatactgagggaaatgaccttgcgaaggttctgtggctgaagagtcgaacttcggaagtatggcttgagcgccgcacaaactacgctagaagcctggctgttatgagcatggttgggtatttgcttggtttaggagatcggcatccaagcaaccttatgttagatcgctatagtggaaaaatattacacatcgacttcggagattgctttgaggcttcaatgaatcgagaaaagttccctgaaaaagtaccattccgtttgactcgaatgcttgtgaaagctatggaagttagcggtattgagggtacattccgaacaacttgtgaaaatgtgatgcaagtccttcgcacaaacagagacagcgttatggccatgatggaggcatttgtacatgacccgttaatcaattggcgtctgttcaatttcaatgaggttcctcaagtgtcgaactatggtaatgttcatgctcacacggttgtcagtagtgaagaagcagtggctaaccgagagctcatgcaacctcagcgaggagcacgtgagagggaactgctacaggctgtcaatcaactcggtgatgccaatgaggttttgaatgagcgtgctgtagctgtgatggcacggatgagtgacaaactaacagggcgtgacttctcttctgggtcagctttggctggagcaggtagctctatccaacatggcagtgagcatttggcttcaggagatgcccgggatgcccaacctggtctctcagtgaaggttcaggttcagaagctcatactccaagcgacttcacacgaaaatttgtgccaaaactatgtcgggtggtgtccgttctggtgagctctcttggaaacagtagcagtttataacatgtaaatattgtgaataccgtgtgcatagaagtttcgtggtgacagtttgtatgtgcagctttgtaattagcagaacttcaagatgccttggaccatccttttgtcagtttcttagaccgtgtttagcagttcacccttatggccatccaaaacactgtttttgtactgtagattgtattgtttgtagattgtactgttcgcagggtggatttttgaatatgagtataagaatgtgtaagctgttgaagatagccttaggttttcttccgtgccacttgagggtttgttcgattagctctcaatttatgtggattgagtgagatcggattggtttaaatctcaagcaagttaaattttcttcttaatttttctaatctcatcaaatccatgtgtaacgggaataaccgaacaaggtctgactgaaaatgttaagaggg

SEQ ID NO: 202836 - DNA, 8233 bp, Zea Mays
gcgggacccacgtgtcatacaaaggcttctttccctttcttcttcgttcttccgttcaccgttctccgccaccgcggcccaaccgcgccgccgcacagccgcgccgccgccgagccgcgcgttctgcactcttcgcgccatcgctctcctcgcgccgtcgcccggccgcgccgtcgccctcctcggcctgccctgctcgcgtggagcgtccgcgtgagcgagacagggagacggagcaagacggcgtctcggtgggacgagcgcattcggccgatttgagagagcgagctcgtccattcctgcagtgcgcgttcgcatagttaaacccttgacagttcccctgcccccgcctctatccggcgcgccggccttgcagccgccaacatcgccatgaaaccctcgccgcacttcccggagatcggaaagaagcctaaagatttgattgctaaggaccacacatttaacatcgcggcttacatctcgtctggagcggatgttattgctgccgcgctccgtaaacatgttgaggaggaagcccgagatctcagcggtgaagcttttttaaggtttatggatcagctctatgagcagatatctagtttactgcagagcaacgatgttaatgaaaatttactggctctccgtgctatcgatgcattaattgatatgccctttggagaaggcgcttccaaagtttctaagtttgccagcttcttgagaaacgtatttgaagtgaagcgcgaccctgaaatcctagttcccgcaagtgaagtgctgggtcatttagcaaaagcgggaggagcaatgactgcagatgaagtggagcggcagattaaaacggctttggggtggcttactggtgaacgagtggaatatcgccgatttgcagctgtactcattctcaaagagatggcagaaaatgcgtcaacagttttcaatgttcatgttcctgagtttgttgatgctatatgggtagcactgagagaccctaaacaagctgttcgtgaaaaagcagttgaagccttgcgcgcttgtctccatgttattgaaaaacgggagacacgttggcgtgtacaatggtattaccggatgtgtgaagccgcacaagttgggcttggcagaaatgcttctgttcatagtattcatggatcattattggccgttggagaattgctgaggaatacaggggagtttatgatgtctcggtacagagaagtggctgatattgtcctcgattatttaaagcatcgagatcagcttgttcgacgtagtataacatcacttcttcctcgaattgcccacttcctgcgtgacagatttgtgactaattacctgaagatttgtatggatcatatcttgtttgttctacgtacaccagacgagcgcgctagtggttttgttgcccttggagagatggctggggctctgggtgttgaacttgtgccttatttaccagcaattacctcacatttgcaagatgcgattgctcctcgcagaggaaggccatctcttgaggcaatttcttgtgtaggaagctttgcaaaagctatgggtcctgcaatggaacctcatattcgtagcggacttctagatgctatgttttttgctggtctttctgataaacttatagatgcactcgagtctataagcacaaggagcgtttattggattgtatatctcaagcactaccaaagtcatcaataaggccaggtgcttctgttggtcgagcaagcaggtcaaacaatttgcaacagtttgtggactctaatagtcctgttcttgtgcaacttgcactgtggactctagcaaacttcaactttaagggccatgaacttctggaattcgctagagagagtgtcatactttatttggaagatgaagatagcagtaccagaaaagctgcctctttgtgctgttgcaaattagttgcacactccctttctgcttcttcagcttcacagttcggttcaaataggacaaatcgtattggaggagctaagcgccgccggcttgtagaggagatagtggagaaacttcttatggctgcagttgctgatgctgatgttggtgttagaagttcagtcttcaaggctttgtatcgaaatccagcttttgatgatttcttggcccaagctgacatcttgacttcaatttttgttgccttaaatgatgaggaatatgatgtcagagaattggcaatttctgttgctggtcgattgtctgaaaagaatcctgcatatgtactgcctgcccttcgtcgctatcttatacaattgctcacatatcttgaccagagtatggatagcaagtgtagagaggaaagtgctagattattgggttgtttaattaggagctgcgcgcggctcattcttccttacattgctccagttcacaaggcgctagtgactagattgtgtgaaggaacgggaccaaatgctaataatgctcttgctgcgggagtgcttgccactgttggagaactggccaaagtgggtggctttgctatgaggcaatatcttcctgagctgatgcctgtagttgtggattctcttttagatggaggtgctgttagtaaaagggaagtggcagtgtcaactctgggacagattatccagagcacaggctatgttattgccccctataatgagtacccgccattgcttggcttactcttgaagttgcttaatggtgaattggaatggtcaactagactagaagtgctgaaggttttagggattatgggtgcattggaccctcacgcacacaagcgaaatcagcacaatctacctggtcagcatagagaggtcctacggccaacaatcgagaccgcacaacatattgtttccatggaagagttaccgactgactactggccttctttttcagcatccgaggactactattcaacagttgcaattagctccctcatgcgaattcttcgagatccttctctttcaagttatcaccaaatggtggttggctcccttatctttatttttaagtcaatgggcctcggctgtgttccatacttaccaaaggttcttcctgatttattccgtgctgttcgcatgtgcgaggatggtgctttaaaagagttcataacctggaaacttggaacattgatatctattgtccggcagcacatccgaaaatatttacaagacatactttccctcatctctgagctgtggacttcctcattcagcttggctgcaccaaatcggaccatacagggcccacagggttcaccggttcttcaccttgtcgagcagctatgcttagctttaaatgatgagttcagaatgtatttacttcacattctaccgagttgtatccaagtcttaggtgacgctgaacgttgcaatgattattactatgttcctgacatattacacacacttgaagtttttggcggaaatttggatgagcacatgcacttggttgctccggtgcttgttcgtttatttaaagtggagctggttgatatcaggcggcgtgcaattgttactttgactaatcttatacctaaggttcaggttggtactcatgtttcggctttagtgcatcatctgaagcttgtcttggatggcaacaatgatgatctgcggaaagatgctgcagaagcgctctgctgcctcgcacatgcccttggagaagactttactatcttcataccatcaatacgcaaaattcttgtgaagcaccacttgcggtacagaaaatgggatgagattgaaaatcggctactgaggcgagagctactcatcactgaaaacttgtctgtgcaaaagtacacacaatgtccacctgatgtcattagagacccccttgatgattgtgatggtacaccttctgagatagctgatgatacacagcgacaagcaagaagtcatcaagtcaatgatgtccggttgcggagtgccggtgaggcttctcaaaggagtactagggaagactgggctgaatggatgagacatttcagtattgcgcttctcaaagagtcaccatctccagctttacgcacctgtgcaaggctagctcagcttcagccttctgttggccgcgagttgtttgctgcaggttttgcaagttgctgggcccaaatgagtgaatcctcccaggaacagctagtgagaagtctcaagacagccttctcatctcagacattcctcctgaaattcttgccacgctgctgaacttagcagaatttatggaacatgatgagaagccacttcctattgatacaagactgcttggtgcacttgctgagaagtgtcgagcatttgcaaaggcactccattataaagaaatggaatttgaagctgtgtgcaccaagaagatgggtgcaaatcctgttacagtggttgaatcccttattcatattaacaatcaactacagcagcatgaggcagctattggcatattgacttactcacagcaaaattcggaagttcaattgaaagaatcatggtatgaaaagttgcaccgttgggatgaggctcttaaagcatacaccgtgaaatcatctcaaacatctggtccctttacaaaacttggatgctacattaggtcgaatgaggtgtctagcagctttggctcggtgggaagatttaagtgcattgtgtagagagcaatggacgggtgcagaaccatctgctcgactggaaatggctccaatggctgcaaatgctgcttggcatatgggtgagtgggaccatatggcagactatgtttctcgcctggatgatgcagatgaaaataagctccgtatgttgggtaacgcaacagctagtggtgacggaagcagtaatggtgctttcttccgggcagttcttttagttcgttacaaaaagtatgatgacgctcggatgtatgttgagcgagctcggcggtgtttagctacagaacttgcagcactggtacttgagagttatgagcgagcgtataataacatggtgcgtgttcaacaactttcagaactggaagaggtgattgattactgcactcttcccatggaaagcccgattgctgacggacggagggaacttattcgcaatatgtggaatgaacggattaaaggaacaaaacggaatgtcgaggtgtggcaagccctacttgctgtcagggagttggttcttccccctaacgaagacagagacacctggataaagttcgctgaactttgctggaagaacggtcgtattagtcaggctagatctacgttagtcaaacttttacagtttgatcctgaatcttcccctgaattgacactgtatcatgcacatccacaagtagctctggcttatctaaaataccagtatgcagttggtgatgagcttaaaaggagggatgcattttctaaactgcaagagttgtctgtgcaggttgctaccaccatgggcaatttacctggaacatcagcaaaccatggcaccatgtcaaatgctggagtaccactcattgctcgtgtctacttgacacttggtagctggaagaaggcactatcacctgcattagatgacgattccattcaagaaattttgatttcttaccataatgccacgctaagtgcaaaggactgggggaaggcctggcacatatgggctttgttcaacacagaagtcatgtcacgctatactttccgaggccgaccagatattgctggaaaatatgttgttgcagcagtaactgggtatttttattctattgcttgtgcatctactacgaaaggggtcgatgatagcttgcaggatatccttcgtctgttaactctttggttcaaccatggggatacctcagaagttcaaacagcgttgcagaaaggtttttcccttgtcaagattgagatgtggctggttgtgctgccccagataattgctaggattcattcgaacaatagagtagttagagaactgatacaatctttgctagttcgaattggaaaggggcatccacaggctttgatgtatcctctcttggttgcctgcaaatcaataagtatattgagacaacgtgcagcgcaggaggtcgttgataagatccgccagcacagtggaggtcttgttgaccaggcacaacttgtgtcgaaggaactgatacgggtagcaattttgtggcatgaaatgtggcatgaggcactcgaggaagctagcaggatgtattttggtgagcacaatatcgaaggaatgcttgctgtacttgagccattgcatgcaatgcttgagaggggggatgagacaattaaagaaaatgccttcattcaggcttatgggcatgaattactggaagctcatgaatgctgtttgaaatatcgggctacaggagaggatgctgagctaactaaggcctgggatttgtattaccatgttttcagaagaatcgacaaacagcttccaagtcttacgaccctcgatctgcactctgtttcgcctgagctactcaaatgtcgaaagttggaacttgctgtgccaggaacttatgctgcagattcaccacttgtgacgattgagtattttgttccccaattgatttgttataacgtccaaacaaaggccaagaaagctgacaattcatggaagtgatggcaatgattatgcattcttgcttaaaggccacgaagatttgcggcaagatgaacgagtaatgcagctttttggtttggtgaatactctcctagagaactcaaggaaaacatcagagaaggatttatcaatccaaagatatgctgttatacctttgtcacctaacagtggtttaattggatgggttccaaactgtgacacacttcatgctctgatccgtgaatacagagatgccaggaagattttcttgaatcaggagcacagacttatgttggcttttgcacccgattatgatcacttacccctcattgcaaaggtggaagtgtttcagcatgctttgcaaaatactgagggaaatgaccttgcgaaggttctgtggctgaagagtcgaacttcggaagtatggcttgagcgccgcacaaactacgctagaagcctggctgttatgagcatggttgggtatttgcttggtttaggagatcggcatccaagcaaccttatgttagatcgctatagtggaaaaatattacacatcgacttcggagattgctttgaggcttcaatgaatcgagaaaagttccctgaaaaagtaccattccgtttgactcgaatgcttgtgaaagctatggaagttagcggtattgagggtacattccgaacaacttgtgaaaatgtgatgcaagtccttcgcacaaacagagacagcgttatggccatgatggaggcatttgtacatgacccgttaatcaattggcgtctgttcaatttcaatgaggttcctcaagtgtcgaactatggtaatgttcatgctcacacggttgtcagtagtgaagaagcagtggctaaccgagagctcatgcaacctcagcgaggagcacgtgagagggaactgctacaggctgtcaatcaactcggtgatgccaatgaggttttgaatgagcgtgctgtagctgtgatggcacggatgagtgacaaactaacagggcgtgacttctcttctgggtcagctttggctggagcaggtagctctatccaacatggcagtgagcatttggcttcaggagatgcccgggatgcccaacctggtctctcagtgaaggttcaggttcagaagctcatactccaagcgacttcacacgaaaatttgtgccaaaactatgtcgggtggtgtccgttctggtgagctctcttggaaacagtagcagtttataacatgtaaatattgtgaataccgtgtgcatagaagtttcgtggtgacagtttgtatgtgcagctttgtaattagcagaacttcaagatgccttggaccatccttttgtcagtttcttagaccgtgtttagcagttcacccttatggccatccaaaacactgtttttgtactgtagattgtattgtttgtagattgtactgttcgcagggtggatttttgaatatgagtataagaatgtgtaagctgttgaagatagccttaggttttcttccgtgccacttgagggtttgttcgattagctctcaatttatgtggattgagtgagatcggattggtttaaatctcaagcaagttaaattttcttcttaatttttctaatctcatcaaatccatgtgtaacgggaataaccgaacaaggtctgactgaaaatgttaagaggg

SEQ ID NO: 202837 - DNA, 8318 bp, Zea Mays
gcgggacccacgtgtcatacaaaggcttctttccctttcttcttcgttcttccgttcaccgttctccgccaccgcggcccaaccgcgccgccgcacagccgcgccgccgccgagccgcgcgttctgcactcttcgcgccatcgctctcctcgcgccgtcgcccggccgcgccgtcgccctcctcggcctgccctgctcgcgtggagcgtccgcgtgagcgagacagggagacggagcaagacggcgtctcggtgggacgagcgcattcggccgatttgagagagcgagctcgtccattcctgcagtgcgcgttcgcatagttaaacccttgacagttcccctgcccccgcctctatccggcgcgccggccttgcagccgccaacatcgccatgaaaccctcgccgcacttcccggagatcggaaagaagcctaaagatttgattgctaaggaccacacatttaacatcgcggcttacatctcgtctggagcggatgttattgctgccgcgctccgtaaacatgttgaggaggaagcccgagatctcagcggtgaagcttttttaaggtttatggatcagctctatgagcagatatctagtttactgcagagcaacgatgttaatgaaaatttactggctctccgtgctatcgatgcattaattgatatgccctttggagaaggcgcttccaaagtttctaagtttgccagcttcttgagaaacgtatttgaagtgaagcgcgaccctgaaatcctagttcccgcaagtgaagtgctgggtcatttagcaaaagcgggaggagcaatgactgcagatgaagtggagcggcagattaaaacggctttggggtggcttactggtgaacgagtggaatatcgccgatttgcagctgtactcattctcaaagagatggcagaaaatgcgtcaacagttttcaatgttcatgttcctgagtttgttgatgctatatgggtagcactgagagaccctaaacaagctgttcgtgaaaaagcagttgaagccttgcgcgcttgtctccatgttattgaaaaacgggagacacgttggcgtgtacaatggtattaccggatgtgtgaagccgcacaagttgggcttggcagaaatgcttctgttcatagtattcatggatcattattggccgttggagaattgctgaggaatacaggggagtttatgatgtctcggtacagagaagtggctgatattgtcctcgattatttaaagcatcgagatcagcttgttcgacgtagtataacatcacttcttcctcgaattgcccacttcctgcgtgacagatttgtgactaattacctgaagatttgtatggatcatatcttgtttgttctacgtacaccagacgagcgcgctagtggttttgttgcccttggagagatggctggggctctgggtgttgaacttgtgccttatttaccagcaattacctcacatttgcaagatgcgattgctcctcgcagaggaaggccatctcttgaggcaatttcttgtgtaggaagctttgcaaaagctatgggtcctgcaatggaacctcatattcgtagcggacttctagatgctatgttttttgctggtctttctgataaacttatagatgcactcgagtctataagcacaagcatcccgtctttactacccacaatacaggagcgtttattggattgtatatctcaagcactaccaaagtcatcaataaggccaggtgcttctgttggtcgagcaagcaggtcaaacaatttgcaacagtttgtggactctaatagtcctgttcttgtgcaacttgcactgtggactctagcaaacttcaactttaagggccatgaacttctggaattcgctagagagagtgtcatactttatttggaagatgaagatagcagtaccagaaaagctgcctctttgtgctgttgcaaattagttgcacactccctttctgcttcttcagcttcacagttcggttcaaataggacaaatcgtattggaggagctaagcgccgccggcttgtagaggagatagtggagaaacttcttatggctgcagttgctgatgctgatgttggtgttagaagttcagtcttcaaggctttgtatcgaaatccagcttttgatgatttcttggcccaagctgacatcttgacttcaatttttgttgccttaaatgatgaggaatatgatgtcagagaattggcaatttctgttgctggtcgattgtctgaaaagaatcctgcatatgtactgcctgcccttcgtcgctatcttatacaattgctcacatatcttgaccagagtatggatagcaagtgtagagaggaaagtgctagattattgggttgtttaattaggagctgcgcgcggctcattcttccttacattgctccagttcacaaggcgctagtgactagattgtgtgaaggaacgggaccaaatgctaataatgctcttgctgcgggagtgcttgccactgttggagaactggccaaagtgggtggctttgctatgaggcaatatcttcctgagctgatgcctgtagttgtggattctcttttagatggaggtgctgttagtaaaagggaagtggcagtgtcaactctgggacagattatccagagcacaggctatgttattgccccctataatgagtacccgccattgcttggcttactcttgaagttgcttaatggtgaattggaatggtcaactagactagaagtgctgaaggttttagggattatgggtgcattggaccctcacgcacacaagcgaaatcagcacaatctacctggtcagcatagagaggtcctacggccaacaatcgagaccgcacaacatattgtttccatggaagagttaccgactgactactggccttctttttcagcatccgaggactactattcaacagttgcaattagctccctcatgcgaattcttcgagatccttctctttcaagttatcaccaaatggtggttggctcccttatctttatttttaagtcaatgggcctcggctgtgttccatacttaccaaaggttcttcctgatttattccgtgctgttcgcatgtgcgaggatggtgctttaaaagagttcataacctggaaacttggaacattgatatctattgtccggcagcacatccgaaaatatttacaagacatactttccctcatctctgagctgtggacttcctcattcagcttggctgcaccaaatcggaccatacagggcccacagggttcaccggttcttcaccttgtcgagcagctatgcttagctttaaatgatgagttcagaatgtatttacttcacattctaccgagttgtatccaagtcttaggtgacgctgaacgttgcaatgattattactatgttcctgacatattacacacacttgaagtttttggcggaaatttggatgagcacatgcacttggttgctccggtgcttgttcgtttatttaaagtggagctggttgatatcaggcggcgtgcaattgttactttgactaatcttatacctaaggttcaggttggtactcatgtttcggctttagtgcatcatctgaagcttgtcttggatggcaacaatgatgatctgcggaaagatgctgcagaagcgctctgctgcctcgcacatgcccttggagaagactttactatcttcataccatcaatacgcaaaattcttgtgaagcaccacttgcggtacagaaaatgggatgagattgaaaatcggctactgaggcgagagctactcatcactgaaaacttgtctgtgcaaaagtacacacaatgtccacctgatgtcattagagacccccttgatgattgtgatggtacaccttctgagatagctgatgatacacagcgacaagcaagaagtcatcaagtcaatgatgtccggttgcggagtgccggtgaggcttctcaaaggagtactagggaagactgggctgaatggatgagacatttcagtattgcgcttctcaaagagtcaccatctccagctttacgcacctgtgcaaggctagctcagcttcagccttctgttggccgcgagttgtttgctgcaggttttgcaagttgctgggcccaaatgagtgaatcctcccaggaacagctagtgagaagtctcaagacagccttctcatctcagacattcctcctgaaattcttgccacgctgctgaacttagcagaatttatggaacatgatgagaagccacttcctattgatacaagactgcttggtgcacttgctgagaagtgtcgagcatttgcaaaggcactccattataaagaaatggaatttgaagctgtgtgcaccaagaagatgggtgcaaatcctgttacagtggttgaatcccttattcatattaacaatcaactacagcagcatgaggcagctattggcatattgacttactcacagcaaaattcggaagttcaattgaaagaatcatggtatgaaaagttgcaccgttgggatgaggctcttaaagcatacaccgtgaaatcatctcaaacatctggtccctttacaaaacttggatgctacattaggtcgaatgaggtgtctagcagctttggctcggtgggaagatttaagtgcattgtgtagagagcaatggacgggtgcagaaccatctgctcgactggaaatggctccaatggctgcaaatgctgcttggcatatgggtgagtgggaccatatggcagactatgtttctcgcctggatgatgcagatgaaaataagctccgtatgttgggtaacgcaacagctagtggtgacggaagcagtaatggtgctttcttccgggcagttcttttagttcgttacaaaaagtatgatgacgctcggatgtatgttgagcgagctcggcggtgtttagctacagaacttgcagcactggtacttgagagttatgagcgagcgtataataacatggtgcgtgttcaacaactttcagaactggaagaggtgattgattactgcactcttcccatggaaagcccgattgctgacggacggagggaacttattcgcaatatgtggaatgaacggattaaaggaacaaaacggaatgtcgaggtgtggcaagccctacttgctgtcagggagttggttcttccccctaacgaagacagagacacctggataaagttcgctgaactttgctggaagaacggtcgtattagtcaggctagatctacgttagtcaaacttttacagtttgatcctgaatcttcccctgaattgacactgtatcatgcacatccacaagtagctctggcttatctaaaataccagtatgcagttggtgatgagcttaaaaggagggatgcattttctaaactgcaagagttgtctgtgcaggttgctaccaccatgggcaatttacctggaacatcagcaaaccatggcaccatgtcaaatgctggagtaccactcattgctcgtgtctacttgacacttggtagctggaagaaggcactatcacctgcattagatgacgattccattcaagaaattttgatttcttaccataatgccacgctaagtgcaaaggactgggggaaggcctggcacatatgggctttgttcaacacagaagtcatgtcacgctatactttccgaggccgaccagatattgctggaaaatatgttgttgcagcagtaactgggtatttttattctattgcttgtgcatctactacgaaaggggtcgatgatagcttgcagctttactttgaccaaaggaaaaataactcggccggggagggaaagaccgccctcccggatatccttcgtctgttaactctttggttcaaccatggggatacctcagaagttcaaacagcgttgcagaaaggtttttcccttgtcaagattgagatgtggctggttgtgctgccccagataattgctaggattcattcgaacaatagagtagttagagaactgatacaatctttgctagttcgaattggaaaggggcatccacaggctttgatgtatcctctcttggttgcctgcaaatcaataagtatattgagacaacgtgcagcgcaggaggtcgttgataagatccgccagcacagtggaggtcttgttgaccaggcacaacttgtgtcgaaggaactgatacgggtagcaattttgtggcatgaaatgtggcatgaggcactcgaggaagctagcaggatgtattttggtgagcacaatatcgaaggaatgcttgctgtacttgagccattgcatgcaatgcttgagaggggggatgagacaattaaagaaaatgccttcattcaggcttatgggcatgaattactggaagctcatgaatgctgtttgaaatatcgggctacaggagaggatgctgagctaactaaggcctgggatttgtattaccatgttttcagaagaatcgacaaacagcttccaagtcttacgaccctcgatctgcactctgtttcgcctgagctactcaaatgtcgaaagttggaacttgctgtgccaggaacttatgctgcagattcaccacttgtgacgattgagtattttgttccccaattgatttgttataacgtccaaacaaaggccaagaaagctgacaattcatggaagtgatggcaatgattatgcattcttgcttaaaggccacgaagatttgcggcaagatgaacgagtaatgcagctttttggtttggtgaatactctcctagagaactcaaggaaaacatcagagaaggatttatcaatccaaagatatgctgttatacctttgtcacctaacagtggtttaattggatgggttccaaactgtgacacacttcatgctctgatccgtgaatacagagatgccaggaagattttcttgaatcaggagcacagacttatgttggcttttgcacccgattatgatcacttacccctcattgcaaaggtggaagtgtttcagcatgctttgcaaaatactgagggaaatgaccttgcgaaggttctgtggctgaagagtcgaacttcggaagtatggcttgagcgccgcacaaactacgctagaagcctggctgttatgagcatggttgggtatttgcttggtttaggagatcggcatccaagcaaccttatgttagatcgctatagtggaaaaatattacacatcgacttcggagattgctttgaggcttcaatgaatcgagaaaagttccctgaaaaagtaccattccgtttgactcgaatgcttgtgaaagctatggaagttagcggtattgagggtacattccgaacaacttgtgaaaatgtgatgcaagtccttcgcacaaacagagacagcgttatggccatgatggaggcatttgtacatgacccgttaatcaattggcgtctgttcaatttcaatgaggttcctcaagtgtcgaactatggtaatgttcatgctcacacggttgtcagtagtgaagaagcagtggctaaccgagagctcatgcaacctcagcgaggagcacgtgagagggaactgctacaggctgtcaatcaactcggtgatgccaatgaggttttgaatgagcgtgctgtagctgtgatggcacggatgagtgacaaactaacagggcgtgacttctcttctgggtcagctttggctggagcaggtagctctatccaacatggcagtgagcatttggcttcaggagatgcccgggatgcccaacctggtctctcagtgaaggttcaggttcagaagctcatactccaagcgacttcacacgaaaatttgtgccaaaactatgtcgggtggtgtccgttctggtgagctctcttggaaacagtagcagtttataacatgtaaatattgtgaataccgtgtgcatagaagtttcgtggtgacagtttgtatgtgcagctttgtaattagcagaacttcaagatgccttggaccatccttttgtcagtttcttagaccgtgtttagcagttcacccttatggccatccaaaacactgtttttgtactgtagattgtattgtttgtagattgtactgttcgcagggtggatttttgaatatgagtataagaatgtgtaagctgttgaagatagccttaggttttcttccgtgccacttgagggtttgttcgattagctctcaatttatgtggattgagtgagatcggattggtttaaatctcaagcaagttaaattttcttcttaatttttctaatctcatcaaatccatgtgtaacgggaataaccgaacaaggtctgactgaaaatgttaagaggg

SEQ ID NO: 202838 - DNA, 8119 bp, Zea Mays
gcgggacccacgtgtcatacaaaggcttctttccctttcttcttcgttcttccgttcaccgttctccgccaccgcggcccaaccgcgccgccgcacagccgcgccgccgccgagccgcgcgttctgcactcttcgcgccatcgctctcctcgcgccgtcgcccggccgcgccgtcgccctcctcggcctgccctgctcgcgtggagcgtccgcgtgagcgagacagggagacggagcaagacggcgtctcggtgggacgagcgcattcggccgatttgagagagcgagctcgtccattcctgcagtgcgcgttcgcatagttaaacccttgacagttcccctgcccccgcctctatccggcgcgccggccttgcagccgccaacatcgccatgaaaccctcgccgcacttcccggagatcggaaagaagcctaaagatttgattgctaaggaccacacatttaacatcgcggcttacatctcgtctggagcggatgttattgctgccgcgctccgtaaacatgttgaggaggaagcccgagatctcagcggtgaagcttttttaaggtttatggatcagctctatgagcagatatctagtttactgcagagcaacgatgttaatgaaaatttactggctctccgtgctatcgatgcattaattgatatgccctttggagaaggcgcttccaaagtttctaagtttgccagcttcttgagaaacgtatttgaagtgaagcgcgaccctgaaatcctagttcccgcaagtgaagtgctgggtcatttagcaaaagcgggaggagcaatgactgcagatgaagtggagcggcagattaaaacggctttggggtggcttactggtgaacgagtggaatatcgccgatttgcagctgtactcattctcaaagagatggcagaaaatgcgtcaacagttttcaatgttcatgttcctgagtttgttgatgctatatgggtagcactgagagaccctaaacaagctgttcgtgaaaaagcagttgaagccttgcgcgcttgtctccatgttattgaaaaacgggagacacgttggcgtgtacaatggtattaccggatgtgtgaagccgcacaagttgggcttggcagaaatgcttctgttcatagtattcatggatcattattggccgttggagaattgctgaggaatacaggggagtttatgatgtctcggtacagagaagtggctgatattgtcctcgattatttaaagcatcgagatcagcttgttcgacgtagtataacatcacttcttcctcgaattgcccacttcctgcgtgacagatttgtgactaattacctgaagatttgtatggatcatatcttgtttgttctacgtacaccagacgagcgcgctagtggttttgttgcccttggagagatggctggggctctgggtgttgaacttgtgccttatttaccagcaattacctcacatttgcaagatgcgattgctcctcgcagaggaaggccatctcttgaggcaatttcttgtgtaggaagctttgcaaaagctatgggtcctgcaatggaacctcatattcgtagcggacttctagatgctatgttttttgctggtctttctgataaacttatagatgcactcgagtctataagcacaagcatcccgtctttactacccacaatacaggagcgtttattggattgtatatctcaagcactaccaaagtcatcaataaggccaggtgcttctgttggtcgagcaagcaggtcaaacaatttgcaacagtttgtggactctaatagtcctgttcttgtgcaacttgcactgtggactctagcaaacttcaactttaagggccatgaacttctggaattcgctagagagagtgtcatactttatttggaagatgaagatagcagtaccagaaaagctgcctctttgtgctgttgcaaattagttgcacactccctttctgcttcttcagcttcacagttcggttcaaataggacaaatcgtattggaggagctaagcgccgccggcttgtagaggagatagtggagaaacttcttatggctgcagttgctgatgctgatgttggtgttagaagttcagtcttcaaggctttgtatcgaaatccagcttttgatgatttcttggcccaagctgacatcttgacttcaatttttgttgccttaaatgatgaggaatatgatgtcagagaattggcaatttctgttgctggtcgattgtctgaaaagaatcctgcatatgtactgcctgcccttcgtcgctatcttatacaattgctcacatatcttgaccagagtatggatagcaagtgtagagaggaaagtgctagattattgggttgtttaattaggagctgcgcgcggctcattcttccttacattgctccagttcacaaggcgctagtgactagattgtgtgaaggaacgggaccaaatgctaataatgctcttgctgcgggagtgcttgccactgttggagaactggccaaagtgggtggctttgctatgaggcaatatcttcctgagctgatgcctgtagttgtggattctcttttagatggaggtgctgttagtaaaagggaagtggcagtgtcaactctgggacagattatccagagcacaggctatgttattgccccctataatgagtacccgccattgcttggcttactcttgaagttgcttaatggtgaattggaatggtcaactagactagaagtgctgaaggttttagggattatgggtgcattggaccctcacgcacacaagcgaaatcagcacaatctacctggtcagcatagagaggtcctacggccaacaatcgagaccgcacaacatattgtttccatggaagagttaccgactgactactggccttctttttcagcatccgaggactactattcaacagttgcaattagctccctcatgcgaattcttcgagatccttctctttcaagttatcaccaaatggtggttggctcccttatctttatttttaagtcaatgggcctcggctgtgttccatacttaccaaaggttcttcctgatttattccgtgctgttcgcatgtgcgaggatggtgctttaaaagagttcataacctggaaacttggaacattgatatctattgtccggcagcacatccgaaaatatttacaagacatactttccctcatctctgagctgtggacttcctcattcagcttggctgcaccaaatcggaccatacagggcccacagggttcaccggttcttcaccttgtcgagcagctatgcttagctttaaatgatgagttcagaatgtatttacttcacattctaccgagttgtatccaagtcttaggtgacgctgaacgttgcaatgattattactatgttcctgacatattacacacacttgaagtttttggcggaaatttggatgagcacatgcacttggttgctccggtgcttgttcgtttatttaaagtggagctggttgatatcaggcggcgtgcaattgttactttgactaatcttatacctaaggttcaggttggtactcatgtttcggctttagtgcatcatctgaagcttgtcttggatggcaacaatgatgatctgcggaaagatgctgcagaagcgctctgctgcctcgcacatgcccttggagaagactttactatcttcataccatcaatacgcaaaattcttgtgaagcaccacttgcggtacagaaaatgggatgagattgaaaatcggctactgaggcgagagctactcatcactgaaaacttgtctgtgcaaaagtacacacaatgtccacctgatgtcattagagacccccttgatgattgtgatggtacaccttctgagatagctgatgatacacagcgacaagcaagaagtcatcaagtcaatgatgtccggttgcggagtgccggtgaggcttctcaaaggagtactagggaagactgggctgaatggatgagacatttcagtattgcgcttctcaaagagtcaccatctccagctttacgcacctgtgcaaggctagctcagcttcagccttctgttggccgcgagttgtttgctgcaggttttgcaagttgctgggcccaaatgagtgaatcctcccaggaacagctagtgagaagtctcaagacagccttctcatctcagacattcctcctgaaattcttgccacgctgctgaacttagcagaatttatggaacatgatgagaagccacttcctattgatacaagactgcttggtgcacttgctgagaagtgtcgagcatttgcaaaggcactccattataaagaaatggaatttgaagctgtgtgcaccaagaagatgggtgcaaatcctgttacagtggttgaatcccttattcatattaacaatcaactacagcagcatgaggcagctattggcatattgacttactcacagcaaaattcggaagttcaattgaaagaatcatggtatgaaaagttgcaccgttgggatgaggctcttaaagcatacaccgtgaaatcatctcaaacatctggtccctttacaaaacttggatgctacattaggtcgaatgaggtgtctagcagctttggctcggtgggaagatttaagtgcattgtgtagagagcaatggacgggtgcagaaccatctgctcgactggaaatggctccaatggctgcaaatgctgcttggcatatgggtgagtgggaccatatggcagactatgtttctcgcctggatgatgcagatgaaaataagctccgtatgttgggtaacgcaacagctagtggtgacggaagcagtaatggtgctttcttccgggcagttcttttagttcgttacaaaaagtatgatgacgctcggatgtatgttgagcgagctcggcggtgtttagctacagaacttgcagcactggtacttgagagttatgagcgagcgtataataacatggtgcgtgttcaacaactttcagaactggaagaggtgattgattactgcactcttcccatggaaagcccgattgctgacggacggagggaacttattcgcaatatgtggaatgaacggattaaaggaacaaaacggaatgtcgaggtgtggcaagccctacttgctgtcagggagttggttcttccccctaacgaagacagagacacctggataaagttcgctgaactttgctggaagaacggtcgtattagtcaggctagatctacgttagtcaaacttttacagtttgatcctgaatcttcccctgaattgacactgtatcatgcacatccacaagtagctctggcttatctaaaataccagtatgcagttggtgatgagcttaaaaggagggatgcattttctaaactgcaagagttgtctgtgcaggttgctaccaccatgggcaatttacctggaacatcagcaaaccatggcaccatgtcaaatgctggagtaccactcattgctcgtgtctacttgacacttggtagctggaagaaggcactatcacctgcattagatgacgattccattcaagaaattttgatttcttaccataatgccacgctaagtgcaaaggactgggggaaggcctggcacatatgggctttgttcaacacagaagtcatgtcacgctatactttccgaggccgaccagatattgctggaaaatatgttgttgcagcagtaactgggtatttttattctattgcttgtgcatctactacgaaaggggtcgatgatagcttgcaggatatccttcgtctgttaactctttggttcaaccatggggatacctcagaagttcaaacagcgttgcagaaaggtttttcccttgtcaagattgagatgtggctggttgtgctgccccagataattgctaggattcattcgaacaatagagtagttagagaactgatacaatctttgctagttcgaattggaaaggggcatccacaggctttgatgtatcctctcttggttgcctgcaaatcaataagtatattgagacaacgtgcagcgcaggaggtcgttgataagatccgccagcacagtggaggtcttgttgaccaggcacaacttgtgtcgaaggaactgatacgggtagcaattttgtggcatgaaatgtggcatgaggcactcgaggaagctagcaggatgtattttggtgagcacaatatcgaaggaatgcttgctgtacttgagccattgcatgcaatgcttgagaggggggatgagacaattaaagaaaatgccttcattcaggcttatgggcatgaattactggaagctcatgaatgctgtttgaaatatcgggctacaggagaggatgctgagctaactaaggcctgggatttgtattaccatgttttcagaagaatcgacaaacagcttccaagtcttacgaccctcgatctgcactctgtttcgcctgagctactcaaatgtcgaaagttggaacttgctgtgccaggaacttatgctgcagattcaccacttgtgacgattgagtattttgttccccaattgatttgttataacgtccaaacaaaggccaagaaagctgacaattcatggaagtgatggcaatgattatgcattcttgcttaaaggccacgaagatttgcggcaagatgaacgagtaatgcagctttttggtttggtgaatactctcctagagaactcaaggaaaacatcagagaaggatttatcaatccaaagatatgctgttatacctttgtcacctaacagtggtttaattggatgggttccaaactgtgacacacttcatgctctgatccgtgaatacagagatgccaggaagattttcttgaatcaggagcacagacttatgttggcttttgcacccgattatgatcacttacccctcattgcaaaggtggaagtgtttcagcatgctttgcaaaatactgagggaaatgaccttgcgaaggttctgtggctgaagagtcgaacttcggaagtatggcttgagcgccgcacaaactacgctagaagcctggctgttatgagcatggttgggtatttgcttggtttaggagatcggcatccaagcaaccttatgttagatcgctatagtggaaaaatattacacatcgacttcggagattgctttgaggcttcaatgaatcgagaaaagttccctgaaaaagtaccattccgtttgactcgaatgcttgtgaaagctatggaagttagcggtattgagggtacattccgaacaacttgtgaaaatgtgatgcaagtccttcgcacaaacagagacagcgttatggccatgatggaggcatttgtacatgacccgttaatcaattggcgtctgttcaatttcaatgaggttcctcaagtgtcgaactatggtaatgttcatgctcacacggttgtcagtagtgaagaagcagtggctaaccgagagctcatgcaacctcagcgaggagcacgtgagagggaactgctacaggctgtcaatcaactcggtgatgccaatgaggttttgaatgagcgtgctgtagctgtgatggcacggatgagtgacaaactaacagggcgtgacttctcttctgggtcagctttggctggagcaggtggtgtccgttctggtgagctctcttggaaacagtagcagtttataacatgtaaatattgtgaataccgtgtgcatagaagtttcgtggtgacagtttgtatgtgcagctttgtaattagcagaacttcaagatgccttggaccatccttttgtcagtttcttagaccgtgtttagcagttcacccttatggccatccaaaacactgtttttgtactgtagattgtattgtttgtagattgtactgttcgcagggtggatttttgaatatgagtataagaatgtgtaagctgttgaagatagccttaggttttcttccgtgccacttgagggtttgttcgattagctctcaatttatgtggattgagtgagatcggattggtttaaatctcaagcaagttaaattttcttcttaatttttctaatctcatcaaatccatgtgtaacgggaataaccgaacaaggtctgactgaaaatgttaagaggg

SEQ ID NO: 202839 - DNA, 8262 bp, Zea Mays
gcgggacccacgtgtcatacaaaggcttctttccctttcttcttcgttcttccgttcaccgttctccgccaccgcggcccaaccgcgccgccgcacagccgcgccgccgccgagccgcgcgttctgcactcttcgcgccatcgctctcctcgcgccgtcgcccggccgcgccgtcgccctcctcggcctgccctgctcgcgtggagcgtccgcgtgagcgagacagggagacggagcaagacggcgtctcggtgggacgagcgcattcggccgatttgagagagcgagctcgtccattcctgcagtgcgcgttcgcatagttaaacccttgacagttcccctgcccccgcctctatccggcgcgccggccttgcagccgccaacatcgccatgaaaccctcgccgcacttcccggagatcggaaagaagcctaaagatttgattgctaaggaccacacatttaacatcgcggcttacatctcgtctggagcggatgttattgctgccgcgctccgtaaacatgttgaggaggaagcccgagatctcagcggtgaagcttttttaaggtttatggatcagctctatgagcagatatctagtttactgcagagcaacgatgttaatgaaaatttactggctctccgtgctatcgatgcattaattgatatgccctttggagaaggcgcttccaaagtttctaagtttgccagcttcttgagaaacgtatttgaagtgaagcgcgaccctgaaatcctagttcccgcaagtgaagtgctgggtcatttagcaaaagcgggaggagcaatgactgcagatgaagtggagcggcagattaaaacggctttggggtggcttactggtgaacgagtggaatatcgccgatttgcagctgtactcattctcaaagagatggcagaaaatgcgtcaacagttttcaatgttcatgttcctgagtttgttgatgctatatgggtagcactgagagaccctaaacaagctgttcgtgaaaaagcagttgaagccttgcgcgcttgtctccatgttattgaaaaacgggagacacgttggcgtgtacaatggtattaccggatgtgtgaagccgcacaagttgggcttggcagaaatgcttctgttcatagtattcatggatcattattggccgttggagaattgctgaggaatacaggggagtttatgatgtctcggtacagagaagtggctgatattgtcctcgattatttaaagcatcgagatcagcttgttcgacgtagtataacatcacttcttcctcgaattgcccacttcctgcgtgacagatttgtgactaattacctgaagatttgtatggatcatatcttgtttgttctacgtacaccagacgagcgcgctagtggttttgttgcccttggagagatggctggggctctgggtgttgaacttgtgccttatttaccagcaattacctcacatttgcaagatgcgattgctcctcgcagaggaaggccatctcttgaggcaatttcttgtgtaggaagctttgcaaaagctatgggtcctgcaatggaacctcatattcgtagcggacttctagatgctatgttttttgctggtctttctgataaacttatagatgcactcgagtctataagcacaagcatcccgtctttactacccacaatacaggagcgtttattggattgtatatctcaagcactaccaaagtcatcaataaggccaggtgcttctgttggtcgagcaagcaggtcaaacaatttgcaacagtttgtggactctaatagtcctgttcttgtgcaacttgcactgtggactctagcaaacttcaactttaagggccatgaacttctggaattcgctagagagagtgtcatactttatttggaagatgaagatagcagtaccagaaaagctgcctctttgtgctgttgcaaattagttgcacactccctttctgcttcttcagcttcacagttcggttcaaataggacaaatcgtattggaggagctaagcgccgccggcttgtagaggagatagtggagaaacttcttatggctgcagttgctgatgctgatgttggtgttagaagttcagtcttcaaggctttgtatcgaaatccagcttttgatgatttcttggcccaagctgacatcttgacttcaatttttgttgccttaaatgatgaggaatatgatgtcagagaattggcaatttctgttgctggtcgattgtctgaaaagaatcctgcatatgtactgcctgcccttcgtcgctatcttatacaattgctcacatatcttgaccagagtatggatagcaagtgtagagaggaaagtgctagattattgggttgtttaattaggagctgcgcgcggctcattcttccttacattgctccagttcacaaggcgctagtgactagattgtgtgaaggaacgggaccaaatgctaataatgctcttgctgcgggagtgcttgccactgttggagaactggccaaagtggggtggctttgctatgaggcaatatcttcctgagctgatgcctgtagttgtggattctcttttagatggaggtgctgttagtaaaagggaagtggcagtgtcaactctgggacagattatccagagcacaggctatgttattgccccctataatgagtacccgccattgcttggcttactcttgaagttgcttaatggtgaattggaatggtcaactagactagaagtgctgaaggttttagggattatgggtgcattggaccctcacgcacacaagcgaaatcagcacaatctacctggtcagcatagagaggtcctacggccaacaatcgagaccgcacaacatattgtttccatggaagagttaccgactgactactggccttctttttcagcatccgaggactactattcaacagttgcaattagctccctcatgcgaattcttcgagatccttctctttcaagttatcaccaaatggtggttggctcccttatctttatttttaagtcaatgggcctcggctgtgttccatacttaccaaaggttcttcctgatttattccgtgctgttcgcatgtgcgaggatggtgctttaaaagagttcataacctggaaacttggaacattgatatctattgtccggcagcacatccgaaaatatttacaagacatactttccctcatctctgagctgtggacttcctcattcagcttggctgcaccaaatcggaccatacagggcccacagggttcaccggttcttcaccttgtcgagcagctatgcttagctttaaatgatgagttcagaatgtatttacttcacattctaccgagttgtatccaagtcttaggtgacgctgaacgttgcaatgattattactatgttcctgacatattacacacacttgaagtttttggcggaaatttggatgagcacatgcacttggttgctccggtgcttgttcgtttatttaaagtggagctggttgatatcaggcggcgtgcaattgttactttgactaatcttatacctaaggttcaggttggtactcatgtttcggctttagtgcatcatctgaagcttgtcttggatggcaacaatgatgatctgcggaaagatgctgcagaagcgctctgctgcctcgcacatgcccttggagaagactttactatcttcataccatcaatacgcaaaattcttgtgaagcaccacttgcggtacagaaaatgggatgagattgaaaatcggctactgaggcgagagctactcatcactgaaaacttgtctgtgcaaaagtacacacaatgtccacctgatgtcattagagacccccttgatgattgtgatggtacaccttctgagatagctgatgatacacagcgacaagcaagaagtcatcaagtcaatgatgtccggttgcggagtgccggtgaggcttctcaaaggagtactagggaagactgggctgaatggatgagacatttcagtattgcgcttctcaaagagtcaccatctccagctttacgcacctgtgcaaggctagctcagcttcagccttctgttggccgcgagttgtttgctgcaggttttgcaagttgctgggcccaaatgagtgaatcctcccaggaacagctagtgagaagtctcaagacagccttctcatctcagacattcctcctgaaattcttgccacgctgctgaacttagcagaatttatggaacatgatgagaagccacttcctattgatacaagactgcttggtgcacttgctgagaagtgtcgagcatttgcaaaggcactccattataaagaaatggaatttgaagctgtgtgcaccaagaagatgggtgcaaatcctgttacagtggttgaatcccttattcatattaacaatcaactacagcagcatgaggcagctattggcatattgacttactcacagcaaaattcggaagttcaattgaaagaatcatggtatgaaaagttgcaccgttgggatgaggctcttaaagcatacaccgtgaaatcatctcaaacatctggtccctttacaaaacttggatgctacattaggtcgaatgaggtgtctagcagctttggctcggtgggaagatttaagtgcattgtgtagagagcaatggacgggtgcagaaccatctgctcgactggaaatggctccaatggctgcaaatgctgcttggcatatgggtgagtgggaccatatggcagactatgtttctcgcctggatgatgcagatgaaaataagctccgtatgttgggtaacgcaacagctagtggtgacggaagcagtaatggtgctttcttccgggcagttcttttagttcgttacaaaaagtatgatgacgctcggatgtatgttgagcgagctcggcggtgtttagctacagaacttgcagcactggtacttgagagttatgagcgagcgtataataacatggtgcgtgttcaacaactttcagaactggaagaggtgattgattactgcactcttcccatggaaagcccgattgctgacggacggagggaacttattcgcaatatgtggaatgaacggattaaaggaacaaaacggaatgtcgaggtgtggcaagccctacttgctgtcagggagttggttcttccccctaacgaagacagagacacctggataaagttcgctgaactttgctggaagaacggtcgtattagtcaggctagatctacgttagtcaaacttttacagtttgatcctgaatcttcccctgaattgacactgtatcatgcacatccacaagtagctctggcttatctaaaataccagtatgcagttggtgatgagcttaaaaggagggatgcattttctaaactgcaagagttgtctgtgcaggttgctaccaccatgggcaatttacctggaacatcagcaaaccatggcaccatgtcaaatgctggagtaccactcattgctcgtgtctacttgacacttggtagctggaagaaggcactatcacctgcattagatgacgattccattcaagaaattttgatttcttaccataatgccacgctaagtgcaaaggactgggggaaggcctggcacatatgggctttgttcaacacagaagtcatgtcacgctatactttccgaggccgaccagatattgctggaaaatatgttgttgcagcagtaactgggtatttttattctattgcttgtgcatctactacgaaaggggtcgatgatagcttgcaggatatccttcgtctgttaactctttggttcaaccatggggatacctcagaagttcaaacagcgttgcagaaaggtttttcccttgtcaagattgagatgtggctggttgtgctgccccagataattgctaggattcattcgaacaatagagtagttagagaactgatacaatctttgctagttcgaattggaaaggggcatccacaggctttgatgtatcctctcttggttgcctgcaaatcaataagtatattgagacaacgtgcagcgcaggaggtcgttgataagatccgccagcacagtggaggtcttgttgaccaggcacaacttgtgtcgaaggaactgatacgggtagcaattttgtggcatgaaatgtggcatgaggcactcgaggaagctagcaggatgtattttggtgagcacaatatcgaaggaatgcttgctgtacttgagccattgcatgcaatgcttgagaggggggatgagacaattaaagaaaatgccttcattcaggcttatgggcatgaattactggaagctcatgaatgctgtttgaaatatcgggctacaggagaggatgctgagctaactaaggcctgggatttgtattaccatgttttcagaagaatcgacaaacagcttccaagtcttacgaccctcgatctgcactctgtttcgcctgagctactcaaatgtcgaaagttggaacttgctgtgccaggaacttatgctgcagattcaccacttgtgacgattgagtattttgttccccaattgatttgttataacgtccaaacaaaggccaagaaagctgacaattcatggaagtgatggcaatgattatgcattcttgcttaaaggccacgaagatttgcggcaagatgaacgagtaatgcagctttttggtttggtgaatactctcctagagaactcaaggaaaacatcagagaaggatttatcaatccaaagatatgctgttatacctttgtcacctaacagtggtttaattggatgggttccaaactgtgacacacttcatgctctgatccgtgaatacagagatgccaggaagattttcttgaatcaggagcacagacttatgttggcttttgcacccgattatgatcacttacccctcattgcaaaggtggaagtgtttcagcatgctttgcaaaatactgagggaaatgaccttgcgaaggttctgtggctgaagagtcgaacttcggaagtatggcttgagcgccgcacaaactacgctagaagcctggctgttatgagcatggttgggtatttgcttggtttaggagatcggcatccaagcaaccttatgttagatcgctatagtggaaaaatattacacatcgacttcggagattgctttgaggcttcaatgaatcgagaaaagttccctgaaaaagtaccattccgtttgactcgaatgcttgtgaaagctatggaagttagcggtattgagggtacattccgaacaacttgtgaaaatgtgatgcaagtccttcgcacaaacagagacagcgttatggccatgatggaggcatttgtacatgacccgttaatcaattggcgtctgttcaatttcaatgaggttcctcaagtgtcgaactatggtaatgttcatgctcacacggttgtcagtagtgaagaagcagtggctaaccgagagctcatgcaacctcagcgaggagcacgtgagagggaactgctacaggctgtcaatcaactcggtgatgccaatgaggttttgaatgagcgtgctgtagctgtgatggcacggatgagtgacaaactaacagggcgtgacttctcttctgggtcagctttggctggagcaggtagctctatccaacatggcagtgagcatttggcttcaggagatgcccgggatgcccaacctggtctctcagtgaaggttcaggttcagaagctcatactccaagcgacttcacacgaaaatttgtgccaaaactatgtcgggtggtgtccgttctggtgagctctcttggaaacagtagcagtttataacatgtaaatattgtgaataccgtgtgcatagaagtttcgtggtgacagtttgtatgtgcagctttgtaattagcagaacttcaagatgccttggaccatccttttgtcagtttcttagaccgtgtttagcagttcacccttatggccatccaaaacactgtttttgtactgtagattgtattgtttgtagattgtactgttcgcagggtggatttttgaatatgagtataagaatgtgtaagctgttgaagatagccttaggttttcttccgtgccacttgagggtttgttcgattagctctcaatttatgtggattgagtgagatcggattggtttaaatctcaagcaagttaaattttcttcttaatttttctaatctcatcaaatccatgtgtaacgggaataaccgaacaaggtctgactgaaaatgttaagaggg

SEQ ID NO: 202840 - DNA, 8182 bp, Zea Mays
gcgggacccacgtgtcatacaaaggcttctttccctttcttcttcgttcttccgttcaccgttctccgccaccgcggcccaaccgcgccgccgcacagccgcgccgccgccgagccgcgcgttctgcactcttcgcgccatcgctctcctcgcgccgtcgcccggccgcgccgtcgccctcctcggcctgccctgctcgcgtggagcgtccgcgtgagcgagacagggagacggagcaagacggcgtctcggtgggacgagcgcattcggccgatttgagagagcgagctcgtccattcctgcagtgcgcgttcgcatagttaaacccttgacagttcccctgcccccgcctctatccggcgcgccggccttgcagccgccaacatcgccatgaaaccctcgccgcacttcccggagatcggaaagaagcctaaagatttgattgctaaggaccacacatttaacatcgcggcttacatctcgtctggagcggatgttattgctgccgcgctccgtaaacatgttgaggaggaagcccgagatctcagcggtgaagcttttttaaggtttatggatcagctctatgagcagatatctagtttactgcagagcaacgatgttaatgaaaatttactggctctccgtgctatcgatgcattaattgatatgccctttggagaaggcgcttccaaagtttctaagtttgccagcttcttgagaaacgtatttgaagtgaagcgcgaccctgaaatcctagttcccgcaagtgaagtgctgggtcatttagcaaaagcgggaggagcaatgactgcagatgaagtggagcggcagattaaaacggctttggggtggcttactggtgaacgagtggaatatcgccgatttgcagctgtactcattctcaaagagatggcagaaaatgcgtcaacagttttcaatgttcatgttcctgagtttgttgatgctatatgggtagcactgagagaccctaaacaagctgttcgtgaaaaagcagttgaagccttgcgcgcttgtctccatgttattgaaaaacgggagacacgttggcgtgtacaatggtattaccggatgtgtgaagccgcacaagttgggcttggcagaaatgcttctgttcatagtattcatggatcattattggccgttggagaattgctgaggaatacaggggagtttatgatgtctcggtacagagaagtggctgatattgtcctcgattatttaaagcatcgagatcagcttgttcgacgtagtataacatcacttcttcctcgaattgcccacttcctgcgtgacagatttgtgactaattacctgaagatttgtatggatcatatcttgtttgttctacgtacaccagacgagcgcgctagtggttttgttgcccttggagagatggctggggctctgggtgttgaacttgtgccttatttaccagcaattacctcacatttgcaagatgcgattgctcctcgcagaggaaggccatctcttgaggcaatttcttgtgtaggaagctttgcaaaagctatgggtcctgcaatggaacctcatattcgtagcggacttctagatgctatgttttttgctggtctttctgataaacttatagatgcactcgagtctataagcacaagcatcccgtctttactacccacaatacaggagcgtttattggattgtatatctcaagcactaccaaagtcatcaataaggccaggtgcttctgttggtcgagcaagcaggtcaaacaatttgcaacagtttgtggactctaatagtcctgttcttgtgcaacttgcactgtggactctagcaaacttcaactttaagggccatgaacttctggaattcgctagagagagtgtcatactttatttggaagatgaagatagcagtaccagaaaagctgcctctttgtgctgttgcaaattagttgcacactccctttctgcttcttcagcttcacagttcggttcaaataggacaaatcgtattggaggagctaagcgccgccggcttgtagaggagatagtggagaaacttcttatggctgcagttgctgatgctgatgttggtgttagaagttcagtcttcaaggctttgtatcgaaatccagcttttgatgatttcttggcccaagctgacatcttgacttcaatttttgttgccttaaatgatgaggaatatgatgtcagagaattggcaatttctgttgctggtcgattgtctgaaaagaatcctgcatatgtactgcctgcccttcgtcgctatcttatacaattgctcacatatcttgaccagagtatggatagcaagtgtagagaggaaagtgctagattattgggttgtttaattaggagctgcgcgcggctcattcttccttacattgctccagttcacaaggcgctagtgactagattgtgtgaaggaacgggaccaaatgctaataatgctcttgctgcgggagtgcttgccactgttggagaactggccaaagtgggtggctttgctatgaggcaatatcttcctgagctgatgcctgtagttgtggattctcttttagatggaggtgctgttagtaaaagggaagtggcagtgtcaactctgggacagattatccagagcacaggctatgttattgccccctataatgagtacccgccattgcttggcttactcttgaagttgcttaatggtgaattggaatggtcaactagactagaagtgctgaaggttttagggattatgggtgcattggaccctcacgcacacaagcgaaatcagcacaatctacctggtcagcatagagaggtcctacggccaacaatcgagaccgcacaacatattgtttccatggaagagttaccgactgactactggccttctttttcagcatccgaggactactattcaacagttgcaattagctccctcatgcgaattcttcgagatccttctctttcaagttatcaccaaatggtggttggctcccttatctttatttttaagtcaatgggcctcggctgtgttccatacttaccaaaggttcttcctgatttattccgtgctgttcgcatgtgcgaggatggtgctttaaaagagttcataacctggaaacttggaacattgatatctattgtccggcagcacatccgaaaatatttacaagacatactttccctcatctctgagctgtggacttcctcattcagcttggctgcaccaaatcggaccatacagggcccacagggttcaccggttcttcaccttgtcgagcagctatgcttagctttaaatgatgagttcagaatgtatttacttcacattctaccgagttgtatccaagtcttaggtgacgctgaacgttgcaatgattattactatgttcctgacatattacacacacttgaagtttttggcggaaatttggatgagcacatgcacttggttgctccggtgcttgttcgtttatttaaagtggagctggttgatatcaggcggcgtgcaattgttactttgactaatcttatacctaaggttcaggttggtactcatgtttcggctttagtgcatcatctgaagcttgtcttggatggcaacaatgatgatctgcggaaagatgctgcagaagcgctctgctgcctcgcacatgcccttggagaagactttactatcttcataccatcaatacgcaaaattcttgtgaagcaccacttgcggtacagaaaatgggatgagattgaaaatcggctactgaggcgagagctactcatcactgaaaacttgtctgtgcaaaagtacacacaatgtccacctgatgtcattagagacccccttgatgattgtgatggtacaccttctgagatagctgatgatacacagcgacaagcaagaagtcatcaagtcaatgatgtccggttgcggagtgccggtgaggcttctcaaaggagtactagggaagactgggctgaatggatgagacatttcagtattgcgcttctcaaagagtcaccatctccagctttacgcacctgtgcaaggctagctcagcttcagccttctgttggccgcgagttgtttgctgcaggttttgcaagttgctgggcccaaatgagtgaatcctcccaggaacagctagtgagaagtctcaagacagccttctcatctcagacattcctcctgaaattcttgccacgctgctgaacttagcagaatttatggaacatgatgagaagccacttcctattgatacaagactgcttggtgcacttgctgagaagtgtcgagcatttgcaaaggcactccattataaagaaatggaatttgaagctgtgtgcaccaagaagatgggtgcaaatcctgttacagtggttgaatcccttattcatattaacaatcaactacagcagcatgaggcagctattggcatattgacttactcacagcaaaattcggaagttcaattgaaagaatcatggtatgaaaagttgcaccgttgggatgaggctcttaaagcatacaccgtgaaatcatctcaaacatctggtccctttacaaaacttggatgctacattaggtcgaatgaggtgtctagcagctttggctcggctgcaaatgctgcttggcatatgggtgagtgggaccatatggcagactatgtttctcgcctggatgatgcagatgaaaataagctccgtatgttgggtaacgcaacagctagtggtgacggaagcagtaatggtgctttcttccgggcagttcttttagttcgttacaaaaagtatgatgacgctcggatgtatgttgagcgagctcggcggtgtttagctacagaacttgcagcactggtacttgagagttatgagcgagcgtataataacatggtgcgtgttcaacaactttcagaactggaagaggtgattgattactgcactcttcccatggaaagcccgattgctgacggacggagggaacttattcgcaatatgtggaatgaacggattaaaggaacaaaacggaatgtcgaggtgtggcaagccctacttgctgtcagggagttggttcttccccctaacgaagacagagacacctggataaagttcgctgaactttgctggaagaacggtcgtattagtcaggctagatctacgttagtcaaacttttacagtttgatcctgaatcttcccctgaattgacactgtatcatgcacatccacaagtagctctggcttatctaaaataccagtatgcagttggtgatgagcttaaaaggagggatgcattttctaaactgcaagagttgtctgtgcaggttgctaccaccatgggcaatttacctggaacatcagcaaaccatggcaccatgtcaaatgctggagtaccactcattgctcgtgtctacttgacacttggtagctggaagaaggcactatcacctgcattagatgacgattccattcaagaaattttgatttcttaccataatgccacgctaagtgcaaaggactgggggaaggcctggcacatatgggctttgttcaacacagaagtcatgtcacgctatactttccgaggccgaccagatattgctggaaaatatgttgttgcagcagtaactgggtatttttattctattgcttgtgcatctactacgaaaggggtcgatgatagcttgcaggatatccttcgtctgttaactctttggttcaaccatggggatacctcagaagttcaaacagcgttgcagaaaggtttttcccttgtcaagattgagatgtggctggttgtgctgccccagataattgctaggattcattcgaacaatagagtagttagagaactgatacaatctttgctagttcgaattggaaaggggcatccacaggctttgatgtatcctctcttggttgcctgcaaatcaataagtatattgagacaacgtgcagcgcaggaggtcgttgataagatccgccagcacagtggaggtcttgttgaccaggcacaacttgtgtcgaaggaactgatacgggtagcaattttgtggcatgaaatgtggcatgaggcactcgaggaagctagcaggatgtattttggtgagcacaatatcgaaggaatgcttgctgtacttgagccattgcatgcaatgcttgagaggggggatgagacaattaaagaaaatgccttcattcaggcttatgggcatgaattactggaagctcatgaatgctgtttgaaatatcgggctacaggagaggatgctgagctaactaaggcctgggatttgtattaccatgttttcagaagaatcgacaaacagcttccaagtcttacgaccctcgatctgcactctgtttcgcctgagctactcaaatgtcgaaagttggaacttgctgtgccaggaacttatgctgcagattcaccacttgtgacgattgagtattttgttccccaattgatttgttataacgtccaaacaaaggccaagaaagctgacaattcatggaagtgatggcaatgattatgcattcttgcttaaaggccacgaagatttgcggcaagatgaacgagtaatgcagctttttggtttggtgaatactctcctagagaactcaaggaaaacatcagagaaggatttatcaatccaaagatatgctgttatacctttgtcacctaacagtggtttaattggatgggttccaaactgtgacacacttcatgctctgatccgtgaatacagagatgccaggaagattttcttgaatcaggagcacagacttatgttggcttttgcacccgattatgatcacttacccctcattgcaaaggtggaagtgtttcagcatgctttgcaaaatactgagggaaatgaccttgcgaaggttctgtggctgaagagtcgaacttcggaagtatggcttgagcgccgcacaaactacgctagaagcctggctgttatgagcatggttgggtatttgcttggtttaggagatcggcatccaagcaaccttatgttagatcgctatagtggaaaaatattacacatcgacttcggagattgctttgaggcttcaatgaatcgagaaaagttccctgaaaaagtaccattccgtttgactcgaatgcttgtgaaagctatggaagttagcggtattgagggtacattccgaacaacttgtgaaaatgtgatgcaagtccttcgcacaaacagagacagcgttatggccatgatggaggcatttgtacatgacccgttaatcaattggcgtctgttcaatttcaatgaggttcctcaagtgtcgaactatggtaatgttcatgctcacacggttgtcagtagtgaagaagcagtggctaaccgagagctcatgcaacctcagcgaggagcacgtgagagggaactgctacaggctgtcaatcaactcggtgatgccaatgaggttttgaatgagcgtgctgtagctgtgatggcacggatgagtgacaaactaacagggcgtgacttctcttctgggtcagctttggctggagcaggtagctctatccaacatggcagtgagcatttggcttcaggagatgcccgggatgcccaacctggtctctcagtgaaggttcaggttcagaagctcatactccaagcgacttcacacgaaaatttgtgccaaaactatgtcgggtggtgtccgttctggtgagctctcttggaaacagtagcagtttataacatgtaaatattgtgaataccgtgtgcatagaagtttcgtggtgacagtttgtatgtgcagctttgtaattagcagaacttcaagatgccttggaccatccttttgtcagtttcttagaccgtgtttagcagttcacccttatggccatccaaaacactgtttttgtactgtagattgtattgtttgtagattgtactgttcgcagggtggatttttgaatatgagtataagaatgtgtaagctgttgaagatagccttaggttttcttccgtgccacttgagggtttgttcgattagctctcaatttatgtggattgagtgagatcggattggtttaaatctcaagcaagttaaattttcttcttaatttttctaatctcatcaaatccatgtgtaacgggaataaccgaacaaggtctgactgaaaatgttaagaggg

SEQ ID NO: 202841 - DNA, 614 bp, Zea Mays
ctgggttgctcatgcgagcttgctattaagaaaggcgataaggtagctgctgttagctgtcagccaacaggagtaaaaggaggctaccacctaccatacgcttcctgtcttcgttcggacgaggtttctcgcaaggtgatggcgtgctgttacagctgaaactaaagctgtccttgttcggacgaggtttctggcgagcgagaagatggcatgttggttacagctgaactaaagttgtcctgttaggagaacaagagcattcatcgcatgggttcccggtgtcttgtatattggttaaacgtatttattcgtaataaatatataggcatgtacaatgtgcagtactccgtttctggtgtccccgtgccctccatgcaacttggtaggtacatatgggaatgaatcgagtgctgtttggttcacatatttgtaacgtgaacggtaatcaataacgtcaaaccatgtttgttgcaatcagataatacactagaaactgatatcgtcctattcaaacttattacggccagaaattattacggcgaaccaaatgacactctagtagatatggattatactctgctgatgaaactgcctatttgcttgaaggcaagtta

SEQ ID NO: 202842 - DNA, 2158 bp, Zea Mays
ccattctaaaaaaaatccccgatctactacctttctcctcctctctcacggtctcacctctagtttccaggatgacaaaatatgggatcagattcgattcgtgagcctgtagaacaaggatgctcctccaatccatactaaattgaacccacgcagcagacatccgcgcgcagtacgtccccttcgcgaagcaccgccatcctcaccacgccgccgagtcgggcggcgcatgcgccatggcgttcctattcggcgcattcctgggcctggtggtgggcgtggccgtcgtgatggcgttcgcgcgattcgagaacagccgcgccgagcagcgccgtgagctggctgctacagctgcagctttctcgaagttgactgtacaggatttgaggaagctcatcccacccgagttttatccatcatgggtttcattcacacaaaagcagaagcttaaatggctgaatcaagagctgacaaaaatctggccatttgtcaatgaggctgcatcagagttgatcaaaacttctgtggagcctatttttgagcagtacaagtcattcatcctggcctccctccatttctcaaagttgacacttggtactgttgctcctcagtttactggtgtttcaatcttggagagtgatgattctgccatcatcatggaacttgagttgcaatgggatggcaatcccaatatagtacttgacatccaaacaacacttggaatttctcttcctgtacaggtgaaaaatattggattcacaggagtacttcggctcatatttaaaccgctggtgtctgaattcccctgttttggagctgtttgctgttctttaagggagaagagcaaggtggaatttaccctcaaggttattggtggcgaaatgactgctattccaggaatttctgatgcaattgaggggacaatacgtgatactattgaggatacactgacatggccgaatcgcataattgttcccattgtacctggagactatagtgacttggagttgaaacctactggggtattagaagtaaaactggtggaagctagggacctaaagaacaaggatcttgtgggaaagtcggacccttttgcattgatatacatacgtccattgcatgataaaacaaagaaaagcaaaacaattaacaatgatttgaatcccatctggaatgagcactatgaatttgtggttgaggacatatctacgcagcacttgactgtaaaaatttatgatgatgaaggactccaatcatcagagatcattgggtgtgctcgagtagacttagctgatatacagccaggaaaagtgaaggatttatggttagatcttgtgaaggacctggaaattcaacgagacaagaaacctcgtggtcaggttcacctggagctcctctactacccttacgcgaagcatgaaggggttcctaatccttttgctaatcagattcaactaacttcattggagaaggttctcaaaaccgagtctaatggatatgatattaatcagaggaaaaatgttattatgagaggagtcctttcggtgacggtcatatctgcagaggagttgccacctatggacattggtggcaaggctgacccatttgtggtcctgtacttaaagaagggagaaaccaaaaagaagacaagggttgtgacagacacgctaaatccaatatggaaccagacatttgatttcatggtagaagatgcactgcatgatttgctcatggtggaagtatgggaccatgatacatttggaaaggtgaattccaagatacctttgtcttgcaaggtgccaaatcgggaaaactaaacttgcatttcaagtggacgccacagccaatctatcgtgatcgtgacagggatcagtgagacttgtaaacgaaaaaggccgataaacacttatccccaacggtgctatgtatattagtcgttctgtatttacaaaatcccacggttcttatagccacgtgaccaaaaagagatcaacccaccgacctgtattttctcctttgtgatgcaagtcagcaagtgcatggacctgtatatttgagtcgttaatgaataggaaatgctgttactatgctgcaagcacatatatgcttagtggtgccgtggtggtggttgcttctgtgctgctgtttgttcttccgg

SEQ ID NO: 202843 - DNA, 2201 bp, Zea Mays
ccattctaaaaaaaatccccgatctactacctttctcctcctctctcacggtctcacctctagtttccaggatgacaaaatatgggatcagattcgattcgtgagcctgtagaacaaggatgctcctccaatccatactaaattgaacccacgcagcagacatccgcgcgcagtacgtccccttcgcgaagcaccgccatcctcaccacgccgccgagtcgggcggcgcatgcgccatggcgttcctattcggcgcattcctgggcctggtggtgggcgtggccgtcgtgatggcgttcgcgcgattcgagaacagccgcgccgagcagcgccgtgagctggctgctacagctgcagctttctcgaagttgactgtacaggatttgaggaagctcatcccacccgagttttatccatcatgggtttcattcacacaaaagcagaagcttaaatggctgaatcaagagctgacaaaaatctggccatttgtcaatgaggctgcatcagagttgatcaaaacttctgtggagcctatttttgagcagtacaagtcattcatcctggcctccctccatttctcaaagttgacacttggtactgttgctcctcagtttactggtgtttcaatcttggagagtgatgattctgccatcatcatggaacttgagttgcaatgggatggcaatcccaatatagtacttgacatccaaacaacacttggaatttctcttcctgtacaggtgaaaaatattggattcacaggagtacttcggctcatatttaaaccgctggtgtctgaattcccctgttttggagctgtttgctgttctttaagggagaaggtggaatttaccctcaaggttattggtggcgaaatgactgctattccaggaatttctgatgcaattgaggggacaatacgtgatactattgaggatacactgacatggccgaatcgcataattgttcccattgtacctggagactatagtgacttggagttgaaacctactggggtattagaagtaaaactggtggaagctagggacctaaagaacaaggatcttgtgggaaagtcggacccttttgcattgatatacatacgtccattgcatgataaaacaaagaaaagcaaaacaattaacaatgatttgaatcccatctggaatgagcactatgaatttgtggttgaggacatatctacgcagcacttgactgtaaaaatttatgatgatgaaggactccaatcatcagagatcattgggtgtgctcgagtagacttagctgatatacagccaggaaaagtgaaggatttatggttagatcttgtgaaggacctggaaattcaacgagacaagaaacctcgtggtcaggttcacctggagctcctctactacccttacgcgaagcatgaaggggttcctaatccttttgctaatcagattcaactaacttcattggagaaggttctcaaaaccgagtctaatggatatgatattaatcagaggaaaaatgttattatgagaggagtcctttcggtgacggtcatatctgcagaggagttgccacctatggacattggtggcaaggctgacccatttgtggtcctgtacttaaagaagggagaaaccaaaaagaagacaagggttgtgacagacacgctaaatccaatatggaaccagacatttgatttcatggtagaagatgcactgcatgatttgctcatggtggaagtatgggaccatgatacatttggaaaggattacatagggaggtgcatcttgacactgacgagagttatactcgaaggtgaattccaagatacctttgtcttgcaaggtgccaaatcgggaaaactaaacttgcatttcaagtggacgccacagccaatctatcgtgatcgtgacagggatcagtgagacttgtaaacgaaaaaggccgataaacacttatccccaacggtgctatgtatattagtcgttctgtatttacaaaatcccacggttcttatagccacgtgaccaaaaagagatcaacccaccgacctgtattttctcctttgtgatgcaagtcagcaagtgcatggacctgtatatttgagtcgttaatgaataggaaatgctgttactatgctgcaagcacatatatgcttagtggtgccgtggtggtggttgcttctgtgctgctgtttgttcttccgg

SEQ ID NO: 202844 - DNA, 2110 bp, Zea Mays
ccattctaaaaaaaatccccgatctactacctttctcctcctctctcacggtctcacctctagtttccaggatgacaaaatatgggatcagattcgattcgtgagcctgtagaacaaggatgctcctccaatccatactaaattgaacccacgcagcagacatccgcgcgcagtacgtccccttcgcgaagcaccgccatcctcaccacgccgccgagtcgggcggcgcatgcgccatggcgttcctattcggcgcattcctgggcctggtggtgggcgtggccgtcgtgatggcgttcgcgcgattcgagaacagccgcgccgagcagcgccgtgagctggctgctacagctgcagctttctcgaagttgactgtacaggatttgaggaagctcatcccacccgagttttatccatcatgggtttcattcacacaaaagcagaagcttaaatggctgaatcaagagctgacaaaaatctggccatttgtcaatgaggctgcatcagagttgatcaaaacttctgtggagcctatttttgagcagtacaagtcattcatcctggcctccctccatttctcaaagttgacacttggtactgttgctcctcagtttactggtgtttcaatcttggagagtgatgattctgccatcatcatggaacttgagttgcaatgggatggcaatcccaatatagtacttgacatccaaacaacacttggaatttctcttcctgtacaggtgaaaaatattggattcacaggagtacttcggctcatatttaaaccgctggtgtctgaattcccctgttttggagctgtttgctgttctttaagggagaagagcaaggtggaatttaccctcaaggttattggtggcgaaatgactgctattccaggaatttctgatgcaattgaggggacaatacgtgatactattgaggatacactgacatggccgaatcgcataattgttcccattgtacctggagactatagtgacttggagttgaaacctactggggtattagaagtaaaactggtggaagctagggacctaaagaacaaggatcttgtgggaaagtcggacccttttgcattgatatacatacgtccattgcatgataaaacaaagaaaagcaaaacaattgactccaatcatcagagatcattgggtgtgctcgagtagacttagctgatatacagccaggaaaagtgaaggatttatggttagatcttgtgaaggacctggaaattcaacgagacaagaaacctcgtggtcaggttcacctggagctcctctactacccttacgcgaagcatgaaggggttcctaatccttttgctaatcagattcaactaacttcattggagaaggttctcaaaaccgagtctaatggatatgatattaatcagaggaaaaatgttattatgagaggagtcctttcggtgacggtcatatctgcagaggagttgccacctatggacattggtggcaaggctgacccatttgtggtcctgtacttaaagaagggagaaaccaaaaagaagacaagggttgtgacagacacgctaaatccaatatggaaccagacatttgatttcatggtagaagatgcactgcatgatttgctcatggtggaagtatgggaccatgatacatttggaaaggattacatagggaggtgcatcttgacactgacgagagttatactcgaaggtgaattccaagatacctttgtcttgcaaggtgccaaatcgggaaaactaaacttgcatttcaagtggacgccacagccaatctatcgtgatcgtgacagggatcagtgagacttgtaaacgaaaaaggccgataaacacttatccccaacggtgctatgtatattagtcgttctgtatttacaaaatcccacggttcttatagccacgtgaccaaaaagagatcaacccaccgacctgtattttctcctttgtgatgcaagtcagcaagtgcatggacctgtatatttgagtcgttaatgaataggaaatgctgttactatgctgcaagcacatatatgcttagtggtgccgtggtggtggttgcttctgtgctgctgtttgttcttccgg

SEQ ID NO: 202845 - DNA, 2247 bp, Zea Mays
cggcccagcgcgcgccttctcaaaccttctagaacgcccaccttccttctttcgtccactcctccaccgctccattccgaacctttttaagctctcccatggagtctgacctcatagcttatatagcaaaacaatagaagtagaacaagcacagaactgttaagctccgcaggctgcagctcgtccccaatgtcgtctgcttctcttgcatcttctctcttgtgcagcagcagtgcttctactagtagaagcgcaaccgtgccaagagtaaccaggacccctcttttttccaagaaccagtacaaaccgcctcttcggcctcttaggagtagttcagtagtaaggcgatcgttgcagcaggagcaagaggagagggtgggcccggcgtcctctgtctctgtggcctccggcgagcgacaggaggaggcgacggcgtcgcatcatgttggaggggtggatgaggccaaggcgtcgggccatgttggagaggcagataaaggaggccaaggagaaggcgacggcgaggagaagaggagcacagacgagcagcaggaggtggactggaagtcagacgaggagttcaagaagttcatgggcaatccctccatcgaggccgccatcaagttggagaagaagcgcgccgacaggaagctccgcgagctggaccgcgagcccgacgccaaccccgtcgccggcctgttccggggcttggtgaaggaccagctggcccgcgagaagcagaggctggagctggcggagcagaccttcaaggcactcgacctcaacaagctgaagagctgtttcgggtacgacacgttcttcgccgtggacgtccggaggttcggcgacggcgggatcttcatcgggaacctgcgtaagcccatcgaggaggtgcggcctaagctggagaagaagatctccgaggcggctggaacagaggtcaccctctggttcatggaggagaagaacgacgacatcacaaagcaggtctgcatggttcagcccaaggcagagatcgacgtccagctcgagatcaccaagctgagcacgccgtggggctacctcagcgccgtggcgttggcggtcacgaccttcgggacgatcgcgctcatgagcggattcttcctcaagcccggcgccacgttcgacgactacgtctctgacgtgcttcctctgttcggcggcttcctcacgatactcggcgtctctgagattgcgactaggctgacggcggcgaagtacggtgtgaagctgagcccgtcattcctcgtgccgtccaactggacggggtgcctcggcgtgataaacaactacgagtcgttgctgcccaacaagaaggccctgttcgacataccagtcgcgcgcacggccagcgcgtacgtcacgtcggtggtgcttgccgtctcggcgttcatcgtcgacggcagcttcaacggcggcgagaacgccctgttcgtgcggccggagttcttctacaacaacccgctgctgtcgttcgtgcagctggtgatcgggccctacgcagacgagctcgggaacgtgctcccgaacgcggtggagggcgtgggcgtgcccgtggacccgctggcgttcgcggggctgctgggcatcgtggtgacgtcgctgaacctgctcccgatcgggcggctggagggcgggcgcatcgcgcaggcgctgttcgggcgcggcacggcggcgctgctgtcgttcggcacgtccgtcctgctgggcgcgggcgccatcagcggcagcgtgctgtgcctggcgtggggcctcttcgccaccttcatccgcggcggggaggagatcccggcgcaggacgagatcacgccgctcggcaacgagcgcctcgcgtgggggttcgtgctcgccttggtctgcctcctcacgctcttccccaacggcggcgggacctactctgcctccttcctcggcgacccgttctttagaggcggcatctagacggaatcatctccttccgtgcagtgtgcgtgtgtttataaagtttttagtaggctaataaccacactactaaccacttgagacgccacggcactcgacctgcagtccgccgatcccgaaacagatcgttgatgtcgccagaactgcatatcgatcgccctctgcagggcctacacccactgtacaatcggacaacaataggtcgacgatcctcgccgcaccgcctgtccaggaggaggtccgagatgggagccaaacacgcaacatcaagccttcttatagggg

SEQ ID NO: 202846 - DNA, 3256 bp, Zea Mays
cgccaccgtcccgccggcagcgtccgacctgatcgatccacggccgccgccaacgctcatccgtcccccgagcgatccggcggccgcgcggtgtgtcgtcgcatccccagagctcccttggtgacccacccatccggccacctccactgaactcaacaccgcaactgcttctctgcctccctccttccttcccggacccagtctcccagtcgcgtcgcatgctattcaaatctctcaccctcgccgcaaacgcagtccactgacttctaagcaaccctagctagctctgctccggccggcgcccatggtctcgcggggactcttcggctggtccccgccccacgtccagccgctcacgccggtctccgagacctccgagccgcccgagtcgccctccccctacgccgccgacctcggcctcggaggggacggcgctccgccgcctgacgacgatgcccaaccgcccctagacgatgccgacgacgacccggacccgccgcccgccgctgtccccttcaagcgcctcttcgcctgcgccgaccgcctcgactgggcgctcatggtcgccggcagcctcgcagccgctgcacacggagtcgcgctcgtcgtctacctccacctcttcggcaaagccatcaactcgcttcatgcccatgggcggcatacccacgacctcttccacgatatcaaccagcacgctttgtacttcctctatatagccattggcgttttctttgccgcatggatagaggtttcgtgctggattttgaccggggaaagacagacggcagtgattagatcaaagtatgttcaagtcctcttaaaccaggacatgagtttctttgatacatacggcaacaacggtgatattgtcagtcaagtactgagtgatgtcttgctcattcagtcagctctgagtgagaaagttggaaactacattcacaacatggctacatttttcggtggtcttgtcattggtctggtcaactgttggcaaatagctttattgacattagcaactgggcccttcatcgttgctgcaggaggaatatcaaatatatttctccataggcttgcagaaaatattcaggatgcttatggtgacgcagcaagcattgctgaacaggcaatcttgtacattaggaccttgtattccttcacaaatgagacccttgcaaaatattcttatgctacttcacttcaagcaacactgcgctatggaatccttataagtttggtgcaaggtcttggtcttggatttacatatggccttgccatatgttcttgtgccttacaactttgggttgggaggttcctgatctctcatggaagagctaatggtggtgaagttgtagtagcactgtttgctattatcttgagtggacttggacttaatcaagcagcaacaaacttctattcctttgagcaaggacgtatagctgcatacagactatatgaaatgataagccgttcaacatctactgtgaaccaggatggtagtaccttgtcttcagttcaaggcaacatcgagttccgcaatgtctacttcagctacttgtcccgccctgaaatccccatcttaagtggattctacctcactgtacctgctagaaaaactgttgctcttgttggcagaaatggttcaggaaaaagcagcataattcctctaatggaacgcttctatgacccaaccttaggtgaagtgcttttggatggggagaacataaagaatttgaagctagagtggttaagaagccaaataggacttgtgactcaagaaccagctttgttgagcttgagcatcatggaaaatattgcatatggtagatgtgccacaactgaccaaattgaagaggcagctaaaacagctcacgtgcatgctttcatcagttcactagaaaaaggatatgaaacacaggttggtcgggctggcctttctctgacagaagaacaaaagataaaactttccattgctcgtgctgtgctctcaaatccatcaattcttctactggatgaggtcactggtgctcttgattttgaggcagagaaagcagtccaggaagcactagacattctaatgcttgggaggtctaccatcatcatagctcggcgcctcagtcttatcaggaatgctgattatatagcagtaatggaggaaggtcaacttgttgagatggggacacatgaagaattgttaaaccttgatggtctttatgcagaacttcttaggtgtgaagaagccgcaaaactcccaaagagaacaccgatgagaaattataaagagccaagctccttccaaattgaaagggattcgtcagcaggtcacaactttcaagaatcatcttctccaaagatgtcaaaatcgccatcacttcagaaaacacatggctttctcacattccgaacttcagatgccaatcataactcacatgaatcaccaaatattcaaagccccccttcagagcaaatggcagaagccaggctaccaatggttgcatctgagagagctccatccatcaaaaggcaggacagttttgaaatgaaattgcctgatcttcccaaaattgatgtcccgctgcatcgacagtcgtcaaatacatcagacccagaatctccaatatctccattgttgacttctgatccaaaaaatgagcgctcccactcaaaaactttcagccggcctcttgtcatctttgatagttttcatgctgaggattccaagcagcagcacacaaaagcaccatctttttggaggcttgcagagcttagttttgcggaatatttttatgctctgttaggaagtgctggggctgcttgtttcggttcatttaatcctcttcttgcttatacaatatctcttatagtagtggcctactacaaaataggggtccgtgatgtacatgccgaagtgaataagtactgctcattcattgttggcatgggtataattactgtactagccaacttcttgcagcacttctactttggtataatgggagagaaaatgaccgagcgtgtcagaaggatgatgttttctgcaattctgcgcaatgaagttggttggtttgacgacgaagaaaatagtgcagacatattatcaatgagacttgcaaatgatgcaacatttgtccgcgctgctttcagtaacagactttctatattcattcaggatacatcggccattcttgttgcacttcttcttgctctcatccatttcaacatccaacataattttactatattcctaagaagggcg

SEQ ID NO: 202847 - DNA, 3114 bp, Zea Mays
cgatccacggccgccgccaacgctcatccgtcccccgagcgatccggcggccgcgcggtgtgtcgtcgcatccccagagctcccttggtgacccacccatccggccacctccactgaactcaacaccgcaactgcttctctgcctccctccttccttcccggacccagtctcccagtcgcgtcgcatgctattcaaatctctcaccctcgccgcaaacgcagtccactgacttctaagcaaccctagctagctctgctccggccggcgcccatggtctcgcggggactcttcggctggtccccgccccacgtccagccgctcacgccggtctccgagacctccgagccgcccgagtcgccctccccctacgccgccgacctcggcctcggaggggacggcgctccgccgcctgacgacgatgcccaaccgcccctagacgatgccgacgacgacccggacccgccgcccgccgctgtccccttcaagcgcctcttcgcctgcgccgaccgcctcgactgggcgctcatggtcgccggcagcctcgcagccgctgcacacggagtcgcgctcgtcgtctacctccacctcttcggcaaagccatcaactcgcttcatgcccatgggcggcatacccacgacctcttccacgatatcaaccagcacgctttgtacttcctctatatagccattggcgttttctttgccgcatggatagaggtttcgtgctggattttgaccggggaaagacagacggcagtgattagatcaaagtatgttcaagtcctcttaaaccaggacatgagtttctttgatacatacggcaacaacggtgatattgtcagtcaagtactgagtgatgtcttgctcattcagtcagctctgagtgagaaagttggaaactacattcacaacatggctacatttttcggtggtcttgtcattggtctggtcaactgttggcaaatagctttattgacattagcaactgggcccttcatcgttgctgcaggaggaatatcaaatatatttctccataggcttgcagaaaatattcaggatgcttatggtgacgcagcaagcattgctgaacaggcaatcttgtacattaggaccttgtattccttcacaaatgagacccttgcaaaatattcttatgctacttcacttcaagcaacactgcgctatggaatccttataagtttggtgcaaggtcttggtcttggatttacatatggccttgccatatgttcttgtgccttacaactttgggttgggaggttcctgatctctcatggaagagctaatggtggtgaagttgtagtagcactgtttgctattatcttgagtggacttggacttaatcaagcagcaacaaacttctattcctttgagcaaggacgtatagctgcatacagactatatgaaatgataagccgttcaacatctactgtgaaccaggatggtagtaccttgtcttcagttcaaggcaacatcgagttccgcaatgtctacttcagctacttgtcccgccctgaaatccccatcttaagtggattctacctcactgtacctgctagaaaaactgttgctcttgttggcagaaatggttcaggaaaaagcagcataattcctctaatggaacgcttctatgacccaaccttaggtgaagtgcttttggatggggagaacataaagaatttgaagctagagtggttaagaagccaaataggacttgtgactcaagaaccagctttgttgagcttgagcatcatggaaaatattgcatatggtagatgtgccacaactgaccaaattgaagaggcagctaaaacagctcacgtgcatgctttcatcagttcactagaaaaaggatatgaaacacaggttggtcgggctggcctttctctgacagaagaacaaaagataaaactttccattgctcgtgctgtgctctcaaatccatcaattcttctactggatgaggtcactggtgctcttgattttgaggcagagaaagcagtccaggaagcactagacattctaatgcttgggaggtctaccatcatcatagctcggcgcctcagtcttatcaggaatgctgattatatagcagtaatggaggaaggtcaacttgttgagatggggacacatgaagaattgttaaaccttgatggtctttatgcagaacttcttaggtgtgaagaagccgcaaaactcccaaagagaacaccgatgagaaattataaagagccaagctccttccaaattgaaagggattcgtcagcaggtcacaactttcaagaatcatcttctccaaagatgtcaaaatcgccatcacttcagaaaacacatggctttctcacattccgaacttcagatgccaatcataactcacatgaatcaccaaatattcaaagccccccttcagagcaaatggcagaagccaggctaccaatggttgcatctgagagagctccatccatcaaaaggcaggacagttttgaaatgaaattgcctgatcttcccaaaattgatgtcccgctgcatcgacagtcgtcaaatacatcagacccagaatctccaatatctccattgttgacttctgatccaaaaaatgagcgctcccactcaaaaactttcagccggcctcttgtcatctttgatagttttcatgctgaggattccaagcagcagcacacaaaagcaccatctttttggaggcttgcagagcttagttttgcggaatatttttatgctctgttaggaagtgctggggctgcttgtttcggttcatttaatcctcttcttgcttatacaatatctcttatagtagtggcctactacaaaataggggtccgtgatgtacatgccgaagtgaataagtactgctcattcattgttggcatgggtataattactgtactagccaacttcttgcagcacttctactttggtataatgggagagaaaatgaccgagcgtgtcagaaggatgatgttttctggatacatcggccattcttgttgcacttcttcttggtatgttactacaatggcgtgttgctcttgttgcattggcaacgttacccatccttatcatttctgcggttgcac

SEQ ID NO: 202848 - DNA, 1669 bp, Zea Mays
aaagcaacaaatctcacaccgtcacacgatcacgtccttgcccctctgagtccttgtccatgtccgttgccaacaattcaccctcatgacctctatggccccacacgtacgaccactagtagtactaggcgtacggagtacctctatttcacgatggcatccatccacaattgcagtaatccctctctccgtccctcccaatgttactccatctctctatttttaaagccggttccactcctcctccctcgctcactctcagtttccgctgtcaccccctctccctctgttcgccactttataccgcccgcccaccactccccgtttctctctgcttcatccttcgctttcccctgcgccaggcccgccccgccccgcccctccagaacgacatcctgcttccccgccccctccgatggggaacccgccggagctgtaccacaagatcctcaacatccccaaggacacctcgccgcacgaaatccgcgccgcgtacaagaacctcgtcaagaagtggcaccccgacaagcacccgccgtcgtccaggccggaggccgaggcgcgcttcaaggccatcagcgaggcctacgaggagaacaggggcgtgttcgagctgtgcaacgacggccgggcgggtgagaggacgcgcggcgccttcggcggcgccggcggcggcggtggcggaggcctcggcgccggcgtcggggcgcgcatggagaggacgcgcagcgacgggttctgcacgaggagcgcgcccggcacaccggcgagggagttcaagaaggtgtacagctccggcgaccccggcgggcgccgcgccttcgccgagttctccagctccatcgtgcgcaaggcgccgccgctggagcgcaagctcgagtgcaccctcgaggagctctgccgcggctgcaagaaggaggtcagcttcacccgcgacgtcgtcaccaagaacgggtcaaccgtgaagaaggaggtgacacagacggtggtggtgaagccagggtggaggaaagggaagcaggtggtgctggaaggcatgggggacgagcggccggggtgcctgcccggcgacgccatcctcacggtgtccgagaagaggcacccggcgttcaagcgggtgggcgacgacctggtgctcaaggcggaggtgccgctggtgggcgcgctcaccggctggtccttctcgttccgcctcctcggcggcaggaaggtgagctgctcgttccaggacgaggtcgtccgccccggctacgagaaggtgatcgccggcgagggcatgccggtccccgggcagaagggcgcgcgcggcgacctgagggtcaagttggacgtcgtcttccccaaggagctcacccccgagcagcgcgccggcctcgccgagatcctcagagggtcctgctgatccatcggccccagttccaagcgtatcaagttttcttggccgtgtccgtgtgttaaattttaatatgtatactcatagcgcgtgtgatgagtatataagtacataaagagagaggggagggggcgtcgttgtacatacaggtcgtttatatattatatatgtaaggataaaaagaaatatgaaacgtgagccaaagccaagccttgtgtagctgtatcgcggcatgagctcgtggcatgagctggacgtgtttgttctgatggcaaa

SEQ ID NO: 202849 - DNA, 1237 bp, Zea Mays
aaagcaacaaatctcacaccgtcacacgatcacgtccttgcccctctgagtccttgtccatgtccgttgccaacaattcaccctcatgacctctatggccccacacgtacgaccactagtagtactaggcgtacggagtacctctatttcacgatggcatccatccacaattgcagtaatccctctctccgtccctcccaatgttactccatctctctatttttaaagccggttccactcctcctccctcgctcactctcagtttccgctgtcaccccctctccctctgttcgccactttataccgcccgcccaccactccccgtttctctctgcttcatccttcgctttcccctgcgccaggcccgccccgccccgcccctccagaacgacatcctgcttccccgccccctccgatggggaacccgccggagctgtaccacaagatcctcaacatccccaaggacacctcgccgcacgaaatccgcgccgcgtacaagaacctcgtcaagaagtggcaccccgacaagcacccgccgtcgtccaggccggaggccgaggcgcgcttcaaggccatcagcgaggcctacgaggcgctcctggaccagcaggagaacaggggcgtgttcgagctgtgcaacgacggccgggcgggtgagaggacgcgcggcgccttcggcggcgccggcggcggcggtggcggaggcctcggcgccggcgtcggggcgcgcatggagaggacgcgcagcgacgggttctgcacgaggagcgcgcccggcacaccggcgagggagttcaagaaggtgtacagctccggcgaccccggcgggcgccgcgccttcgccgagttctccagctccatcgtgcgcaaggcgccgccgctggagcgcaagctcgagtgcaccctcgaggagctctgccgcggctgcaagaaggaggtcagcttcacccgcgacgtcgtcaccaagaacgggtatctgctcatctgcgctgttttgctctgcctaactgaacaaggttgacgcgaaaccttgctagaaatgaagaaatccggtgagctatcgcttgtcggtagattattattatttttgtttccaagacaacgaacggagcggagaattttaatcgaggaagggctttgtgtgccgacgtgggttcagattttaacagtgaatcaatcgatgcttggaaaactaaactcgaggttaggcaagaattcagaaccggctctgatggcg

SEQ ID NO: 202850 - DNA, 1088 bp, Zea Mays
cgtttccgaccgttttcatccctgccaagttgcacgttgcgctttctcctgtcgtcgccctcgcccaccaccttcggagctcggagactcggagtcttcccccacccccataacgtcctcttccgtgctctgcgttgccgcctgcgggcgccgcaagccgtgcgtgcccgcgggttccccgatttgttcatggtgttgagtatgcatttggagcacatgactattcgattagtggagtttttgaggtggaacctcggcagtgtcctggtttcaaatttcggaaatcaatatgcatgggaactaccagcctggatcctctccaaatcagagagttcatggagattcagtcagtaaattacaatggtgatacctaccatttgataagtaaaaactgcaaccatttctgtgaggatatctgcaaaaggttgacaggaaattttattccaaaatgggtgaatcgacttgctagaatgggtgctgtttgcaactgcattctaccagagtccctcaagatcaacgcggccggtcatgacccagcttctcgagctgaagatagcgagagaaaaatgctgacaagttccttcagttgcttctgttcaatctctctatgccaaagacatttctcaacatcttcgccgtctctgcgttcctccgcgaacggcacttcttgggataccaagcagtccaattctacccgactgaagaagagctgacagttgaggtcctgtgtatcatatttaactcatgaggcacaaggatccttttttgtcagcaatctcttctacgaccttcatcagagaaggatgaagaggtattgattgataaggtgtttttgcatactcgagcgtcggatccagctgtgcttgaacatctgtacagagattgtgtagaaattatttcttacatttgaatttgaaatacagtgagctggaggaaactccaccctagacttttggaaaaaaacaaactccaaaaaaatcattgatgggtgctgcctctggagtccgaagtgatatttcgcctgtggtagtttgcaaatttggccatttttatacccttgcctatataaagttttatagttttgtttt

SEQ ID NO: 202851 - DNA, 815 bp, Zea Mays
tacagacataggcgtagaaagcccaaacccgcatctacgttctactcccactcgcggtcgcggtagccggcggcggcggcggaggaaagcaggcaggccatggcgtcgtcgtcgtcgtcgaccccggcggccgtccgcgagatgcagaaggatctcgaggtccaggccaacgccctcagcaagatccagaaagacatcgccaagaaccaccaggtccgcaagcagtacaccatccaggagctggagctgctcagcgatggggccaacgtgtacaagctcatcggaccggtgctggtcaagcaggacctcgctgaggccaaggccaacgtcaagaagcgcatcgagtacatctccgcagagctgtcaaagcggatggatcgggcgctcaaagacttggaggaaaagcaaaacagcaagaaggaatcgatattcaagttgcagcagaggatgcaggctgtacaagctaaggcttagacaactgtttgttggttgcaactagtccaaggccatgcttcatttcatcccaattccctccaggtttttttttgtggggaggaatcaggtgtctgatgttctcgtctccacaacgaaaaagaaagaaaaacggttcctagtgaaatactaggctattctgtatgccctagtataaaagtgtgcctctagtagaactgtagaagatgtagttatcagtatctcttttgtattattggcccatgtttacttctcaatcgaatatttatgcgagggatgtttgtcaacgccttaggcttcatcttgaatttatgactttcattgcttgagtgggcccatgccaa

SEQ ID NO: 202852 - DNA, 756 bp, Zea Mays
ggtggaatgtgataggagctcgataatgttttcaaaaacagaaaaatgcctggacgcatgggtggtgtgcaacgcacagtgaagaatgtatgggtctatcaaatagacccagccaggaacttactgtatctgaagggccaggtgagcctgaagacttggagcccctgattgctgatcttggtgatgttgacccattcatggcagccgattaagacaatgcacaaagttggttaattcctttttgtgttctaagcactccttgagctcgtccattccacgagattgtcaaactctcgatggatgtgagcagttcctgaatcacaagctttatccggttactggccagcctgatcaatgttgttccatgtacattacctggcaagtataccagtgctctaatggtttttagatgattgttttgattgaccgaatataacctttttctcaataagttgtacgcggagccacaagtagtatataaaatcagaatatttcactcatgagagtgtgttctggttttacgcgagctgcttatgttattgctagctgttagtttattacctgtcatttttactttctatttctaatacaaccttttctttttctaataatctttatttcaattcttctttttgtcgttttctatgtactattaacttctttcactgctcttgattactgtgtccagagctcaaacgtcatctattacgactcagggaatatatcataataacataaggccagttttagtgggtg

SEQ ID NO: 202853 - DNA, 1890 bp, Zea Mays
cgagcccgcagtactgggtcggcaggccacgagcgagcggtcagcatccgcaggtacagccacacacccacgcacgagcactcccagccggcccgccgagaatccactcacccgctggttcatgggctccacggaaacgatagcccacacgtcagtcccttccacaagacccaaaccgtctccggagtaaacccccgagatctatccccgtttccaacctcacacccccccttccattggagctccttcgtctgagttaaacctaaaccctaatcgcgacctgcgttcgtcaaaaccctacctggccatggacggcggaggaggaggcggtggaggaggaggtggagttggggcaggtgtcatggtgggtggcggagtcgtgccgggcggcgggggcggcgacgtggaactcgtcagcaagacgctgcagttcgagcacaagctgttctactttgatctgaaggagaacccgcgggggaggtacctcaagatctccgagaagacatcggccacgcgctccaccatcatcgtccccatcgacggcgtcgcctggttcctcgacctcttcgactactacatccgcaccgacgagcgcgacgtcttcagcaaggagctgcgactccagaccaaggtgttctatttcgatatcggggagaacaagaggggccgattcctcaagattttcgttgattcaagacatctaggtcctaaatgagtatgctgactaagtattccattgctatgtggatcatggacccatctgttcagtggcagtcttctttcaccaaggtttctgaggcctctgtcaacagaaaccggagtaccataattgttccagctggcagctctggtgaagagggctgggaagcattcagaaatgtactgttggaaataaataacgaggcttccagattgtatgtcctaccaaatcatccaaatcagcaacacatggagccgccagagcgtcttcctggcttgtcagatgatgtgggtgccggatttatagctggacatggtagccagtccgcttctgggccagaggtagatgtcgaacgtttggttgatctgcctcctcaagaagaaattagtggcatgggtatgtctaaggtgattagggcagatcagaagaggttcttcttcgacctgggaagcaacaacaggggccattatttgaggatttctgaggtggctggagttgatcgttcgtctataatcttgccgctctcgggtttgaagcagttccatgaaatggttggtcactttgtagatataatgaaggacaggcttgaaggaatgacaggagctaacgtgcgcactgtcgaatccagtcagagatgattacccttactgtggcctgggcaagactgctgttatgcctcctgtaggtttgccatgtggtgtgtggtaatgttagatcacgcactatcaattcatctggggctcgcccaacatcgagatggacgagcacacgttcctgaccaacagggagagggccgtggactacctcaactccctggacaaggtgttcgtgaacgaccagttcctcaactgggaccccgagaaccggatcaaggtccgcatcatctctgccagggcgtaccactccctcttcatgcacaacatgtgcatccggcccacggacgaggagctggagagcttcggcacgccggacttcaccatctacaacgccggccagttcccctgtaaccgctacacgcactacatgacgtcgtccacgagcgtagatggcagggatacatgtcttattggcatgcatgcatcatctaggatggcagggatcgatcggaccattttgtaaattaagaaaacgttaacttggttgaaacctagattaatttgtatattcgtgccgagaatatatatggttta

SEQ ID NO: 202854 - DNA, 419 bp, Zea Mays
cggctatgatgtggagatgtccgatgaaggaaacaacaggtctaaaaccttcttgaagccacttggcatcattagcaagaagaaggtacagcttcatttgaagatcaagaaagacaagagaaaagctaggaagaaggggaagttttcttttaaaaagtagacgcgtaaagcttgtagtcttataaatcatgtagttctgtttccagtttgaacaacaaatctaaaggcagtcatgcgcacctaagtccattcatggctagcttactatgtcgaaatgagtatggaaaagatggcgctgacctatcagttgtgttcatcttcacatggtatcgttgtgaactatttccttcacgccattttatgactgtatattcttgccttgcattattgcatctcatgtttactgtcagaaacttctc

SEQ ID NO: 202855 - DNA, 1505 bp, Zea Mays
gttctcaacactccttcgtggggcgtgctcgctcctagaatcctagggtccgcttctgcgtcaccgatcggtatctcccacaccccaactccaacacagagtcaccgcaccgccgcgtctaggtcaccgccatggccggggactggcaggagctgggccaagcggcggccatcggcctcctcttcgccttcctggtcgccaagctcatctccaccgtgatcgccttcaaggaggacaacctccgcatcacgcgctcccctccgacctcccccactgccgccgccgccgcagccgcgcctcccgtcccctcccactacggctccaccgacggaggcagcggcagcgacagcgactgggagggcgtggagagcaccgagctcgatgaggagttcagcgccgcctccgccttcatcgcggcctccgccgcctccggcaccagcgtccccgaggaagcgcagctgcgcctctacggcctctacaagatcgccaccgaggggccctgcaccgcgccccagccgtccgcgctcaagctcaaggcccgtgccaaatggaatgcttggcataagctgggtgctatgcctacagaagaagctatgcaagggtacatcacaattgttcaggacctattccctaactgggatgcaggtgcaagtgcgaaaaggaaagatgaagatagcattgcttccgcatcagcttcaaaggggcccatgggacctgtgtttagcagtttaatgtatgaggaagacgaaggaaatgaatcagaacttggtgacatccatgtttcagcaagggaaggggcgactgatgacatagtgaagcttctggcagctggtgttgaggtcaacgtgagagataccgaaggtagaagtccgttgcactgggctgttgatcgtggccatcttagtgctgtcgaggttcttgcaaatgcaaatgcagatctgaatgctaaggacaatgaagggcaaacggcactccactatgctgctgtttgtgaaagagaagacattgcagagttgcttgtcaagcatcatgctgatcttcggatcaaggacgaggacgggaacacggcacatgacttgtgcccttcgagctggtcttttatgaaccaggcaaactgataacacgaatatacggatatgcttgaaggtgtcatctgccaagaaacatgctagctgtatcctaaagcccatacggcacatatggtgtatcttagtgtcatgtgtgacgtgtgggaaatcaggcaggttgtttgcgtacgtggtgccctctctgaaatcagatgagttgttttatcgtcctcatcgaaccagttgtcaaaggatagtattagtgttgggaagatacatgtattgctttaatcaaaagaatcatgctggacaccaatgcaagcccaaatgggaagaaaaggatgtgcggacatataactagcatcatcgtctggtggtttccaatcaagcatctcctaggtaggtgatacatacagacacaagtggtctgtcctaatt

SEQ ID NO: 202856 - DNA, 1505 bp, Zea Mays; identical to SEQ ID NO: 202855

SEQ ID NO: 202857 - DNA, 2185 bp, Zea Mays
gttaaacctaactgcctctcctgtctcccagtctctcgccgctcgcctctcagccgccgcgtgcctcccagtctcccgccctcgcctctctcttcctctcctctctccctgcgcgccgccgccgtgcctcgccttgcccagagactaaggcgccaggatagtataaatttagttcacgtgattgtggacttctcgccttttggattcaacattttctgcttctcagctctggaatacagaagtgccattgtgggctcaagaggataatgtacgggaggcgtgcatcgcagctgctgaaggagatcgactcctctgaggctggccagctcgtgccattcaacgtaattccagcttctgtactcacttgtggttacgaatttggaatcatagggaatgctgcttgtatctcgtttatgtctattacaagccgcaattttgtattatctgatgtgttctgtgttcgatgggtgaattgagtgtcgaaaaactcctatatcctcagttgaaagttttactttacttccgtggtagtctggtagcacctcaaaaatcataaaccgtcagatcaaatattgttggtttggctgacagatgtgcctgcaattgtgtgccttttaaattcttctcccttctaaacatgttagttagtacgtgccatctagatttggaaaaaaatcatatgggacctggtttaattctctatcaagttaaaccctacccatacatatgaatttagataaaaaaagatcactacatgtttcattaattcataatcatatttttaccatgtgggtactactttgtcattatatagtgccagaaaacctaaaatggttcgaaatattttatacgtactacttttccattgtcagaggcagcgtgactttgatagccacagttcctttttagtttctttggtacataacatgcaatctctgaaatgtgcagagtgacgtgtttgatcaagtgattagagagtgcaatgagcacaactcacaatttcaatcgttgatcaggtaaattttaccctactagaatgttgggttgctgaccatcttgattcaaatttaccctgattgataggcgtttcaaatgcacagtttactgactaggcctggtttagtacaggaaaatggtggagcaaaacttagatatcgagacaactagaaatgaagatcactatggtgcagctatccaccatctttccctgctccgtaacaaaagatgccttatggcttacatgtacaaaactaaaagttcacagctgagctaactttctgttttatgctgataatacatgattaaaattgaattcgtgtgtactgaagctgaaagaattacatccaaacaggtacaaccgagcagaagttatccagagttttagatggaaaattggccctgtgcttcctcatgacatacaagaaaagctccatttctcagaaaaggagtacttcaagaaccactctgcagccattaaatcatacatatcagagatggatatagatttgacagtggacatggttcctcccaaggatccttacattcaggttcgggtgctggaggacattggtgaagtatcgctcggtgaccattctgtgtcattgaccaagaactcactccatttcctaaggcgcacagacgctgaacagtttatatcacagaatttctggagtagggatcacatgtatgaatgtatgatggtacaataggatggtgcactgccctcgttctccccagcgatgctgcctgatgccctatttgcaacaatgaaaagacgcgttctgtaccaaggagcttcttaactagtcgctggacgatgatttcgaaagttgtgcaggcagtcctatactagattcattgcctctatttacatgtggatgacttttagttagtgtgccatccaagaaagcagatgttgcaaacattgtaacttgtgtattaacattggttttgctggtagatttcatatttgtgtttccaagattccatgtaatcaagaaaaaaaatgaaatcttggttgaaacagtctttcacagtgaggagttagtttcattttatagctaacatgcaagagacaatatgtctagttaacatttcatctatttctccattaattgcttgcctcatcatctaaactgttgacatgtcacatcatttattaatgagaatgaaacctttataaaac

SEQ ID NO: 202858 - DNA, 1256 bp, Zea Mays
gttaaacctaactgcctctcctgtctcccagtctctcgccgctcgcctctcagccgccgcgtgcctcccagtctcccgccctcgcctctctcttcctctcctctctccctgcgcgccgccgccgtgcctcgccttgcccagagactaaggcgccaggatagtataaatttagttcacgtgattgtggacttctcgccttttggattcaacattttctgcttctcagctctggaatacagaagtgccattgtgggctcaagaggataatgtacgggaggcgtgcatcgcagctgctgaaggagatcgactcctctgaggctggccagctcgtgccattcaacagtgacgtgtttgatcaagtgattagagagtgcaatgagcacaactcacaatttcaatcgttgatcaggtacaaccgagcagaagttatccagagttttagatggaaaattggccctgtgcttcctcatgacatacaagaaaagctccatttctcagaaaaggagtacttcaagaaccactctgcagccattaaatcatacatatcagagatggatatagatttgacagtggacatggttcctcccaaggatccttacattcaggttcgggtgctggaggacattggtgaagtatcgctcggtgaccattctgtgtcattgaccaagaactcactccatttcctaaggcgcacagacgctgaacagtttatatcacagggtcttatggaagaatttctggagtagggatcacatgtatgaatgtatgatggtacaataggatggtgcactgccctcgttctccccagcgatgctgcctgatgccctatttgcaacaatgaaaagacgcgttctgtaccaaggagcttcttaactagtcgctggacgatgatttcgaaagttgtgcaggcagtcctatactagattcattgcctctatttacatgtggatgacttttagttagtgtgccatccaagaaagcagatgttgcaaacattgtaacttgtgtattaacattggttttgctggtagatttcatatttgtgtttccaagattccatgtaatcaagaaaaaaaatgaaatcttggttgaaacagtctttcacagtgaggagttagtttcattttatagctaacatgcaagagacaatatgtctagttaacatttcatctatttctccattaattgcttgcctcatcatctaaactgttgacatgtcacatcatttattaatgagaatgaaacctttataaaac

SEQ ID NO: 202859 - DNA, 1375 bp, Zea Mays
gttaaacctaactgcctctcctgtctcccagtctctcgccgctcgcctctcagccgccgcgtgcctcccagtctcccgccctcgcctctctcttcctctcctctctccctgcgcgccgccgccgtgcctcgccttgcccagagactaaggcgccaggatagtataaatttagttcacgtgattgtggacttctcgccttttggattcaacattttctgcttctcagctctggaatacagaagtgccattgtgggctcaagaggataatgtacgggaggcgtgcatcgcagctgctgaaggagatcgactcctctgaggctggccagctcgtgccattcaacagtgacgtgtttgatcaagtgattagagagtgcaatgagcacaactcacaatttcaatcgttgatcagtacaggaaaatggtggagcaaaacttagatatcgagacaactagaaatgaagatcactatggtgcagctatccaccatctttccctgctccgtaacaaaagatgccttatggcttacatgtacaaccgagcagaagttatccagagttttagatggaaaattggccctgtgcttcctcatgacatacaagaaaagctccatttctcagaaaaggagtacttcaagaaccactctgcagccattaaatcatacatatcagagatggatatagatttgacagtggacatggttcctcccaaggatccttacattcaggttcgggtgctggaggacattggtgaagtatcgctcggtgaccattctgtgtcattgaccaagaactcactccatttcctaaggcgcacagacgctgaacagtttatatcacagggtcttatggaagaatttctggagtagggatcacatgtatgaatgtatgatggtacaataggatggtgcactgccctcgttctccccagcgatgctgcctgatgccctatttgcaacaatgaaaagacgcgttctgtaccaaggagcttcttaactagtcgctggacgatgatttcgaaagttgtgcaggcagtcctatactagattcattgcctctatttacatgtggatgacttttagttagtgtgccatccaagaaagcagatgttgcaaacattgtaacttgtgtattaacattggttttgctggtagatttcatatttgtgtttccaagattccatgtaatcaagaaaaaaaatgaaatcttggttgaaacagtctttcacagtgaggagttagtttcattttatagctaacatgcaagagacaatatgtctagttaacatttcatctatttctccattaattgcttgcctcatcatctaaactgttgacatgtcacatcatttattaatgagaatgaaacctttataaaac

SEQ ID NO: 202860 - DNA, 892 bp, Zea Mays
cttactgtcatcaattgccagagttcaagtccattcttccggatcgaaagacaatgtttgacatatcaatggctggtcctgtggctggagctgcactttccttttcaatgttctttgttggcttattactctcttcaaatcctgttggggcaagtgatttagtggaagtacctagtcagctgttccagggttcattgttgcttggacttattagtagagcaacgcttggatacagagctatgcatgctgctacagtttcgatccaccctcttgtgattgcaggctggtgcggtttaactactagtgcatttaatatgcttcctgttggttgtcttgatggtggaagagcattacagcttggagggccactgtctcttccttggggtttgtacgtgctaatatgtcagagaacacccgagaaaccatgcttgaacgacgtgagcgatgttggaagttggaggagggcggccttgatagcttcagtatttcttgttgttttgacgctcattccgttgtgggatgaacttgcggaggaactaggtgtagggcttgtttcttcgttctgagatgcggtgcttaccgatagaattaggccgtgatgtagttcagttttgtgttgaaatgtagcttcccacggtggaattgttgtaaaggtatgtggaatttccggattaggtgagcaatgatatcgcttatgcgagtgtaatgaaattgtgccaagtatagacgctaacgattaccaattacatacatgtatgctcacttaaccatacagttttgtgttgtaaactagaatgtatggatttataaaaatgagaataggcatgtcaagtccaggacttgaaatctggctaggcaggttatgctgaatcagacgcggcacttgataaag

SEQ ID NO: 202861 - DNA, 2184 bp, Zea Mays
cacttcgactttggacgctggaaagtggaaagcatcgccggctcgccgccaaactcgctgccacgtcggtccgaaccaaatccagcacctctctcccctcccccttcctcccgtcccccgtcgacagtcgcatcgcaccctatcctccccagtccccaccagtccaccaccctctccccgcctcccgctgcgaccaccgcaccggcgaacttggagggccgctcggcgctgcacaccaagccggggatggccgccgcgcttgcgagctcgccgcttgttcacctaactacctcccgcctccgcctccccaggccccaggcctccgcttctagttcgggtccagtctgctcgatcggcgtgtgcttgggatggaggctgaaggtcgggtggagggccctgaggcggcgcgaccggcttcgatgcttctccaccgacgggggcggcggggaggagggggaaaagcgtggcgaggaggagacatcggcaacggcggcggcatccccggcctcggttccagcggagacacagactcctggtgtatcaagcgagccaccgctgttgagttttagtgttgataatatcgatacagttaaactgttggaacttctaggcccagaaaaggttgatccagttgatgtcaaggcaattaaggaaaaactctttggttatacgacattctggttgacaaaagaagaaccttttggtgatcttggtgaaggagttcttttcattgggaacctccgtgggaagagagaggaaatctttgcaaaacttcaacggcaagtacgtgaacttaccggtgataaatacaatctttttatggtggaggaacccaattcagaaggggatgacccacgtgggggaccacgtgttagttttggtttgcttaggaaggaagttttctgagccaggacctactacgctatggcagtatgtcatttctctgttacttttccttctcactatgttctcctgcattgagctaggaattgcatcaaagattagcagtcttccaccagaaattgtttcatatttcactgatccaaatgctaccggaccccctcctgacatgcaacttctgctcccatttgtggagtcggctttgccagtggcttacggtgtcttgtctatccaactatttcatgaaattgggcactttttggcagcatttccaaaaaatgttaaactgggaattcctttctttattccgaacttcacccttggaacttttggtgcaattactcagttcaagtccattcttccggatcgaaagacaatgtttgacatatcaatggctggtcctgtggctggagctgcactttccttttcaatgttctttgttggcttattactctcttcaaatcctgttggggcaagtgatttagtggaagtacctagtcagctgttccagggttcattgttgcttggacttattagtagagcaacgcttggatacagagctatgcatgctgctacagtttcgatccaccctcttgtgattgcaggctggtgcggtttaactactagtgcatttaatatgcttcctgttggttgtcttgatggtggaagagcattacagggtgcttttggcaaggatgctttgtttggatttggcctcacaacatattcgttgcttggactaggagtgcttggagggccactgtctcttccttggggtttgtacgtgctaatatgtcagagaacacccgagaaaccatgcttgaacgacgtgagcgatgttggaagttggaggagggcggccttgatagcttcagtatttcttgttgttttgacgctcattccgttgtgggatgaacttgcggaggaactaggtgtagggcttgtttcttcgttctgagatgcggtgcttaccgatagaattaggccgtgatgtagttcagttttgtgttgaaatgtagcttcccacggtggaattgttgtaaaggtatgtggaatttccggattaggtgagcaatgatatcgcttatgcgagtgtaatgaaattgtgccaagtatagacgctaacgattaccaattacatacatgtatgctcacttaaccatacagttttgtgttgtaaactagaatgtatggatttataaaaatgagaataggcatgtcaagtccaggacttgaaatctggctaggcaggttatgctgaatcagacgcggcacttgataaag

SEQ ID NO: 202862 - DNA, 2748 bp, Zea Mays
aaatattcttcctctcatattgttattgatttctttttatattgttatcactcagcgattgtatccaggattcccctccttggtacacaattatcgaacttggcttcactagataaaacaaatcaattgcagtttctttcttttttgtttcactattcatctgaattgttccatgtcgagcagatctttatattattgaggttgtgcttgatatattagaactcgtaactccacatgtcaactgcttcccagttgagcaagagccctggtctcaagccttgagtcttgataaacctccacttgccaactgagtaaaatcccagcatttcgccgtctccttaactcacaaaagttctttgcttccctagtccatcccattgagacccgatctcactggtcagggaccgccggttgaaggagatgctggcggctgagggcatcgttgtgcaatctttcaattcggatctgctgtacgagccatgggaagttgtcgatgatgaagggcagccattcaccatgttcgacccgttctggaacaggtgcctcagcatgccgtatgacccccctgcaccgcttctgcccccgaagaggatcaattcaggtgacttatcgatgtgcccatcggaggatctgatctttgaggacgagtcagagaggggaagcaacgctcttctggcccgagcgtggacgccagggtggcagaacgcagacaaggcgctgacggccttcctcaacggcccactggccgactactcagtgaaccgcaagaaggccgatagcgcgagcacgtccctgctgtcgcctcacctgcacttcggcgagcttagcgtgcgcaaggtcttccacctagttcgcatgaagcagctcgtgtggagcaacgagggcaaccacgctgccgaggagagctgcaccctgttcctccgttccatcggcctgcgggagtactcccggtacctgagcttcaatcacccgagcagccatgagaggcccctcctggcgcacctcaggttcttcccctgggtggtggacgagagctacttcaagatttggaggcagggaaggaccgggtacccgctcgtcgacgctggcatgagggagctgtgggcgacggggtggctgcatgaccggatacgtgtggtggtggcaagcttcttcgtcaaggtcctccagcttccatggcgatggggcatgaagtacttttgggacacgttactggatgctgatcttgagagcgatgcgctgggctggcagtacatcactggctctcttcctgatggccgggagcttgaccgcatcgacaacccccagtttgaaggctacaagttcgacccgcatggggagtacgtccggcgatggattcctgagctcgcaaggctgccgacggagtggatacaccatccatgggacgcgcctgtctccgtgctgcaagctgcaggaatcgagctgggctctaactaccctctccccatagtggagctggacgcggccaagggcaggctgcaagcggccctgtcagagatgtggcagctggaggcggcgtcgagggccaccatgaacaacgggacggaggaaggcctcggcgactcctcggaggtcctgttccctcaagagctgcagatggaggtcgaccggcagccagccccagccgaggcagcagccaacgtgcacgtgcacgtgccgatgcctgcccggaggcgcggggaccagatggtgcccaccatgacgacctcttcgctgaacagagctggaacagaggtctccgccgatctagtagtagcgaacagcgaggaggaggacaccagggcgcaggttccgttccacgcgcatctccatctccacccccgagccgaagccccgccagctgcgcgtagaaccaacaacggcgctcgccagcacgacgtcttccagcagcgtcggaaccacaggcgagatgctctgcttgctccgtcggcgtcggaggcttcgagcagctggaccggcagagagggcgccgtggtcccggtctggtcgcctcctgcggcgtcgggccattcggacgccttcgccgccgacgaagctgacgtctctagtaggagctatctgggtaggcatccgcagtcgcaccgcctgatgaactggagccaactatcgcagtcatcgtgagctcggatgcacggtaacccattttgttctcactaatattgttgttgttgttatgattaatagtagctgaaatcgcgtctaacatctggtgaaacttgcactgcaggacagcagcagaagattctgtgcggccaaacttaatcgagctgaagattctcgtatgtagattgtccactgaactactcatccatagtctgatgggatggaaaccaggcggcttttcctggttgtggtggctatagctgtgtaaatctcgtcttctagaacgtgtgtggtcgatatagtgcggttggctttacaaccaaaaaaaaaggtcgctattattgatcagacgacaaaggttttccgtatttttttagccttttttgggggaggtatgtgatgtatgtaaccgtaactgtacattcccttgtgctgaccatattgttagttgtagtttccatgcgtcttgtattgctgttttgggctgaggagtgatgaaccatggaccatggtcacgtttgccggtccatatggattggagggctaaaattcctattaaaaagtaagggggttttagctcctctaattcacgtgttgtttggttcacgaaatgtaacgtaaatg

SEQ ID NO: 202863 - DNA, 2007 bp, Zea Mays
attcatttatctcgaagaatcattctaacagagaatcagaataagtgtcgaacacaaacagcaagaaccaccaagcgaccaagccaccaagggagcccgatctgagtcaagcgtcttcccatttcatcgcctggaaaaaggcgagaaaccccgaagtgaaggaacagcagcacgagtgctagcagcagcagcgattccttcgccataccgttcgccgcgctcgctcactcggatcgaaccctccctagggtttcgcatcgtcctcccgccaactcctatccctcccccctccctccgccgcgcgcgcgcggggagctaccaaaccctaggacggcaaatccggtgcgatcgcccacggtggaggcctcgtcggccgccgagaggagccgctcggggctcgggtcagggttccggtacttcgccggcgccgcctctgggtggtgggaccggtggatggtcatgggagccagcggctccaagcttgagaaggccctcggagaccagttcccggaaggcgagcgctacttcggcctcgagaacttcggcaacacttgctactgcaacagtgtccttcaggcactttatttttgcattccattcagggagcagttactggaatattatgcaaataacaaaactccaggtgacgttgaggaaaatcttttgacttgtttggccgacctttttatgcagataagccaagcaaagaaaaagaccggtgttattgctccaaaacgttttgttcagagagtgaagaaacagaatgagttgtttcgcagctacatgcaccaggatgcacacgagttcttaaattttcttttgaatgaacttgttgatattctggaaaaagagtcaagtgctgctaaggactcaccccaatcatcatctccagaaaaagctccaaatggcccagttcaacctttagccaatggagttaaaaaagaaccaccagttactctggtccataaaaatttccagggcatattgaccaatgaaacaagatgcctaagatgtgaaacagtaactgcaagggatgaaacgtttcttgatcttagtgttgacattgaacaaaatagttctatcacaagctgcctgaaaaatttctgttctacagagactttaaacgcagaggataaattcttctgtgacaaatgctgcagtttgcaagaagcacagaagagaatgaagatcaagaaggctccccacatactggtgatccatctaaagcgtttcaagtacattgagcagcttggccggtataagaagctttcataccgggttgtattccccatggaactgaagctcagtaatacatctgacgatgtagacactgagtattccctctttgctgtcgtggtccatgttggaagtggccccaaccatgggcactatgtaagccttgtcaaaagccacaaccactggttgttcttcgatgacgaaaacgtcgagatggttgaagagcagaccctacaaacattcttcggttcctcacatgaatactcaggcaacacagaccatgggtatatcttgttttatgaggggcttggtgggaagagttagatgggtttattcatcttccttgtttcttttctccttttctctttggagcttgcaaattcactcttgtgcctacacagctactatttcattacctccatgggaaacgggtcaatcgaaggggtgttgtatgaggaaagctgactagcaacgttcccgctcatcgctctgacggggtgcggtcagagccagtgccgtctggaggctcacgtgaggccatctcgtccttcgcccaccataataattaaggttaacaagcagctctcagcttacttggtggcgctcgttcgttgatagcatcttctttctttctttctttctttccacttcaatcatcgcgcttctgtctcttgcgcctttccatgtagtaaggctttgccgcaatcaagttgatgtgtaagtaatcgtatatgtggtatttggtatcgtgatgttccaacaactgccaag

SEQ ID NO: 202864 - DNA, 2033 bp, Zea Mays
gtcgaacacaaacagcaagaaccaccaagcgaccaagccaccaagggagcccgatctgagtcaagcgtcttcccatttcatcgcctggaaaaaggcgagaaaccccgaagtgaaggaacagcagcacgagtgctagcagcagcagcgattccttcgccataccgttcgccgcgctcgctcactcggatcgaaccctccctagggtttcgcatcgtcctcccgccaactcctatccctcccccctccctccgccgcgcgcgcgcggggagctaccaaaccctaggacggcaaatccggtgcgatcgcccacggtggaggcctcgtcggccgccgagaggagccgctcggggctcgggtcagggttccggtacttcgccggcgccgcctctgggtggtgggaccggtggatggtcatgggagccagcggctccaagcttgagaaggccctcggagaccagttcccggaaggcgagcgctacttcggcctcgagaacttcggcaacacttgctactgcaacagtgtccttcaggcactttatttttgcattccattcagggagcagttactggaatattatgcaaataacaaaactccaggtgacgttgaggaaaatcttttgacttgtttggccgacctttttatgcagataagccaagcaaagaaaaagaccggtgttattgctccaaaacgttttgttcagagagtgaagaaacagaatgagttgtttcgcagctacatgcaccaggatgcacacgagttcttaaattttcttttgaatgaacttgttgatattctggaaaaagagtcaagtgctgctaaggactcaccccaatcatcatctccagaaaaagctccaaatggcccagttcaacctttagccaatggagttaaaaaagaaccaccagttactctggtccataaaaatttccagggcatattgaccaatgaaacaagatgcctaagatgtgaaacagtaactgcaagggatgaaacgtttcttgatcttagtgttgacattgaacaaaatagttctatcacaagctgcctgaaaaatttctgttctacagagactttaaacgcagaggataaattcttctgtgacaaatgctgcagtttgcaagaagcacagaagagaatgaagatcaagaaggctccccacatactggtgatccatctaaagcgtttcaagtacattgagcagcttggccggtataagaagctttcataccgggttgtattccccatggaactgaagctcagtaatacatctgacgatgtagacactgagtattccctctttgctgtcgtggtccatgttggaagtggccccaaccatgggcactatgtaagccttgtcaaaagccacaaccactggttgttcttcgatgacgaaaacgtcgagatggttgaagagcagaccctacaaacattcttcggttcctcacatgaatactcaggcaacacagaccatgggtatatcttgttttatgaggggcttggtgggaagagttagatgggtttattcatcttccttgtttcttttctccttttctctttggagcttgcaaattcactcttgtgcctacacagctactatttcattacctccatgggaaacgggtcaatcgaaggggtgttgtatgaggtgaggacgccagattttgggtggtttcagtgtacaggggataatggaatctagctccaacgatgaaataaggaaagctgactagcaacgttcccgctcatcgctctgacggggtgcggtcagagccagtgccgtctggaggctcacgtgaggccatctcgtccttcgcccaccataataattaaggttaacaagcagctctcagcttacttggtggcgctcgttcgttgatagcatcttctttctttctttctttctttccacttcaatcatcgcgcttctgtctcttgcgcctttccatgtagtaaggctttgccgcaatcaagttgatgtgtaagtaatcgtatatgtggtatttggtatcgtgatgttccaacaactgccaag

SEQ ID NO: 202865 - DNA, 2798 bp, Zea Mays
gtcgaacacaaacagcaagaaccaccaagcgaccaagccaccaagggagcccgatctgagtcaagcgtcttcccatttcatcgcctggaaaaaggcgagaaaccccgaagtgaaggaacagcagcacgagtgctagcagcagcagcgattccttcgccataccgttcgccgcgctcgctcactcggatcgaaccctccctagggtttcgcatcgtcctcccgccaactcctatccctcccccctccctccgccgcgcgcgcgcggggagctaccaaaccctaggacggcaaatccggtgcgatcgcccacggtggaggcctcgtcggccgccgagaggagccgctcggggctcgggtcagggttccggtacttcgccggcgccgcctctgggtggtgggaccggtggatggtcatgggagccagcggctccaagcttgagaaggccctcggagaccagttcccggaaggcgagcgctacttcggcctcgagaacttcggcaacacttgctactgcaacagtgtccttcaggcactttatttttgcattccattcagggagcagttactggaatattatgcaaataacaaaactccaggtgacgttgaggaaaatcttttgacttgtttggccgacctttttatgcaggtaacatgtagatatgattataccaaatgatataaatgactctagagtgtcgtaatttcttgttgaattttgacttttttgggtatcacttggactagaggttgaaacaatgattccataggttaacagctgtagtgctatatccgagtttcttgtggtacaagtgtacaaagaatgtatattttgtcttgcttcgaggtgatgatactcatgtagagtttacccactgtaaatgaaataaatccttctcattttctctatatttttatatgagcttattagttctcgttattgacagatacatttttggcttaaatatattaagagtttcaaaatctccaattatctggccctttcctgataggatatatgctgcattcctgcttactaacttttgttagctgcattcaagttctaaatattaacatgtgcagtattctagctgtatatgtatagctttctttgtataacactgtcaatagaggtccattcatggatatgctctttgcttggcactccatgttccttatgctgttcaatatattagttgttgggaaattagttttgcttcctacttaggttgtctccagcagatcgtgcatatggtcgtgcaaaatactgttttacactttagattgcactgcttacatagtgacgtttgaaataggagataagatgggagataggatgagtaagctgttggagacaaccttacagtgagataatagtatactactcatataaactgaaaacccacattcgtgcaacatagaacatacccactcatggacgcatcatgcatgcacatgtggcatgcttggatagcatcaccattgggcatttggataatgaatctcatgctaagtcgtacttaatgtgagctctgtgattgtagctataaaatattttttttgtacttcctcttgctttgcaattggttgttggacaacttgcttaaggtaatgggttctgttctactgctaattacctgacatataatcaatgtatcaaattgtctaatctatcctagtctccatggcacctatcagcctgactaattgtgacttatggtagtgcataaccgattgctatagcaccaatcatcctgatttatcacgattaatcagatcagatgacttgttaacattgcatataatatgatcctgatgccatttaaatttgtatggtaaatatctttgacttgacatctttgttgtcaatgcattgtttcacttcatgcttgtgtgtcagtgttactacatagtgttttgtatatcacgtgaaacttctgcaatctgcacgatattgcaaattgccaccataaagaacgaagaggtgaattaagaggtggtcattgtgtatcacgtagataagccaagcaaagaaaaagaccggtgttattgctccaaaacgttttgttcagagagtgaagaaacagaatgagttgtttcgcagctacatgcaccaggatgcacacgagttcttaaattttcttttgaatgaacttgttgatattctggaaaaagagtcaagtgctgctaaggactcaccccaatcatcatctccagaaaaagctccaaatggcccagttcaacctttagccaatggagttaaaaaagaaccaccagttactctggtccataaaaatttccagggcatattgaccaatgaaacaagatgcctaagatgtgaaacagtaactgcaagggatgaaacgtttcttgatcttagtgttgacattgaacaaaatagttctatcacaagctgcctgaaaaatttctgttctacagagactttaaacgcagaggataaattcttctgtgacaaatgctgcaggaaagctgactagcaacgttcccgctcatcgctctgacggggtgcggtcagagccagtgccgtctggaggctcacgtgaggccatctcgtccttcgcccaccataataattaaggttaacaagcagctctcagcttacttggtggcgctcgttcgttgatagcatcttctttctttctttctttctttccacttcaatcatcgcgcttctgtctcttgcgcctttccatgtagtaaggctttgccgcaatcaagttgatgtgtaagtaatcgtatatgtggtatttggtatcgtgatgttccaacaactgccaag

SEQ ID NO: 202866 - DNA, 889 bp, Zea Mays
cttcgtcggatatgtccaaactatctcaaccggtgtcgggcaagaacctgtgccacagttggtgtggaagattatctccgtctgaagtggctgacaaagtaaagcacttcttcaagtactacgccataaaccggcacaagatgactgttttgaccccatcttatcatgctgagagctattcaccagaagataataggttcgaccttcgccagtttctttacaactcaaggtggccctaccagtttcggaagatcaatgagcttgtgcaagagatggacaaagatggcaaatggggaacttctgcagaagggaagctgggagcgcagacaggtgcacagggaactggaatgggagtggtggcagcggggtctgccaatcccagtgccggcttctgaagagaaccatactaacgcgtggaagctagttcctccagtttttcggccttgacagaataatgcaccagccgtccagcccccaccccaggacacgggctgctaatgttaatttgtctgcttggttcccttgtactgcatcacttctccctgctagagagctggaatccccacaaaattttaggctaccagttctgtttcttccatttgtcatagtacgatctacaaagtatcaaccaaagaacatgtgaaaaataagatggaatccctttaatcagattgtttgtccgaagtggcatggcgatgaaaaggaaaacatcagtataaagaactagttactcataattctttgttctgtaaagagtcctttctaaataatgctgtgtgcatgatgatgatgatgtgatgtgatttctaccatgacttcaaagaactcaatatttgcaccttaactctccaattttctagttttaacatcacttttgaataccgttttg

SEQ ID NO: 202867 - DNA, 1922 bp, Zea Mays
aaaaaatctgcaactattcaagcaggtgcgaaactccttggaccctactaaaaattggtatcgagttatcgagcatctgtttctagtttcagagagcaagcaagccacaaaacaaatgtaccttttgtgaaggtaccatataaactttgccaaccatttcggagtggaatggttccgacttctccagttgagattatgtatcactgtcctgaagaagagattgcatttggacctagttgttggctatgggattatttgaggcggagtcaagcatcaggatttttgcttccactttctggtggtgcggatagttcatctgttgcggcaatagtcgggtgcatgtgccaacttgtcataaaagatatagagaaaggagacgagcaagttaaggcagatgctcttcggattgggcagtataaagatggggcaattcccatggatagcagggaactggctaaacgtttgttttatactgtttacatgggaactgaaaatagttctgaagatacccgatcacgtgccaaaaggctagctgaggagattggttcattccacttgaatgtacccattgatagtatagtatctgcttttctttccttgtttgaaacattgactgggaagcgaccacgctacaaggttgatggggggtcaaatactgagaatctgggattgcaaaatattcaagcccgaatcaggatggtgttagcctttatgatggcttctctaatgccatgggtccacaacaaatctgggttttatcttgttcttggaagctccaacgtcgatgaagggttacgtggttatttgacaaagtatgactgcagttcagctgatgtaaaccccattggaagtgtaagtaagcaagatctgagagcttttttacgatgggcagcaattcatcttaagtattcttccttggccgaggttgaagctgcaccacctactgccgagcttgagccaatacgagcaaactacaatcagttggatgaaatagacatgggaatgacatatgaggagctgtctatatatggaaggttaaggaaaattttccgatgtggtcctgtttcaatgtttcagaacctgtgccacagttggtgtggaagattatctccgtctgaagtggctgacaaagtaaagcacttcttcaagtactacgccataaaccggcacaagatgactgttttgaccccatcttatcatgctgagagctattcaccagaagataataggttcgaccttcgccagtttctttacaactcaaggtggccctaccagtttcggaagatcaatgagcttgtgcaagagatggacaaagatggcaaatggggaacttctgcagaagggaagctgggagcgcagacaggtgcacagggaactggaatgggagtggtggcagcggggtctgccaatcccagtgccggcttctgaagagaaccatactaacgcgtggaagctagttcctccagtttttcggccttgacagaataatgcaccagccgtccagcccccaccccaggacacgggctgctaatgttaatttgtctgcttggttcccttgtactgcatcacttctccctgctagagagctggaatccccacaaaattttaggctaccagttctgtttcttccatttgtcatagtacgatctacaaagtatcaaccaaagaacatgtgaaaaataagatggaatccctttaatcagattgtttgtccgaagtggcatggcgatgaaaaggaaaacatcagtataaagaactagttactcataattctttgttctgtaaagagtcctttctaaataatgctgtgtgcatgatgatgatgatgtgatgtgatttctaccatgacttcaaagaactcaatatttgcaccttaactctccaattttctagttttaacatcacttttgaataccgttttg

SEQ ID NO: 202868 - DNA, 1909 bp, Zea Mays
gatcagagtgctgtttacagatgatgtattaactatatggttgttgctgcattgcggtaaacggtgatttggtaggccagggatctcaattctcgttgaaggatgtagaagttctggatgctctggtagatcttgatgctgtatcgagttatcgagcatctgtttctagtttcagagagcaagcaagccacaaaacaaatgtaccttttgtgaaggtaccatataaactttgccaaccatttcggagtggaatggttccgacttctccagttgagattatgtatcactgtcctgaagaagagattgcatttggacctagttgttggctatgggattatttgaggcggagtcaagcatcaggatttttgcttccactttctggtggtgcggatagttcatctgttgcggcaatagtcgggtgcatgtgccaacttgtcataaaagatatagagaaaggagacgagcaagttaaggcagatgctcttcggattgggcagtataaagatggggcaattcccatggatagcagggaactggctaaacgtttgttttatactgtttacatgggaactgaaaatagttctgaagatacccgatcacgtgccaaaaggctagctgaggagattggttcattccacttgaatgtacccattgatagtatagtatctgcttttctttccttgtttgaaacattgactgggaagcgaccacgctacaaggttgatggggggtcaaatactgagaatctgggattgcaaaatattcaagcccgaatcaggatggtgttagcctttatgatggcttctctaatgccatgggtccacaacaaatctgggttttatcttgttcttggaagctccaacgtcgatgaagggttacgtggttatttgacaaagtatgactgcagttcagctgatgtaaaccccattggaagtgtaagtaagcaagatctgagagcttttttacgatgggcagcaattcatcttaagtattcttccttggccgaggttgaagctgcaccacctactgccgagcttgagccaatacgagcaaactacaatcagaacctgtgccacagttggtgtggaagattatctccgtctgaagtggctgacaaagtaaagcacttcttcaagtactacgccataaaccggcacaagatgactgttttgaccccatcttatcatgctgagagctattcaccagaagataataggttcgaccttcgccagtttctttacaactcaaggtggccctaccagtttcggaagatcaatgagcttgtgcaagagatggacaaagatggcaaatggggaacttctgcagaagggaagctgggagcgcagacaggtgcacagggaactggaatgggagtggtggcagcggggtctgccaatcccagtgccggcttctgaagagaaccatactaacgcgtggaagctagttcctccagtttttcggccttgacagaataatgcaccagccgtccagcccccaccccaggacacgggctgctaatgttaatttgtctgcttggttcccttgtactgcatcacttctccctgctagagagctggaatccccacaaaattttaggctaccagttctgtttcttccatttgtcatagtacgatctacaaagtatcaaccaaagaacatgtgaaaaataagatggaatccctttaatcagattgtttgtccgaagtggcatggcgatgaaaaggaaaacatcagtataaagaactagttactcataattctttgttctgtaaagagtcctttctaaataatgctgtgtgcatgatgatgatgatgtgatgtgatttctaccatgacttcaaagaactcaatatttgcaccttaactctccaattttctagttttaacatcacttttgaataccgttttg

SEQ ID NO: 202869 - DNA, 2237 bp, Zea Mays
caccactttctgagcttgaaatgttctgcagtttatccatgaaggtctttggctgctgaaacctgtgaagagctctttacagcaaacgctcctcggattgacttagcattgaatggtgttgaggttttcatgaatgcaagtggaagccaccatcagttaaggaagctcaatcttcgtattgattccataaggagtgcaacccaaacatgtggcggtgtttacatgtatgctaatcagcagggttgcgatggtggccgcctttattacgatggttgttgctgcattgcggtaaacggtgatttggtaggccagggatctcaattctcgttgaaggatgtagaagttctggatgctctggtagatcttgatgctgtatcgagttatcgagcatctgtttctagtttcagagagcaagcaagccacaaaacaaatgtaccttttgtgaaggtaccatataaactttgccaaccatttcggagtggaatggttccgacttctccagttgagattatgtatcactgtcctgaagaagagattgcatttggacctagttgttggctatgggattatttgaggcggagtcaagcatcaggatttttgcttccactttctggtggtgcggatagttcatctgttgcggcaatagtcgggtgcatgtgccaacttgtcataaaagatatagagaaaggagacgagcaagttaaggcagatgctcttcggattgggcagtataaagatggggcaattcccatggatagcagggaactggctaaacgtttgttttatactgtttacatgggaactgaaaatagttctgaagatacccgatcacgtgccaaaaggctagctgaggagattggttcattccacttgaatgtacccattgatagtatagtatctgcttttctttccttgtttgaaacattgactgggaagcgaccacgctacaaggttgatggggggtcaaatactgagaatctgggattgcaaaatattcaagcccgaatcaggatggtgttagcctttatgatggcttctctaatgccatgggtccacaacaaatctgggttttatcttgttcttggaagctccaacgtcgatgaagggttacgtggttatttgacaaagtatgactgcagttcagctgatgtaaaccccattggaagtgtaagtaagcaagatctgagagcttttttacgatgggcagcaattcatcttaagtattcttccttggccgaggttgaagctgcaccacctactgccgagcttgagccaatacgagcaaactacaatcagttggatgaaatagacatgggaatgacatatgaggagctgtctatatatggaaggttaaggaaaattttccgatgtggtcctgtttcaatgtttcagaacctgtgccacagttggtgtggaagattatctccgtctgaagtggctgacaaagtaaagcacttcttcaagtactacgccataaaccggcacaagatgactgttttgaccccatcttatcatgctgagagctattcaccagaagataataggttcgaccttcgccagtttctttacaactcaaggtggccctaccagtttcggaagatcaatgagcttgtgcaagagatggacaaagatggcaaatggggaacttctgcagaagggaagctgggagcgcagacaggtgcacagggaactggaatgggagtggtggcagcggggtctgccaatcccagtgccggcttctgaagagaaccatactaacgcgtggaagctagttcctccagtttttcggccttgacagaataatgcaccagccgtccagcccccaccccaggacacgggctgctaatgttaatttgtctgcttggttcccttgtactgcatcacttctccctgctagagagctggaatccccacaaaattttaggctaccagttctgtttcttccatttgtcatagtacgatctacaaagtatcaaccaaagaacatgtgaaaaataagatggaatccctttaatcagattgtttgtccgaagtggcatggcgatgaaaaggaaaacatcagtataaagaactagttactcataattctttgttctgtaaagagtcctttctaaataatgctgtgtgcatgatgatgatgatgtgatgtgatttctaccatgacttcaaagaactcaatatttgcaccttaactctccaattttctagttttaacatcacttttgaataccgttttg

SEQ ID NO: 202870 - DNA, 2761 bp, Zea Mays
tgctttcgatgttcttctgtgattcgatcccccacaggccacagccagaggccagagccgaaaccaaatattcttccgccgccggccgactgctgcattcaattccccttcgcgccccgaaagccgaaccaacgagcctcgcaggtcggcggtctcgattagggaggaggaagggagtggcccctgatctgggtggcgggcgagatgaggctactgcgggtcgccacgtgcaacctcaaccagtgggcgatggacttcgacaccaacctccgcaacgtcaaggagtccatcaagcgcgccaaggctgctggggccgtcatccgcgtcggccccgagctcgagctcaccggctacggctgcgaggaccacttcctcgagcaggacaccaccgcccacgcatgggagtgcttaaaggacattttaactggggactatacggacaacatcttatgcagcataggaatgccagttattttcaatagtgtgcggtataattgccaggtcttctgcctaaatcgtaagataatcatgatccgaccaaagatgtcccttgcaaatgatggaaattatcgggaattccgttggttttctgcttggacatttaaaggcgagattgttgattttcagctccccgttgaagtctcagaggcaatatcccaggatacggtgccttttggttatggatacatgcggtttatagatgtgtctttggctgctgaaacctgtgaagagctctttacagcaaacgctcctcggattgacttagcattgaatggtgttgaggttttcatgaatgcaagtggaagccaccatcagttaaggaagctcaatcttcgtattgattccataaggagtgcaacccaaacatgtggcggtgtttacatgtatgctaatcagcagggttgcgatggtggccgcctttattacgatggttgttgctgcattgcggtaaacggtgatttggtaggccagggatctcaattctcgttgaaggatgtagaagttctggatgctctggtagatcttgatgctgtatcgagttatcgagcatctgtttctagtttcagagagcaagcaagccacaaaacaaatgtaccttttgtgaaggtaccatataaactttgccaaccatttcggagtggaatggttccgacttctccagttgagattatgtatcactgtcctgaagaagagattgcatttggacctagttgttggctatgggattatttgaggcggagtcaagcatcaggatttttgcttccactttctggtggtgcggatagttcatctgttgcggcaatagtcgggtgcatgtgccaacttgtcataaaagttctgaagatacccgatcacgtgccaaaaggctagctgaggagattggttcattccacttgaatgtacccattgatagtatagtatctgcttttctttccttgtttgaaacattgactgggaagcgaccacgctacaaggttgatggggggtcaaatactgagaatctgggattgcaaaatattcaagcccgaatcaggatggtgttagcctttatgatggcttctctaatgccatgggtccacaacaaatctgggttttatcttgttcttggaagctccaacgtcgatgaagggttacgtggttatttgacaaagtatgactgcagttcagctgatgtaaaccccattggaagtgtaagtaagcaagatctgagagcttttttacgatgggcagcaattcatcttaagtattcttccttggccgaggttgaagctgcaccacctactgccgagcttgagccaatacgagcaaactacaatcagttggatgaaatagacatgggaatgacatatgaggagctgtctatatatggaaggttaaggaaaattttccgatgtggtcctgtttcaatgtttcagaacctgtgccacagttggtgtggaagattatctccgtctgaagtggctgacaaagtaaagcacttcttcaagtactacgccataaaccggcacaagatgactgttttgaccccatcttatcatgctgagagctattcaccagaagataataggttcgaccttcgccagtttctttacaactcaaggtggccctaccagtttcggaagatcaatgagcttgtgcaagagatggacaaagatggcaaatggggaacttctgcagaagggaagctgggagcgcagacaggtgcacagggaactggaatgggagtggtggcagcggggtctgccaatcccagtgccggcttctgaagagaaccatactaacgcgtggaagctagttcctccagtttttcggccttgacagaataatgcaccagccgtccagcccccaccccaggacacgggctgctaatgttaatttgtctgcttggttcccttgtactgcatcacttctccctgctagagagctggaatccccacaaaattttaggctaccagttctgtttcttccatttgtcatagtacgatctacaaagtatcaaccaaagaacatgtgaaaaataagatggaatccctttaatcagattgtttgtccgaagtggcatggcgatgaaaaggaaaacatcagtataaagaactagttactcataattctttgttctgtaaagagtcctttctaaataatgctgtgtgcatgatgatgatgatgtgatgtgatttctaccatgacttcaaagaactcaatatttgcaccttaactctccaattttctagttttaacatcacttttgaataccgttttg

SEQ ID NO: 202871 - DNA, 2834 bp, Zea Mays
gcgggcacgcctccggtgctttcgatgttcttctgtgattcgatcccccacaggccacagccagaggccagagccgaaaccaaatattcttccgccgccggccgactgctgcattcaattccccttcgcgccccgaaagccgaaccaacgagcctcgcaggtcggcggtctcgattagggaggaggaagggagtggcccctgatctgggtggcgggcgagatgaggctactgcgggtcgccacgtgcaacctcaaccagtgggcgatggacttcgacaccaacctccgcaacgtcaaggagtccatcaagcgcgccaaggctgctggggccgtcatccgcgtcggccccgagctcgagctcaccggctacggctgcgaggaccacttcctcgagcaggacaccaccgcccacgcatgggagtgcttaaaggacattttaactggggactatacggacaacatcttatgcagcataggaatgccagttattttcaatagtgtgcggtataattgccaggtcttctgcctaaatcgtaagataatcatgatccgaccaaagatgtcccttgcaaatgatggaaattatcgggaattccgttggttttctgcttggacatttaaaggcgagattgttgattttcagctccccgttgaagtctcagaggcaatatcccaggatacggtgccttttggttatggatacatgcggtttatagatgtgtctttggctgctgaaacctgtgaagagctctttacagcaaacgctcctcggattgacttagcattgaatggtgttgaggttttcatgaatgcaagtggaagccaccatcagttaaggaagctcaatcttcgtattgattccataaggagtgcaacccaaacatgtggcggtgtttacatgtatgctaatcagcagggttgcgatggtggccgcctttattacgatggttgttgctgcattgcggtaaacggtgatttggtaggccagggatctcaattctcgttgaaggatgtagaagttctggatgctctggtagatcttgatgctgtatcgagttatcgagcatctgtttctagtttcagagagcaagcaagccacaaaacaaatgtaccttttgtgaaggtaccatataaactttgccaaccatttcggagtggaatggttccgacttctccagttgagattatgtatcactgtcctgaagaagagattgcatttggacctagttgttggctatgggattatttgaggcggagtcaagcatcaggatttttgcttccactttctggtggtgcggatagttcatctgttgcggcaatagtcgggtgcatgtgccaacttgtcataaaagatatagagaaaggagacgagcaagttaaggcagatgctcttcggattgggcagtataaagatggggcaattcccatggatagcagggaactggctaaacgtttgttttatactgtttacatgggaactgaaaatagttctgaagatacccgatcacgtgccaaaaggctagctgaggagattggttcattccacttgaatgtacccattgatagtatagtatctgcttttctttccttgtttgaaacattgactgggaagcgaccacgctacaaggttgatggggggtcaaatactgagaatctgggattgcaaaatattcaagcccgaatcaggatggtgttagcctttatgatggcttctctaatgccatgggtccacaacaaatctgggttttatcttgttcttggaagctccaacgtcgatgaagggttacgtggttatttgacaaagcaattcatcttaagtattcttccttggccgaggttgaagctgcaccacctactgccgagcttgagccaatacgagcaaactacaatcagttggatgaaatagacatgggaatgacatatgaggagctgtctatatatggaaggttaaggaaaattttccgatgtggtcctgtttcaatgtttcagaacctgtgccacagttggtgtggaagattatctccgtctgaagtggctgacaaagtaaagcacttcttcaagtactacgccataaaccggcacaagatgactgttttgaccccatcttatcatgctgagagctattcaccagaagataataggttcgaccttcgccagtttctttacaactcaaggtggccctaccagtttcggaagatcaatgagcttgtgcaagagatggacaaagatggcaaatggggaacttctgcagaagggaagctgggagcgcagacaggtgcacagggaactggaatgggagtggtggcagcggggtctgccaatcccagtgccggcttctgaagagaaccatactaacgcgtggaagctagttcctccagtttttcggccttgacagaataatgcaccagccgtccagcccccaccccaggacacgggctgctaatgttaatttgtctgcttggttcccttgtactgcatcacttctccctgctagagagctggaatccccacaaaattttaggctaccagttctgtttcttccatttgtcatagtacgatctacaaagtatcaaccaaagaacatgtgaaaaataagatggaatccctttaatcagattgtttgtccgaagtggcatggcgatgaaaaggaaaacatcagtataaagaactagttactcataattctttgttctgtaaagagtcctttctaaataatgctgtgtgcatgatgatgatgatgtgatgtgatttctaccatgacttcaaagaactcaatatttgcaccttaactctccaattttctagttttaacatcacttttgaataccgttttg

SEQ ID NO: 202872 - DNA, 2948 bp, Zea Mays
cagacagctggcgccgattcgacctttggagccgggcgagccgcccacgcgggcacgcctccggtgctttcgatgttcttctgtgattcgatcccccacaggccacagccagaggccagagccgaaaccaaatattcttccgccgccggccgactgctgcattcaattccccttcgcgccccgaaagccgaaccaacgagcctcgcaggtcggcggtctcgattagggaggaggaagggagtggcccctgatctgggtggcgggcgagatgaggctactgcgggtcgccacgtgcaacctcaaccagtgggcgatggacttcgacaccaacctccgcaacgtcaaggagtccatcaagcgcgccaaggctgctggggccgtcatccgcgtcggccccgagctcgagctcaccggctacggctgcgaggaccacttcctcgagcaggacaccaccgcccacgcatgggagtgcttaaaggacattttaactggggactatacggacaacatcttatgcagcataggaatgccagttattttcaatagtgtgcggtataattgccaggtcttctgcctaaatcgtaagataatcatgatccgaccaaagatgtcccttgcaaatgatggaaattatcgggaattccgttggttttctgcttggacatttaaaggcgagattgttgattttcagctccccgttgaagtctcagaggcaatatcccaggatacggtgccttttggttatggatacatgcggtttatagatgtgtctttggctgctgaaacctgtgaagagctctttacagcaaacgctcctcggattgacttagcattgaatggtgttgaggttttcatgaatgcaagtggaagccaccatcagttaaggaagctcaatcttcgtattgattccataaggagtgcaacccaaacatgtggcggtgtttacatgtatgctaatcagcagggttgcgatggtggccgcctttattacgatggttgttgctgcattgcggtaaacggtgatttggtaggccagggatctcaattctcgttgaaggatgtagaagttctggatgctctggtagatcttgatgctgtatcgagttatcgagcatctgtttctagtttcagagagcaagcaagccacaaaacaaatgtaccttttgtgaaggtaccatataaactttgccaaccatttcggagtggaatggttccgacttctccagttgagattatgtatcactgtcctgaagaagagattgcatttggacctagttgttggctatgggattatttgaggcggagtcaagcatcaggatttttgcttccactttctggtggtgcggatagttcatctgttgcggcaatagtcgggtgcatgtgccaacttgtcataaaagatatagagaaaggagacgagcaagttaaggcagatgctcttcggattgggcagtataaagatggggcaattcccatggatagcagggaactggctaaacgtttgttttatactgtttacatgggaactgaaaatagttctgaagatacccgatcacgtgccaaaaggctagctgaggagattggttcattccacttgaatgtacccattgatagtatagtatctgcttttctttccttgtttgaaacattgactgggaagcgaccacgctacaaggttgatggggggtcaaatactgagaatctgggattgcaaaatattcaagcccgaatcaggatggtgttagcctttatgatggcttctctaatgccatgggtccacaacaaatctgggttttatcttgttcttggaagctccaacgtcgatgaagggttacgtggttatttgacaaagtatgactgcagttcagctgatgtaaaccccattggaagtgtaagtaagcaagatctgagagcttttttacgatgggcagcaattcatcttaagtattcttccttggccgaggttgaagctgcaccacctactgccgagcttgagccaatacgagcaaactacaatcagacatgggaatgacatatgaggagctgtctatatatggaaggttaaggaaaattttccgatgtggtcctgtttcaatgtttcagaacctgtgccacagttggtgtggaagattatctccgtctgaagtggctgacaaagtaaagcacttcttcaagtactacgccataaaccggcacaagatgactgttttgaccccatcttatcatgctgagagctattcaccagaagataataggttcgaccttcgccagtttctttacaactcaaggtggccctaccagtttcggaagatcaatgagcttgtgcaagagatggacaaagatggcaaatggggaacttctgcagaagggaagctgggagcgcagacaggtgcacagggaactggaatgggagtggtggcagcggggtctgccaatcccagtgccggcttctgaagagaaccatactaacgcgtggaagctagttcctccagtttttcggccttgacagaataatgcaccagccgtccagcccccaccccaggacacgggctgctaatgttaatttgtctgcttggttcccttgtactgcatcacttctccctgctagagagctggaatccccacaaaattttaggctaccagttctgtttcttccatttgtcatagtacgatctacaaagtatcaaccaaagaacatgtgaaaaataagatggaatccctttaatcagattgtttgtccgaagtggcatggcgatgaaaaggaaaacatcagtataaagaactagttactcataattctttgttctgtaaagagtcctttctaaataatgctgtgtgcatgatgatgatgatgtgatgtgatttctaccatgacttcaaagaactcaatatttgcaccttaactctccaattttctagttttaacatcacttttgaataccgttttg

SEQ ID NO: 202873 - DNA, 4498 bp, Zea Mays
caacaagtgtgtggtggccggtgggctggcagcggcagcgcagcagggtaataaaatccagccagcccctccacgcccggccacaggcgtggatgtacggatgtctcccctgggatgccccaccccgcccccgcgatcctcctccgtctccgttccggccctccgcctccccgccccgtccgtcaaatgattcccaggccctttttccggtaaaaccaccgcaccgaaagggcagcagctcagacgcgcctcgatgcctcgtgctccataaccaacgcccacagcccagccattagccgtgctagtcatcagtaggcgcgcacactcgctcgctcgcagcgcttcgctcgttgccagttgccaccgccattttcccctcgtcggactgaaagagcgctcccccccacccccaccgcggcgggagtgggaaagagcggaggagcatgcgggagggttttcaccgcggcccgagaaaggaggacctgcgccgcgcgcatcgcgacgagccgctccccgctggcacgcacgccaaaaggcgaagaatctctcggctgagcccccccgtcccctccgccaccgccgttgtagccagtaggagggaggaataaaaagcggttttctttcgggcggcaggccggtcggtcgccatggggtgcggccagtccaagatggaggaagagtacgcggtgcgccactgccgggtgcgctccgagctcctcgcgctggccatccgccagcgctacacgctcgccgacgcgcaccacgcctacgccgagtcgctgcgcgccgtcggcgccctgctgcacgacttcctccgcggggtccagtcgctgccgccgccgccgcccgagcccgcgctccgcctcccgcagcagcggaagggcgacggcctccctgccgcgtcgccgccgcccgcgatggcgtcctcctccgccgccgccgccgcgccgcccgtcgccaagcaggtccgcatcgcccccgacgacgggcatatccagttctccgacggcgactccgattccgaggatgggcacatcaagttccactccgacgaagagcccgacccggctcgccgccgcccggaggtcgtccgctccaccggcgcgccgggtcctccgccaccgcagatgggacagccgtatgcctccggcggagggtatgctccgccgccgtatggtcctggatacggttacgggtacgccactgggcctggtccgggtcctggtcctgattatggcggtattggcatgaacggcggcggtggttatgaaccaggccatggtgtcatgtatgggcaaagctatggtggcagcggcagcggcggcggctatgatgaccagggctatggtggcatgggcagtggtggcggcgctggcggctatgaccaaagctatgctggcataggcggatatggccagagcttctttaacatcagctacgctcgcagccagccacctccaccatctgtctcgcacgagcaacgcctggaggcgactaatgccagggtccactactattccggcaatggcgagcagcagccacccccgcgtggctatggtggtgggtactcctacccaccacagagttcaagatcatataatcagtatgcctatggtggttactatggaggtggttctgctcctgcaccaccagcagacatcccatcctcctccggtgagccagcagcagtgccaccgcctccatctccgcccagggtgtccacctgggagttcctggacccgtttggaacttatgagagctactacgagcaaccaactgctacagcagctccatactctcctggcaggagtttgaaggatgtgcgcgaggaggaggggattccagacttggaggacgaagacatggaggtagtcaaggaagcttatggtgatgagaagcaccctgtgaagggttacatggggaacgggaaggccgcaaagggagagggtaggagcagcacgggggatgaattgccccgcaagtccaagtcatctgaggccagtggtagtggtagcagcttggagcatgacgttcatgtagtggaaaaaagtgttgtcggagaacaagttcgacactcggagccacggcagcatgttgccggtctaccacccacaggatcggaaaagctatacattgatgacactgaggtggtggtggagatcaggactcaattcgagcgtgcctcacaatcagctggtgaggtatcaaagatgcttgaggtcggaaagatgccttactaccagaagggttcaggtttcaaagtctccgcaatgattgtttgtggtataccgacaatggaggaggagtttctgcgttttgaagaggacaaggcgatgggctctggcaacctctcctctacactacagaaattgtacatgtgggagaagaagcttcttgaggaagttaagacagaggagacaatgcgggtactgtatgacagaaaacgtgaggagctgaaaatgttagatgagaaaggtgccgaagctcataagcttgaggccactgaagtttacatcaggaagctatcaactaagattagcatagctatccaggttgtaaacactatttcagaaaagattagtaagttgagggatgaagagttgtggcctcaaacatgtgagctcattcaagggttgatgaggatgtggagcgttatgctagaatgccatcagatacaactgcatgccatatcccaagctaaaaacatagactccatgatagacactgcaaagttcggtgacgctcatatggacttgatcaagcggttagagcttcagctattggattggattgcttgttttgttgcatgggttagcgctcaaaagaattatgttaaaaccttaaaccggtggctgacaaatggtgttatctatgttcccgaggaaaccgaggacggggcgcctccattttctcctggaagattaggagggccaccgatcttcgtcatatgtaataactgggctgccagtgtggacaggatatctgagaaagaagtagttgaggcgatgcaggcctttgcatccaacgttctgaacctctgggagaggcacaggtcagagcaaagacagggtctgatggcgaacaaaggcatggacagggatcttagggtgatggaaagagatgagcagtcgatgcgcaaggccctggaagcgcagaacaagaagctcgtgctcgtttcgagtcagggcagcgtgtccttgtccgcgcaagcgttacatgagcagcgaggccctggcgctgaggttggcagtttgcaatcaggcctgagaaatatcttcgaagcgatggagaacttcacttctgcatccgcgaatacatacagggagctccatcttcgcgccgaagaagagaaagcccgagttgcgcaggagagcggcggcagtgttccctaactcctttcaacgcttaggttttacacgaggacatgagcgtctgtcaatgcaaagggaccgccaccagtgacccccctgcggcacagtgacactacaacccttgtggcagctgatgcaccttgctcgccaggtgccccaagtttcgggtttcgggtttcaggctctggtgtggagttaacaggttgcaacacgggttttgttttactaatctgtacatgagttgggctacgtgatgcattctttgatctggatggccagcagttctcctcaaaccggaactgtgaagcacggttatggaaataggtatatcaccaggcatgttctggtagttgtgagacccctggagcgactgagtgaagaagaggcaggcccttgtgcatctgggaagctgaattatgacctctagttggctgtgcaaccccagaagataattggaaggaagatgtaagccgcacgatcttggttcagatcaaagggtggggcatataagatcctgttgtcatgaaatccaagatccatggaacgctgctctccaccccatgtcactatgccagcgctcaaccgtacatacaagaggccaggctatcagaaggtgttccgtaatcgcagcactttggcatgtcattgtacatttgtacagagaggtgatgcgggatgaatcgagctggagcctcttgtccgctgccgagcgcccgagacatatgtttgcttagagtttcctctgctgcgtctggactctacttcgccgtgcaaccgagctggaagtactcttacagggtagacgacgccctgacccgttctgcagatcagctaaccgctccggccctcaacctttttttttgtttattatatatacatattattaattcatttgtagcaccccgtgtacagctgccggcgaacttaaacctgctgcgccatattttattcatttttttcaccacgggtttgccgtgcttgtgaattgctgaatgctctgagcccacctgttgtgatggtctgatggataggtgtaacggtggttagcagtacagcatcgcgatggtgagtttagttacgggctgatctcgccataccaattggataatttcaagcatcggaaaacg

SEQ ID NO: 202874 - DNA, 4295 bp, Zea Mays
cccaccccgcccccgcgatcctcctccgtctccgttccggccctccgcctccccgccccgtccgtcaaatgattcccaggccctttttccggtaaaaccaccgcaccgaaagggcagcagctcagacgcgcctcgatgcctcgtgctccataaccaacgcccacagcccagccattagccgtgctagtcatcagtaggcgcgcacactcgctcgctcgcagcgcttcgctcgttgccagttgccaccgccattttcccctcgtcggactgaaagagcgctcccccccacccccaccgcggcgggagtgggaaagagcggaggagcatgcgggagggttttcaccgcggcccgagaaaggaggacctgcgccgcgcgcatcgcgacgagccgctccccgctggcacgcacgccaaaaggcgaagaatctctcggctgagcccccccgtcccctccgccaccgccgttgtagccagtaggaggtagctaccccagatctgctcgtctccgcgcccgcccgccagattcgccccaccctccgccatgcggttgccgccgccgccgctctgactgggctctcttctgctgtgagagggaggaataaaaagcggttttctttcgggcggcaggccggtcggtcgccatggggtgcggccagtccaagatggaggaagagtacgcggtgcgccactgccgggtgcgctccgagctcctcgcgctggccatccgccagcgctacacgctcgccgacgcgcaccacgcctacgccgagtcgctgcgcgccgtcggcgccctgctgcacgacttcctccgcggggtccagtcgctgccgccgccgccgcccgagcccgcgctccgcctcccgcagcagcggaagggcgacggcctccctgccgcgtcgccgccgcccgcgatggcgtcctcctccgccgccgccgccgcgccgcccgtcgccaagcaggtccgcatcgcccccgacgacgggcatatccagttctccgacggcgactccgattccgaggatgggcacatcaagttccactccgacgaagagcccgacccggctcgccgccgcccggaggtcgtccgctccaccggcgcgccgggtcctccgccaccgcagatgggacagccgtatgcctccggcggagggtatgctccgccgccgtatggtcctggatacggttacgggtacgccactgggcctggtccgggtcctggtcctgattatggcggtattggcatgaacggcggcggtggttatgaaccaggccatggtgtcatccagccacctccaccatctgtctcgcacgagcaacgcctggaggcgactaatgccagggtccactactattccggcaatggcgagcagcagccacccccgcgtggctatggtggtgggtactcctacccaccacagagttcaagatcatataatcagtatgcctatggtggttactatggaggtggttctgctcctgcaccaccagcagacatcccatcctcctccggtgagccagcagcagtgccaccgcctccatctccgcccagggtgtccacctgggagttcctggacccgtttggaacttatgagagctactacgagcaaccaactgctacagcagctccatactctcctggcaggagtttgaaggatgtgcgcgaggaggaggggattccagacttggaggacgaagacatggaggtagtcaaggaagcttatggtgatgagaagcaccctgtgaagggttacatggggaacgggaaggccgcaaagggagagggtaggagcagcacgggggatgaattgccccgcaagtccaagtcatctgaggccagtggtagtggtagcagcttggagcatgacgttcatgtagtggaaaaaagtgttgtcggagaacaagttcgacactcggagccacggcagcatgttgccggtctaccacccacaggatcggaaaagctatacattgatgacactgaggtggtggtggagatcaggactcaattcgagcgtgcctcacaatcagctggtgaggtatcaaagatgcttgaggtcggaaagatgccttactaccagaagggttcaggtttcaaaggaggagtttctgcgttttgaagaggacaaggcgatgggctctggcaacctctcctctacactacagaaattgtacatgtgggagaagaagcttcttgaggaagttaagacagaggagacaatgcgggtactgtatgacagaaaacgtgaggagctgaaaatgttagatgagaaaggtgccgaagctcataagcttgaggccactgaagtttacatcaggaagctatcaactaagattagcatagctatccaggttgtaaacactatttcagaaaagattagtaagttgagggatgaagagttgtggcctcaaacatgtgagctcattcaagggttgatgaggatgtggagcgttatgctagaatgccatcagatacaactgcatgccatatcccaagctaaaaacatagactccatgatagacactgcaaagttcggtgacgctcatatggacttgatcaagcggttagagcttcagctattggattggattgcttgttttgttgcatgggttagcgctcaaaagaattatgttaaaaccttaaaccggtggctgacaaatggtgttatctatgttcccgaggaaaccgaggacggggcgcctccattttctcctggaagattaggagggccaccgatcttcgtcatatgtaataactgggctgccagtgtggacaggatatctgagaaagaagtagttgaggcgatgcaggcctttgcatccaacgttctgaacctctgggagaggcacaggtcagagcaaagacagggtctgatggcgaacaaaggcatggacagggatcttagggtgatggaaagagatgagcagtcgatgcgcaaggccctggaagcgcagaacaagaagctcgtgctcgtttcgagtcagggcagcgtgtccttgtccgcgcaagcgttacatgagcagcgaggccctggcgctgaggttggcagtttgcaatcaggcctgagaaatatcttcgaagcgatggagaacttcacttctgcatccgcgaatacatacagggagctccatcttcgcgccgaagaagagaaagcccgagttgcgcaggagagcggcggcagtgttccctaactcctttcaacgcttaggttttacacgaggacatgagcgtctgtcaatgcaaagggaccgccaccagtgacccccctgcggcacagtgacactacaacccttgtggcagctgatgcaccttgctcgccaggtgccccaagtttcgggtttcgggtttcaggctctggtgtggagttaacaggttgcaacacgggttttgttttactaatctgtacatgagttgggctacgtgatgcattctttgatctggatggccagcagttctcctcaaaccggaactgtgaagcacggttatggaaataggtatatcaccaggcatgttctggtagttgtgagacccctggagcgactgagtgaagaagaggcaggcccttgtgcatctgggaagctgaattatgacctctagttggctgtgcaaccccagaagataattggaaggaagatgtaagccgcacgatcttggttcagatcaaagggtggggcatataagatcctgttgtcatgaaatccaagatccatggaacgctgctctccaccccatgtcactatgccagcgctcaaccgtacatacaagaggccaggctatcagaaggtgttccgtaatcgcagcactttggcatgtcattgtacatttgtacagagaggtgatgcgggatgaatcgagctggagcctcttgtccgctgccgagcgcccgagacatatgtttgcttagagtttcctctgctgcgtctggactctacttcgccgtgcaaccgagctggaagtactcttacagggtagacgacgccctgacccgttctgcagatcagctaaccgctccggccctcaacctttttttttgtttattatatatacatattattaattcatttgtagcaccccgtgtacagctgccggcgaacttaaacctgctgcgccatattttattcatttttttcaccacgggtttgccgtgcttgtgaattgctgaatgctctgagcccacctgttgtgatggtctgatggataggtgtaacggtggttagcagtacagcatcgcgatggtgagtttagttacgggctgatctcgccataccaattggataatttcaagcatcggaaaacg

SEQ ID NO: 202875 - DNA, 4233 bp, Zea Mays
gatgcctcgtgctccataaccaacgcccacagcccagccattagccgtgctagtcatcagtaggcgcgcacactcgctcgctcgcagcgcttcgctcgttgccagttgccaccgccattttcccctcgtcggactgaaagagcgctcccccccacccccaccgcggcgggagtgggaaagagcggaggagcatgcgggagggttttcaccgcggcccgagaaaggaggacctgcgccgcgcgcatcgcgacgagccgctccccgctggcacgcacgccaaaaggcgaagaatctctcggctgagcccccccgtcccctccgccaccgccgttgtagccagtaggaggtagctaccccagatctgctcgtctccgcgcccgcccgccagattcgccccaccctccgccatgcggttgccgccgccgccgctctgactgggctctcttctgctgtgagagggaggaataaaaagcggttttctttcgggcggcaggccggtcggtcgccatggggtgcggccagtccaagatggaggaagagtacgcggtgcgccactgccgggtgcgctccgagctcctcgcgctggccatccgccagcgctacacgctcgccgacgcgcaccacgcctacgccgagtcgctgcgcgccgtcggcgccctgctgcacgacttcctccgcggggtccagtcgctgccgccgccgccgcccgagcccgcgctccgcctcccgcagcagcggaagggcgacggcctccctgccgcgtcgccgccgcccgcgatggcgtcctcctccgccgccgccgccgcgccgcccgtcgccaagcaggtccgcatcgcccccgacgacgggcatatccagttctccgacggcgactccgattccgaggatgggcacatcaagttccactccgacgaagagcccgacccggctcgccgccgcccggaggtcgtccgctccaccggcgcgccgggtcctccgccaccgcagatgggacagccgtatgcctccggcggagggtatgctccgccgccgtatggtcctggatacggttacgggtacgccactgggcctggtccgggtcctggtcctgattatggcggtattggcatgaacggcggcggtggttatgaaccaggccatggtgtcatccagccacctccaccatctgtctcgcacgagcaacgcctggaggcgactaatgccagggtccactactattccggcaatggcgagcagcagccacccccgcgtggctatggtggtgggtactcctacccaccacagagttcaagatcatataatcagtatgcctatggtggttactatggaggtggttctgctcctgcaccaccagcagacatcccatcctcctccggtgagccagcagcagtgccaccgcctccatctccgcccagggtgtccacctgggagttcctggacccgtttggaacttatgagagctactacgagcaaccaactgctacagcagctccatactctcctggcaggagtttgaaggatgtgcgcgaggaggaggggattccagacttggaggacgaagacatggaggtagtcaaggaagcttatggtgatgagaagcaccctgtgaagggttacatggggaacgggaaggccgcaaagggagagggtaggagcagcacgggggatgaattgccccgcaagtccaagtcatctgaggccagtggtagtggtagcagcttggagcatgacgttcatgtagtggaaaaaagtgttgtcggagaacaagttcgacactcggagccacggcagcatgttgccggtctaccacccacaggatcggaaaagctatacattgatgacactgaggtggtggtggagatcaggactcaattcgagcgtgcctcacaatcagctggtgaggtatcaaagatgcttgaggtcggaaagatgccttactaccagaagggttcaggtttcaaagtatgaatgctaatttgacacaatcaatcatttagtctccgcaatgattgtttgtggtataccgacaatggaggaggagtttctgcgttttgaagaggacaaggcgatgggctctggcaacctctcctctacactacagaaattgtacatgtgggagaagaagcttcttgaggaagttaagacagaggagacaatgcgggtactgtatgacagaaaacgtgaggagctgaaaatgttagatgagaaaggtgccgaagctcataagcttgaggccactgaagtttacatcaggaagctatcaactaagattagcatagctatccaggttgtaaacactatttcagaaaagattagtaagttgagggatgaagagttgtggcctcaaacatgtgagctcattcaagggttgatgaggatgtggagcgttatgctagaatgccatcagatacaactgcatgccatatcccaagctaaaaacatagactccatgatagacactgcaaagttcggtgacgctcatatggacttgatcaagcggttagagcttcagctattggattggattgcttgttttgttgcatgggttagcgctcaaaagaattatgttaaaaccttaaaccggtggctgacaaatggtgttatctatgttcccgaggaaaccgaggacggggcgcctccattttctcctggaagattaggagggccaccgatcttcgtcatatgtaataactgggctgccagtgtggacaggatatctgagaaagaagtagttgaggcgatgcaggcctttgcatccaacgttctgaacctctgggagaggcacaggtcagagcaaagacagggtctgatggcgaacaaaggcatggacagggatcttagggtgatggaaagagatgagcagtcgatgcgcaaggccctggaagcgcagaacaagaagctcgtgctcgtttcgagtcagggcagcgtgtccttgtccgcgcaagcgttacatgagcagcgaggccctggcgctgaggttggcagtttgcaatcaggcctgagaaatatcttcgaagcgatggagaacttcacttctgcatccgcgaatacatacagggagctccatcttcgcgccgaagaagagaaagcccgagttgcgcaggagagcggcggcagtgttccctaactcctttcaacgcttaggttttacacgaggacatgagcgtctgtcaatgcaaagggaccgccaccagtgacccccctgcggcacagtgacactacaacccttgtggcagctgatgcaccttgctcgccaggtgccccaagtttcgggtttcgggtttcaggctctggtgtggagttaacaggttgcaacacgggttttgttttactaatctgtacatgagttgggctacgtgatgcattctttgatctggatggccagcagttctcctcaaaccggaactgtgaagcacggttatggaaataggtatatcaccaggcatgttctggtagttgtgagacccctggagcgactgagtgaagaagaggcaggcccttgtgcatctgggaagctgaattatgacctctagttggctgtgcaaccccagaagataattggaaggaagatgtaagccgcacgatcttggttcagatcaaagggtggggcatataagatcctgttgtcatgaaatccaagatccatggaacgctgctctccaccccatgtcactatgccagcgctcaaccgtacatacaagaggccaggctatcagaaggtgttccgtaatcgcagcactttggcatgtcattgtacatttgtacagagaggtgatgcgggatgaatcgagctggagcctcttgtccgctgccgagcgcccgagacatatgtttgcttagagtttcctctgctgcgtctggactctacttcgccgtgcaaccgagctggaagtactcttacagggtagacgacgccctgacccgttctgcagatcagctaaccgctccggccctcaacctttttttttgtttattatatatacatattattaattcatttgtagcaccccgtgtacagctgccggcgaacttaaacctgctgcgccatattttattcatttttttcaccacgggtttgccgtgcttgtgaattgctgaatgctctgagcccacctgttgtgatggtctgatggataggtgtaacggtggttagcagtacagcatcgcgatggtgagtttagttacgggctgatctcgccataccaattggataatttcaagcatcggaaaacg

SEQ ID NO: 202876 - DNA, 876 bp, Zea Mays
cgccgccgccccttcacggaacccgcggccgactccccctccgccttccccgctcgtccgcttctccgccgtccgctcctccactgcatggcctccacccctccgaccctgcacctcggctcctccacccttcggccccacgcctcggctgctccgctcgtccagccttcggccccacgcgcaccgcggccgccgtatctcccgtcatctgatcacccacaacggtgatgtggacgacgtggtgcgtcttggaggcagttccatttctggcgttacggtgagggaatgccacaacgtggtggacgccactgccgtggcgctcccgttgcaggccggagtctggacgcctaagcttcttgttttgctgggtttggtgcaagtggcccatatgttgcgcagaggagcactggtgaagcctaagaaccctttatgtcgatgggggcggtctcgagggaggtgtcgtcagcatgtgagaggctctgcttcatttgcccatcactgcggacgaggtcccgccatccagtcaagcgctacaagaagttgcttgcagaaatcttccctcggacacaggatgaaggaccaaatgatcgcaagatagggaaactgtgcgaatatatttcaaggaatcctatgcgtgttccaaagattacagtttacttagagcaaaaatgctacaaggaatttagggctgagcgctatggttcagtgaaagttgttatggcaatctatcgaaaggttgacagtacttacatgttcaatttagaaaaccagattcctaaactatgtcatctggcccaagagatgggtgaaaaggagaagatatgcattcttcatgcagctgggctacaagctctttcatctatggtatttgtttct

SEQ ID NO: 202877 - DNA, 1482 bp, Zea Mays
aaataaccagacagacatagctggacatcttgattaacattggatccttgatggagatcacaaagatggggaacagagtggccaactaccctattcatcaagatgcacaagttcttcagacacaaaatgcaatttccattcatgcacagcagcttccaaggcagtttcctccgcaaatgcttcagaatttgacaccacagcaacaacagcagcttcaaaatttgacaccacaacagcagcagcttctgcagcagcagcagtggcttaggcgcaaccagttatgcagcccccgtggtcctcttactatggcagacaagaaccagcctatggtgaatgtgaaggtagagaatactatggattctcaaatcgatgtcccatatgggtcttttactagacaacagcaatttaatataagacagcagcagcaactattgcatcagcagcagcaacagcttcaacagcagcagctccagcaacagcaacaacagctccagcagcagcaacaccaacaacagcttaatcagcagcagcagcaactgcagcaacagcagcagcaattgcaacaacagcagcagcagttcactcagcaacagcaattgcaacaacagcagcagcaactacagcagattaatcagcagcagcaccttcaacagcaacagcaacagcaactaaaccagcaacaacttcagcagcaacagcagcagatgaccatgtcaggaaatcagaatgcacaactagcacagcagttcaaacaagtctcatcaatgagtgcatatggcatgcgaatgccacctgtcaaagtagaagctttccatgaattggtgagcggggactcgtcgctgaagcacgataacgaccctaacaaactcacttctccaaagtagctgcggtgtgcaaaggatagcttttgcggtctgttgccttcctgccccccaacatcatgtctcgcctgtttgattgcgcacaacagcaagacgaaccgtgtatcgtaaatgtgaagcatttggctaattcactgccttcaaacaaactgatgtcaaatacgaactgataatagctccaagtttccttacattctgtacatggattaagggtgcgctgtcctctacataattagacctgtgcatattttaagtttgccagagaaagctcattcatttcatgccaagaaattgtggccattacgttcatagtgtgcgttggctcttcattttcaggccaggcctgggcttggatggaccatccgttagtttttagtatgaagacacttcaaatcaatatattagattggacttaggccaaggaaattttacgaatttggtgtttcgtctcatcctctaggttctattatgattttatccttatccttaattttaagccttttgattttgttctcaggattttaaataaaccagctccttgtttatgtaccacggaattaaatgatgaaaaacagaaaaaaaacttaatgtcgagcaattg

SEQ ID NO: 202878 - DNA, 2547 bp, Zea Mays
cttagagatacggctggggaagcatgctggtgtggtggtagtgggcgtcagatgggctggcaaggtgacaagggtcaccggctgagggaggtggaggcctgtcgggtggtgcgggggcttattatcctgtgcgcatgcgtcacagcctgaggattggaggatgtgtgcagtatggcgtcacatgatcgtttggttcattggcacacaaggaaagctaggaggaagaagaatgtctagatgtttaagatctgcgacttcatggagatgatatttatttctctttggaagatgagcaggaagacaacactcaacatcaagtgcattctagaactgcgttcagtccaagcagggatggttccatgttgtctcaacggcataatcggtatgaagaattgcctgacacatggtacaagccatatgctgacaaattcaggatatggcacagcaagcttcactcaggtgacaaagaaataccaaagagaacaccagagggaatgtctgactatcttaagatttgcagtgtacataaaaggaagagggctgtgtttatggatgatcccagcatatctgctcccatattggaaaatggcccttccctgcactcaaagaatgctggggaattcagcaattcaacagacgaattaattccagaaattagatttccatctgactgtgttccagaaagcgcaattcctaaaacaagtgggatatctagggctaacaaaatagaagttcatggagttcttgataatttgccagcaccatctagccgcaacactgcaatgcttgaaaggtttggcatggtgcctgaatattacaagacaggaaacaaatatagaggaaaagatggatctagagtagaagggaaatctttaagccaagagcaagcattgctcatgacaaaacagttggttgctcgctacttggcaaattcaggctttgaaagtggaactgtggtctctattgatgttctttcagaaataataattaagcacatatgtaaattgggacgcaacttgaagcttctaactgacagctacaggaagcaattttcatcaattgaactccttaagatgttcctacaaactgttgggtacagtaacattggatccttgatggagatcacaaagatggggaacagagtggccaactaccctattcatcaagatgcacaagttcttcagacacaaaatgcaatttccattcatgcacagcagcttccaaggcagtttcctccgcaaatgcttcagaatttgacaccacagcaacaacagcagcttcaaaatttgacaccacaacagcagcagcttctgcagcagcagcagtggcttaggcgcaaccagttatgcagcccccgtggtcctcttactatggcagacaagaaccagcctatggtgaatgtgaaggtagagaatactatggattctcaaatcgatgtcccatatgggtcttttactagacaacagcaatttaatataagacagcagcagcaactattgcatcagcagcagcaacagcttcaacagcagcagctccagcaacagcaacaacagctccagcagcagcaacaccaacaacagcttaatcagcagcagcagcaactgcagcaacagcagcagcaattgcaacaacagcagcagcagttcactcagcaacagcaattgcaacaacagcagcagcaactacagcagattaatcagcagcagcaccttcaacagcaacagcaacagcaactaaaccagcaacaacttcagcagcaacagcagcagatgaccatgtcaggaaatcagaatgcacaactagcacagcagttcaaacaagtctcatcaatgagtgcatatggcatgcgaatgccacctgtcaaagtagaagctttccatgaattggtgagcggggactcgtcgctgaagcacgataacgaccctaacaaactcacttctccaaagtagctgcggtgtgcaaaggatagcttttgcggtctgttgccttcctgccccccaacatcatgtctcgcctgtttgattgcgcacaacagcaagacgaaccgtgtatcgtaaatgtgaagcatttggctaattcactgccttcaaacaaactgatgtcaaatacgaactgataatagctccaagtttccttacattctgtacatggattaagggtgcgctgtcctctacataattagacctgtgcatattttaagtttgccagagaaagctcattcatttcatgccaagaaattgtggccattacgttcatagtgtgcgttggctcttcattttcaggccaggcctgggcttggatggaccatccgttagtttttagtatgaagacacttcaaatcaatatattagattggacttaggccaaggaaattttacgaatttggtgtttcgtctcatcctctaggttctattatgattttatccttatccttaattttaagccttttgattttgttctcaggattttaaataaaccagctccttgtttatgtaccacggaattaaatgatgaaaaacagaaaaaaaacttaatgtcgagcaattg

SEQ ID NO: 202879 - DNA, 2332 bp, Zea Mays
ctccggcatccaagttccaatcacacacgagtccggacgcagaagaacccaccgatttcggcgcgcggaccggtcgaacaggcggcccaatcgccacgcggatggcggcggccgccgcactgctgctgggcgaggacgggcgcggctacgagctcgcgcggcggctggaggcgtgcggcgcgtggcgcgagtggctgggcgacgattccgcgcacgccgcgctcgcgcagcacctcacgtccccagcaacctgggacgccttcctctaccccgccgcctccccatcgccgcccccgcgcccgctcctcctcctccagctccgcgttcgcgcgctcctcttcgacaaggcctcggccgcgctcctcctgcccccccgcggcgcggcccctgtcagcctccattccatcaacgccaactatctgcgacttcatggagatgatatttatttctctttggaagatgagcaggaagacaacactcaacatcaagtgcattctagaactgcgttcagtccaagcagggatggttccatgttgtctcaacggcataatcggtatgaagaattgcctgacacatggtacaagccatatgctgacaaattcaggatatggcacagcaagcttcactcaggtgacaaagaaataccaaagagaacaccagagggaatgtctgactatcttaagatttgcagtgtacataaaaggaagagggctgtgtttatggatgatcccagcatatctgctcccatattggaaaatggcccttccctgcactcaaagaatgctggggaattcagcaattcaacagacgaattaattccagaaattagatttccatctgactgtgttccagaaagcgcaattcctaaaacaagtgggatatctagggctaacaaaatagaagttcatggagttcttgataatttgccagcaccatctagccgcaacactgcaatgcttgaaaggtttggcatggtgcctgaatattacaagacaggaaacaaatatagaggaaaagatggatctagagtagaagggaaatctttaagccaagagcaagcattgctcatgacaaaacagttggttgctcgctacttggcaaattcaggctttgaaagtggaactgtggtctctattgatgttctttcagaaataataattaagcacatatgtaaattgggacgcaacttgaagcttctaactgacagctacaggaagcaattttcatcaattgaactccttaagatgttcctacaaactgttgggtacagtaacattggatccttgatggagatcacaaagatggggaacagagtggccaactaccctattcatcaagatgcacaagttcttcagacacaaaatgcaatttccattcatgcacagcagcttccaaggcagtttcctccgcaaatgcttcagaatttgacaccacagcaacaacagcagcttcaaaatttgacaccacaacagcagcagcttctgcagcagcagcagtggcttaggcgcaaccagttatgcagcccccgtggtcctcttactatggcagacaagaaccagcctatggtgaatgtgaagcagcaactattgcatcagcagcagcaacagcttcaacagcagcagctccagcaacagcaacaacagctccagcagcagcaacaccaacaacagcttaatcagcagcagcagcaactgcagcaacagcagcagcaattgcaacaacagcagcagcagttcactcagcaacagcaattgcaacaacagcagcagcaactacagcagattaatcagcagcagcaccttcaacagcaacagcaacagcaactaaaccagcaacaacttcagcagcaacagcagcagatgaccatgtcaggaaatcagaatgcacaactagcacagcagttcaaacaagtctcatcaatgagtgcatatggcatgcgaatgccacctgtcaaagtagaagctttccatgaattggtgagcggggactcgtcgctgaagcacgataacgaccctaacaaactcacttctccaaagtagctgcggtgtgcaaaggatagcttttgcggccaggcctgggcttggatggaccatccgttagtttttagtatgaagacacttcaaatcaatatattagattggacttaggccaaggaaattttacgaatttggtgtttcgtctcatcctctaggttctattatgattttatccttatccttaattttaagccttttgattttgttctcaggattttaaataaaccagctccttgtttatgtaccacggaattaaatgatgaaaaacagaaaaaaaacttaatgtcgagcaattg

SEQ ID NO: 202880 - DNA, 1657 bp, Zea Mays
ctccccagtccccagtcccccattcccatattaagcagagccgaggcgagcacccccacccaccgagatgcaatgcaatgcaaacatcctccctcttctcctgctcctcacagacatcttatcctagctcccggtcgaaggccgtaggtaggattcccttctattcctcgcccgcttcctcctccggcagccggacctagctagctagctttcttgccgttcgccgcccatatggctaggaagtgctctagctgtgggaacaacggccacaactccaggacctgcggcgggcacagcaggaccgcggcggccttcgagaacaacggcggcggcgtgaggctgttcggggtgcagctgcacgtggggtcctcgtcgcccgtagccgtagccatgaagaggtgcttcagcatggagtgcctgtcgccgccgccgccgctgccgccgccgcccgccgcgccggcgtactacgcggccgctctcgccgccgccaacagcagctcgccgtcggcgtcggcgtcggcgtcctcgtcctcgtcgctcgtctcggtggaggaggcacaggcacccgagaagatggccagcgggtacctctccgacgggctcgtgggcagggcgcaggcggagaggaagaaggaagcttgtttgagctacgtaaataatctatctaaaaaaaaggtcttcttctctgggttttccgaccggccatcaccaggcgttccgtggacggaggacgagcaccggcggttcctggcgggcctggagaagctcggcaagggcgactggagaggcatctcccggcacttcgtcacgacgcggacgccgacgcaggtggccagccacgcccagaagtacttcctccggcagagcagcctggcgcacaagaagcgcaggtccagcctcttcgacgtggtggagaacgcagctgagagggcgacgacgacgagctccagggagcgcccgaggctcacggtcacggatgcgataatcgcgaccgcctctgctgcagcacccggaacaacgacggcagcactcccggccctgtcgctcggcatccgacggccagcgaggcctgagtaccacgccgcgctgcctccgaacagcctgtccctgcagctgccgcggtgctcggcggcaatgggtagcgcgtcgccgtcgccgagcctggcgctggcgctggcggggccgaaacacaagcacccttcgccttcgtccctgacggcggcaaaggctagtagtagtggccaggcaccggacctggagctgaagatctcgaccggccggcagagcgagcaccaggtccagacgggctcgccgccgaggacgccctttctgggcaccatcagggtcacgtaaccggaaagacggcggcggcggttagtcgggaatgacctgctggtaaaagaagagcttggccggggtgggaaaactgaaaaggaggagcttttggcagtggtgttggtgtgtgtgtgttgctgcccctgccagtggcagccgagacgacgatgcggtcgtttatcacgtgggtgtggtgttgtacatcatccatcagaaagatggaaactttactttagtggcctaattagaactctataaactttactgtcctaatttagcattcgtttgtttcttgcaaataaagaacgccgttgccattcgc

SEQ ID NO: 202881 - DNA, 274 bp, Zea Mays
cactcatacacaactagcacaggcccaagggatacacgtcccggtgccccccccaccaccacctcccgttcattatccttggtcttcacctccacctgtacctacatctccatctaccgaacatcaggtatgcatatttatcatcatttagttgttgttagttatattatgatgtaactcaacaaatgtcatttgtacatgtatattatacccctccagctaccttgtcgacgcatgaacaagaggatgggttagactttgtcgaaaccctctt

SEQ ID NO: 202882 - DNA, 1447 bp, Zea Mays
cccgccttccccgcgcccccgcgatcctcgccctcgtcccgcgtatccccttccttcgttgtcgcgatgccctgcccccgctcgcgtccgccgccgcgtcacccccgcctcccccccgctcagctcctctgtgccccgcgtatccccttccgtcctcgatctggtcggacccccctcctccgcgtgccggacgatccaatctatggccgtctccaccacgcgctcgccggcggcgattgaccggcacgcggtacggctgatcacgcgcgtctccatagcgatggtcgtcgtcgccacactctcactcttgtacctcttgcgccacgcatccatctactgtttccccgcgtcccaccagcctgccctcaccatctcgctcgccccattcccccgcagctcctgcgacgccgcctcgcgccgactggtcccgcccgaccaccgcctcgctaagctccgcgcctccccgcgctggagacgtcgtgccgcctccctggccacgtccgccttcccaccgctccgcggcctcggcatcctcgcggccccttcgcgcgtcctctgcctcgccgccggcgccggccacgccgtcgacgcgttccgcgcagcggggaccagagacgccataggggtcgacctcgtagagttcccgccgcttgtccgccgcgcggatccccaccaccccccattttccgacggcgccttcgacctcgtgttctcggatgacccctcggcgacctccggcgcgctcttcccgtcccgcctcgcgcgagaggctgagcgcgccgtccgccgcggtggcggcatcgcgctcgcgttcgatcgggagatcgagaccgtcgctgtcgctacgctattcaagagatcgcgcgtcctggatgtgaaggatgtcacgttggatggctctcaggcatctggacgatcttgatggttcataaaaatacgaatttgttccatattattgcctgctttgttgtgcagtatcgcaggcagctggatcttgagcgaccttacacaaaaaagaaagaggctagaatagtaggtgggacaggcactgatgggacacctattattgcagggattgcaaagttcatggatatattaactactggacttgttacatccccattatcttgcaacactaaattacagtcaactattgctattgctttcagttcagatggaaaacacttgcatccacaagatcattttatacaaactgaactgaaaggcatttattttgttagtggcgaccatatagtgaaattaattgactgtcatatagggaaatgtttgaaggttttgagtggacatcacaatacaaactgaaatgaaagacgtttatttttttagttatcagcctcatcaaactgtattgaaagacaccaaactgaactgaaagacaacaaacatgccagctcccattttagattttaccaagtatcatatggac

SEQ ID NO: 202883 - DNA, 913 bp, Zea Mays
attgttacatgcaccctatacgagcgggggaagagggggagcgaggggagcagcaatggcggaggaatttgcggcccaggcggaaacggaattggggagcagatcaccatgctagaatagtaggtgggacaggcactgatgggacacctattattgcagggattgcaaagttcatggatatattaactactggacttgttacatccccattatcttgcaacactaaattacagtgagttttgaagattgggaatttgggacctcatatcttaaatttgtttctgcagtgagttactgatctggagacaatcgagagtagagtgttgaaggcacatctccaatattcctacacaaaaacacaaaaacacaatgcacatcaactaacagaagtgcaataccctctcatatgcagagtttcggaatactgggctggagagatcagaggcgctgaaaaatgatctggaatggttcaggcaacagggccacacaattccaaaaccatcggcccctggcaccacatacgcttctctactggaagatctgtctgaggaggacccccaggcctttatctgccatttctataacatgtactttgctcatactgctggaggccgaatgattggcaaaaaggtttccaagaagattctgaacaacaaagagctggagttctacaagtgggagggcaatctctcccagctgctgcagaacgtccgcaacaagcttaaccaagtcgcttcgagctggtcttgggaggagaaggaccactgcctggaggagacggagaagtcgttctcttactcaggaggcctcctccgccatatattcacctgatctatcattgccggttgatccagtctcaaacgctgtcgtttcatgactaatagagtcgaccccttccaatgctgtcaatggc

SEQ ID NO: 202884 - DNA, 440 bp, Zea Mays
atgcaccctatacgagcgggggaagagggggagcgaggggagcagcaatggcggaggaatttgcggcccaggcggaaacggaattggggagcagatcaccatgctagaatagtaggtgggacaggcactgatgggacacctattattgcagggattgcaaagttcatggatatattaactactggacttgttacatccccattatcttgcaacactaaattacagtgagttttgaagattgggaatttgggacctcatatcttaaatttgtttctgcagtgagttactgatctggagacaatcgagagtagagtgttgaaggcacatctccaatattcctacacaaaaacacaaaaacacaatgcacatcaactaacagaagtgcaataccctctcatgtaactgtattgcaaaagaatatggtacttatgcacctaagg

SEQ ID NO: 202885 - DNA, 2603 bp, Zea Mays
caaatgtgcaaggaggaacacctccgaggtgattcagcagaagcagctagggcaactgagtctgatgccagagatctattggaaaaggagataattgaattaaagacacagaacatgagtttgaagcaaacacaaaatacctgcaaaaataatgatgaacttttacgtatctctgaattagaggaagaaaatagaaagctcatacagattttaggagaagaaaggaagaagatcacttctgagaagaaaaaaattgaagaagaaaagtgcaaaactctagaaatgcaaaggatatggaagtcagaagcacagaagtctgaagagtatagaagagttgctgatactgaaagaaaagttgccaatgattggagagcatcatgtgaaaggttgaggagtgaagcaaatgaactcagagctcagttgactgctcaaattcagaaaacagaagaaatacttaaaagggctgaagcggagaagcagaaggtcgccagagaaaagaaacgtgctgattcagagaaatcattatctgaaaagaatagaacacttgttgaagttgagaagaaaaaagtaacagaagaaaagtgccgtgctgacaatttatttgctaagttagaggagcagaagaaactcaatgaacatttgcgaactagcatacaggttgaaacgaagaatgcaatagaagagaaaaaacgaggagaccatttgtttcagaaattagaagagatgagagaacagactgaatgtttacagagaaaggcaaatgaattctctgcaggtagagatgtaatttcttctggcaagtgtggccggcgacacattgatagaatttctgagaatgcaaacgttaagcttctcaaagagaaacttaagctgaaaaaagaacaactaaagcatgtcaagaatgtgtccaagctagataaagcaaaaactgctttaataagaagagagcttcaaagtttaaagcaagactggacacagctactgggtcggtttaacatgctggatgaccaccttgcacgtggtgttgaagatattcatgtcttaacacagttgaatcagcatccagagatacatggctttgaacagaagctgcttcctaatgattcagttcctgccccatattttcggttgcaggctgggacagttccatttggctcttctatcccaagtgaatacacttcatatcagttgcccagagaaagctgctcacgatcaatctcagggcaaggataacctatttgtctcatcgacagatatcaggaaaaaacaggattcagttgttcccgagctggctcctaaaattagaaatgatagagcattgccttgtggtacgcttacagatagaagagaaacacttggtggtgataggaagagaaaacacaccaaaatgtctcaagacccctctgcttttcttccctcaaaaaatgatttgctacatttgaaatcaaaggtgcctgctaccacttcaaatgttgcattatcctttgatgatgatcctttgtgtctgcagcaaggaaataacaccatatgtgttactgaaggtgacatggataaagctccttcattcagtttcccttctaaagtgtcttgtggaggaaatggctgtactagtagcaagtttgcttcattgatcccctttgaggaaatggtcagggaaaactgcttaaagttgctcaatttggatgatgatgcagatgaggaaaagtttagaaaggcaaaggagagaccccattcaccaaacctgagcatcatccgaccccgtagaactaaactgccaacgtatgcagaacctcacagcttgggtagatctctcaacggttgtcctgccttaggatctgatgccattgattccaagacaaggtccaaagcatcggaagttaaagagcctgtaattcagaaatcgactcaaaattatatccagcttgatccgtcgtcaaatacaatcgagtgtagtggcattgctaaacctctttttgtgaatgataaatccaatgcagctgtcaatgtttcttgtagcaccagtttggttgtagtgccagcgagcacttcttttgacagccttttgcatgagcatgtggcccagaattctgtagcatcttctgctgaggcattagacagtataagcagaccaatgttatcgggaggtggtcattcagattccattttacatttgtccaaggaagtgtctaacaaaaacaactcacatctgatttgtgacaaatcaagtcctgggctgcaagctaatgttcggacaagtgaaacaacagtgaccaagccaaacaattcggtctcgaatagtttgcttcggcaccatcatggatccgaaaaccctccattgcacttagttggatttacaagaatgaaaagaagcaaaatgattaacatatttcggtattgggagatactgagttctcaatctcaaaagcattctgacgaagcttcagttgatggtccactgcttgataaagtgtcaactgacacaatgctacctatagacgagaaggtttccctcatattttcccttttgttgtgggatactagattcactgaagaaacttttgtggatggaaattttgcctcatcagctttttcgtcgagtggta

SEQ ID NO: 202886 - DNA, 2983 bp, Zea Mays
ccaccctatgctctgtcctcgcccgcagggtaagaggggccggctgttgcgggctctgggctcagacctctcacctcgggcctcagagagtcagagcgagagtcggtccaacggctactggttccactgtctccgcttccagactctacgttcctgtctcgttcaaaaccctaaacctttcctctccatcggactctcgccgccgccccatggcggcggaaccaagagagcccacatcctcgctggatgcccagctcgcggcctcttcctcctccgcagccggcgtaggcggccccaacccgtgctgcgcgacgcagtggaagaattgccagaaattggtgaggagccggacggcgctgcgggaggcggtgaagctcctgcaggctgagaacgagaagctgcggaaggagaactcggagctcagcaaagtgtgcaaggaggaacacctccgaggtgattcagcagaagcagctagggcaactgagtctgatgccagagatctattggaaaaggagataattgaattaaagacacagaacatgagtttgaagcaaacacaaaatacctgcaaaaataatgatgaacttttacgtatctctgaattagaggaagaaaatagaaagctcatacagattttaggagaagaaaggaagaagatcacttctgagaagaaaaaaattgaagaagaaaagtgcaaaactctagaaatgcaaaggatatggaagtcagaagcacagaagtctgaagagtatagaagagttgctgatactgaaagaaaagttgccaatgattggagagcatcatgtgaaaggttgaggagtgaagcaaatgaactcagagctcagttgactgctcaaattcagaaaacagaagaaatacttaaaagggctgaagcggagaagcagaaggtcgccagagaaaagaaacgtgctgattcagagaaatcattatctgaaaagaatagaacacttgttgaagttgagaagaaaaaagtaacagaagaaaagtgccgtgctgacaatttatttgctaagttagaggagcagaagaaactcaatgaacatttgcgaactagcatacaggttgaaacgaagaatgcaatagaagagaaaaaacgaggagaccatttgtttcagaaattagaagagatgagagaacagactgaatgtttacagagaaaggcaaatgaattctctgcaggtagagatgtaatttcttctggcaagtgtggccggcgacacattgatagaatttctgagaatgcaaacgttaagcttctcaaagagaaacttaagctgaaaaaagaacaactaaagcatgtcaagaatgtgtccaagctagataaagcaaaaactgctttaataagaagagagcttcaaagtttaaagcaagactggacacagctactgggtcggtttaacatgctggatgaccaccttgcacgtggtgttgaagatattcatgtcttaacacagttgaatcagcatccagagatacatggctttgaacagaagctgcttcctaatgattcagttcctgccccatattttcggttgcaggctgggacagttccatttggctcttctatcccaagtgaatacacttcatatcagttgcccagagaaagctgctcacgatcaatctcagggcaaggataacctatttgtctcatcgacagatatcaggaaaaaacaggattcagttgttcccgagctggctcctaaaattagaaatgatagagcattgccttgtggtacgcttacagatagaagagaaacacttggtggtgataggaagagaaaacacaccaaaatgtctcaagacccctctgcttttcttccctcaaaaaatgatttgctacatttgaaatcaaaggtgcctgctaccacttcaaatgttgcattatcctttgatgatgatcctttgtgtctgcagcaaggaaataacaccatatgtgttactgaaggtgacatggataaagctccttcattcagtttcccttctaaagtgtcttgtggaggaaatggctgtactagtagcaagtttgcttcattgatcccctttgaggaaatggtcagggaaaactgcttaaagttgctcaatttggatgatgatgcagatgaggaaaagtttagaaaggcaaaggagagaccccattcaccaaacctgagcatcatccgaccccgtagaactaaactgccaacgtatgcagaacctcacagcttgggtagatctctcaacggttgtcctgccttaggatctgatgccattgattccaagacaaggtccaaagcatcggaagttaaagagcctgtaattcagaaatcgactcaaaattatatccagcttgatccgtcgtcaaatacaatcgagtgtagtggcattgctaaacctctttttgtgaatgataaatccaatgcagctgtcaatgtttcttgtagcaccagtttggttgtagtgccagcgagcacttcttttgacagccttttgcatgagcatgtggcccagaattctgtagcatcttctgctgaggcattagacagtataagcagaccaatgttatcgggaggtggtcattcagattccattttacatttgtccaaggaagtgtctaacaaaaacaactcacatctgatttgtgacaaatcaagtcctgggctgcaagctaatgttcggacaagtgaaacaacagtgaccaagccaaacaattcggtctcgaatagtttgcttcggcaccatcatggatccgaaaaccctccattgcacttagttggatttacaagaatgaaaagaagcaaaatgattaacatatttcggtattgggagatactgagttctcaatctcaaaagcattctgacgaagcttcagttgatggtccactgcttgataaagtgtcaactgacacaatgctacctatagaattcactgaagaaacttttgtggatggaaattttgcctcatcagctttttcgtcgagtggta

SEQ ID NO: 202887 - DNA, 1644 bp, Zea Mays
agtcctctcaatccgcctcgcccgcagcgcccccccccccacttcctttccctctctcacggcggcggcgagatgaaggtaacggtaatgaccggcgacgagcagatcgtcaccctcgacgtcgaccgcgacgaatccgtggaaaatctcaaggcgctactcgaagtggagactcgggtgccgctgcggcagcagcagattcacttcaatgggaaggagatgcagaacacggagaagctcagcgccgctggggtccaggacggcgaccttgtcatgatgttttccaccagcgaaaggccatctcaggatggcttaagggtaaatcctgatggaactgctgtgaatcctcaagcttttcaacaacatgctcgaggtgattcacaacttatggcacagctccttcagaatgatcctcaactagcacaagctatccttggggatgacaccactgagctacagaatatcctgcggtcccgccaccaacaaagaacagaactaaaacgtaaacaagaagaagagcttgctttattgtatgctgatccttttgatgtggaagcccagaagaaaattgaagctgcaatccggcagaaaggcatagatgaaaattgggaggctgcattagagcacaatcctgaagcatttgcccgagtggtaatgctatatgtggatatggaggtcaatggtgtacctttgaaggcttttgttgacagcggagcgcaatcgactatcatatcaaaaagttgcgctgaacgttgcgggttgctgaggcttcttgatcagcggttccgagggattgctgttggagtcggtcaatcagagatactaggaagaatacatgtagccccaataaagattgggaatatattctatccttgttctttcaccgtattggatgctcctaatatggaattcctattcggacttgacatgctgcgaaagcatcagtgcatgattgacctaaaggacaatgttctcagagtgggaggtggcgaagtttcagtgcccttcttacaagagaaagacatccctgcacacatacgcaatgaagagaaactgtctaagttagggtctctcagccaagcaactggagagtcatcaaggacacgtgagggtactcccaatgcgctacaacaaacccctccagtaaccgtgaactaacttcaaatccactaccattcatttactcgcaggagctccagctgcaaaccctccacagggaggagattttgaagcgaaagtcacgaagcttgtggagctcggttttgacagggcgtcggtgacacaagcgctcaagttgttcaacgggaatgaggagcaagctgctgcgttcttgtttggtggttagactggtgggagcagccgttcctggctttgtgttcgctcaaccctttccagggttgagtacttgaatatttgatacgaaagtgattaaagtatttggatactgtttgtccagtgaaaggacttacttttagaggttttatgttttctcttgtttctgagaacaaacatttgttttctgtacctgatacatagactgatagacaccagaatggagacagaactgtgaagatttttttttattaagagtgtttatttgagccagcgaaagtgcgactagccgagtttgttagatggtctgag

SEQ ID NO: 202888 - DNA, 2695 bp, Zea Mays
gtgcccgccatgaagtcatcgtcatgcttgcgagctgcggggtggggcattgggattgaaacagaagtgggccccactcaaagatcgctgacaggcgggccccattgcgctgtacgaactgcgcgagcacgaccgagcccgaaggcccatttgtgtagcggctattgaagtccacccgtggcccagctgtaccggtctatgtctatccgatctccccgaagaattacttcctggagccacaggcccacaccacagcgaggcccgctgcagacggtgccatcgcgtcgcccatgccatgcacccactcacgctctcctccaccgcgctcctccgcctaatcaagtcgctctcgccggcggcggggccgagggcccacctcgcggccgcggagatccacggcctcctcttcaaggaagggctcctccacgccggggcgcacctccccacggcgctgctctcggcctacgccgcgctggggaggccgcggcacgcgcgggacctgttcgacgagatgcccgacccgggcctcgtctcccgcaccgccatggcgcgcgcgcacgcggcgtccgggcaggccgcccaggcgctcgccgtgttccgggacatgatcgcggacggcgtgctcccggacaacgtggccctggcggtcgctctggccgcgtgccacacgacagcctcgctccctgcagcggggatggcggcggcaaggagacctgggaagatggtccatgccatcatcgtgacaagcggcattgtgccggatgtgttcgtctccaccgagctgatcagggtctacggggagtacggtgagctggcgctctcccggaggttgtttgatgcgatgccggtgaggagcaccgtttcgtggaacgccatggtgcatcagtatatcaggcatagtaatgttggcgatgcttacgagctgttccttgcaatgccaaggagggatgtagtgtcatggaacacgatgattgccgggtattcccttgttggtcgatttatggaggcgctagagttgtcccgccagatgatatcgccgtcgtcatgtccagtgtatccaaatggacctacaatgagcactgtccttgctgcttgcgcaggtgccggttgtttagagactgggatttgggtccatgcctttgttgacaggaaccgcatgaatgatgatggctcattggatcggtccttgatagacatgtacgtcaaatgtggaagcatcgaaaaggcacttcaggtgttcgagaaggcacctgaggcgagggatctgtactcatggacgaccatgatttgtggattggcaatgcacggcagggctgctgatgctctaaaaatgtttggtatgatgcaagacaatggcatacaccctgatgatgttactcttgttggggtcctaaatgcttgtgcacactgtggacttgtggacgaaggccttcgacacttctactccttggagaagtatgcaatcacacccaaaattgaacactatggatgtgtcattgatcttcttggtcgtgttgggcggctgcaagaagcatacaacattatcaggaccatgcgcatgaagcctaatgcagtaatctggggtgcattcttgaacgcatgcaaagttcacagcaacgtggagcttggcgagatcgcagcagctgagctcaccaggttagatccaggtgacccctgggcaaaggtgatgctgtccagcttgtatgcaaaattgcaggactggaacagtctagccagggagagacgggagatgaacaacctgcagataaagaaaacaccagggtgcagctcaattgagcttgatggggaggtgcatgagtttgttgctggtggttttcaacatcctcaacatggcgaaatttgcactgtactagagaacgtcgaagcacaaacacatactggctaaagagatgtggaggcctcatgccctcatcagctgagttttttgttctatcaatgaatgttagcatgtagtagcaagtttcatgggcactggcagattaactgacctttgtgtgttccattagcctgtgaagttcgaaactggtcatattgctaagaattctaggaggttactattagggcccagagtaaatgactacgtgctgatgaaaatctgttcagattaatcattctggaacttgtactaacaattgaagcaagtggaggcatagcaccaattgtgtctgtgctgcagctctggatgtcagtagacaagaggtgtatcagagagaagcacttcaaggttaatttgttgagcaaattggagatgctggattttgtattttggcaggttgctcatgagtggtgaatggtctgacgacttcagaagaggatagatctgagattacctttcatgcatgttaaggaagttaagtagttgatgccttcaaataaatggagaaacgtcaggtgaaccgcgagcagaattctgtggcgcatttgttagcgcagttagctaggactctgttcatacagctgttcgattaagccaaatacctaactgtattgcccatctagtagaacctaactgtaacttgtcctcttaattaatactagcaattagcaaacatgtctgtacgttgcgatcggagaaaaaaaactatcaaatatttaggagaacaatgacacgagtgatacatagcattatttatgtttcaccatttatggaatttaaagactaattcgtttaata

SEQ ID NO: 202889 - DNA, 5500 bp, Zea Mays
cgatcacgattgaagagttccacgtaccacgaaacctcccgcaccaaacggcctccgcaccacgcgtcgagaagcttcgagcagggccaggagcatgtcccccacggccccaccacccctcacctaacattcctagcgtcacccccggcgcccaaagatcgaagctccgagcaggaaacgccaccgccctccatctcccccgtgtccctagccaggagcaccgtccccctcaccaccccgcctaactttcctatcctcatcccgacgcctggagatccatcctcaaacgccgctgctagggcaccgtcccgcgctaggaccccccgcgcctcgcaatcatgtcaccggcaactctgacgacctagggctcacagaggctagcaccacgatggccgacccgggcgcctccgtcaacatcgctgcgcgccaccacctcgcgtcgcagctcgcgaggcagccgccagtgacgcacacgggctggtggggaggggcgcgttcgtaccaccatgggaggggcgtggggcgtggcatcaagggtgagggaggggcgtcgaggaggcggacggcaacaagcccacacatccaacaccctaccaggtctttgatgctgctgcttcaccaaacaatgaaatgctcttgatgcatgattcaggagctaggaggatatctattgtcgtcgagttacatgaagttgactttcctctgctgctgttgtgctcagtgtggatgacattgtgctgcctcaggtacaactttccttttctgtgcttaagtaaaaaaatgttgttccattcgatacacagtcggattatttgatttaaagccttgctgaagttgacattgtgatatatcgtgaccctggtaaaaaatattttcaagttcagaaagcaggatacttcctttaatatgtctatcacacatgttcacggagataattctacacatggttttttatacctctttttgaccccacttggagatggaagcgagattttgaagttttaaggcctgcagtgccgtggtcttgcgttgatatctgtagttgtacatagaaattttctcatttggtgtatgtctttgctactttttccttaaacataaattatatttttataactatctggcagttattgatctatcactgccttactacatgatacctatctggcagttatgaaaatattcgaatccattttatatgtaaatcctaaaattttcgaatccaaagccacccattacaatattatgtactgaaattatatcttttacttatgtgtcactctgcatttttttaagatttaaaaaaatttcttccttattttatacatggttgaacaccaaccttcatgattcactggatcttcttagtattatctctaacaaaagaatttataaagttctttccccacaaatgcaaatataggtattagcttattgattttaaattggttattaaatgtctggcatggatctcctccctgctcacgggcctcaccatcctcaatggcgagtgtaaaacttcgcaccaacacactcgacaagcttgatggcgacccctacgtcaacatccgcatgggcaaggtcatgtaatttttatcttcatttcaatagtgattgaagcaaatgaaaattttaaaattttggcagtgagtatgcaacacttccaagcaatggataatgtattaatgtggggctgtgggcgttggaacgtgcgtgttgactagctttgattagcttgtcgatatacatacttagccatctattttttcttctcctttcaaatgctatgctattgctactgctgttggagtgtaccatttaacttgatatatgatttaatagatgctttgtgtgcataaatcgtctacagttaccatctggacttttttagccatgtttgagagatgtgacggagtttggatttcacttaaaaatgcaggtccagttgatgtttaatgtgcctgaactgcagttacagtcataaagctcaaacaatcttgagcatttggttttacattatattctctggtttctgtttttgtgatttgtgttctgatgatgcaaacgcttccattttttatgttgctcctgcacaagatttcctgcacaaccaactgttttttgaattctttatgttatttgatccagggagtggacacaatcaggctcttgcgcaagtatcccctgaatttactacctgtagtttcgaaatgggcttacccaaaaaaatatttgcactaagaatatttatgtttgtttagttggtctggacaaaccacaagatcagtttaagcattgcttccaaatgccattaaatatttatcttgactgaaaattcgcacacaagaatagtaatattctatgaccaagtgactgtagtatgaagaagcatgtgtcattttcctgattaatttagctggttcaactttgttggggtcccaagtcttggccagaacttgatgtaattaaactcctttagacaattgagtacctttctatgtggatttacatatccctttgcttatttagtaacttctgcaaaatttgaatcctaggcaatgtcaacctcaacaccttgatgaacatgttcagtgtgcttggtgctggtggtggccttggtggtcgaaatgcttctaatggctctggaccgccatgcttgcgtcggacgcgggacgtccacgccgccatcgcccgtgagcagctccgacagcctcatcgccgcgttgcacctgctcttgtgtcgcaggctcgggttaccgtcggtgctgacaccgaggaaggcatgatccatgcggagcagcccaaggcgcgatgccacctccgctgtcacgcatgatgagctgcttcgcctctggcaccgccttgttccttcgcgatctcacattggacggtggatgaacttgggcttccaagatccgtaatacaaggtaaattgagtaccttttgtgacctcttctgtatttctaggcctttgtataacagctgtggacaaaacctgtaaacatgttggatgaactggagcagctattgaaaggtaactctatggtgaaagagctaacgcctaggacaaatgactaccttgtttcatttcgagaatgtatgtccaccaggattttatctgttaatttgaacaaaattcatatcaaagcacgacaggtacttcttgatatttccttgatttgcacagtgattgagtgagcttttaagggtacgaatgtagcagcctagaataattctatatttacttactactataaagagcgggagcaaaatatagctatacaattgatgtatatttagcatatcaaacaatgctcaagatacttaattaattgcatactatagttaggctgtatataccaatgcaatggtcactagcaagataatgcagcctcacagtcttatgacatcagccaatatataaattagaccatttttgttgctgcaactgcaactaatactatgttgaagtgtttttcgttaactctgctctgaaaatgctttttgcttcactctttgacatatctatatgactatatagccgatgcctgtttttactatatgcttatcatgaatctcatgttttccatatgaataatgctagctgttgcaacatctttgtttggagctaatgatacatttaatcctagacttgatggcaaagaacgggtgcaattttttgtctctctatttcctatttatgttgcacaaataattgtttccttttgttatccaaataaataattacttccttctccacccttttctccagttgtagcgagtgagttttagtaagggataaacaatagtaggaagaactctgttgtgtttcaatctcgagtatttgatggatggggcattgttctatagatggtgtatacagaaatgatcttaactgtcattttggtcaaaaccacaatagttctacttatgttagaaaatcaaaagatttaagtgtcttccatggtttaaagttcatgatgagcaaatttgacttatttttaattgtttatcatattttgagaataattttgctgcctattcaacagataccatggggggagcatttgatccagctagctggcaaacaagatttggtgttaggatgcgacagggcctccctccaatgcaaaatcacattaaccatgtcaccgctgtcaattgttttcttgagtttgttcccaaaacctcttaattattattgcccacggatagtcatgttatctacataatccgttttgccactcttcagggttctgcattgtgaatagaggttcatctttgtgattagattgccaccgccgctgctttctactcattcgacgaatgttttgcaaagaagaaatctggtttatcttaccctcgattccttcctatgatacaactaacaaaatgaattggtacattcaggtatctttaaaaccttttcacttccaaattagaatgatatcatgctcaagaggtaacattttctgatgttttttattttaatagtaattattggtcgctgactttttaaaactatttgtgttgtacttcaagcatcttctacactgcatctaagctttgaagagttacggacaattttgtactaattgttttctttattttcccaaatgtgtgccacttcctttagtatttttgcagtgcagacgattgaaaactactgttttacatcacctctctgtcataggaatagtttactactctaatgctcattctattaacactaaaaaaagatatatcgcttgaaaacaggtatgtatttcaatcttctagatttatatttctttctttatatatacaaaacaggtaagtttgtaccatttgttttattttttaaaaaaagaaaaggtatgacacttacattagtattttttcccaccagaaacgattgaaaactattgtttcccgtcacctcctgtcatagatggcttggaccctcttattatcctgggagcctcggtggtttggaagcatagaaacagagtggtgttcggtagagtttcttccaacctcactcttattctggagtctgctaatgaggaaagcgagaaatgacaagttgcaggagccaagggttatcctttctggctgctccaagccatataatttagggtggttggatccttcatggatattttaatgtacttctgttgttggcctccgtaagaagtgcatgtatcccgggcgtctttcagctctttgtattcttcgtcttttaatatagtggggcgcagttctcctgtgcttttcgagaaaaaaaaatatgtgcatctatttaagtctcttaccaataagtgtttataaaatatgtttcattgttcttagcttgatatgtggtaaggtcttcttctttcttgatcatctatgtatgccttaattcatatactccgaaataatctttactgttagctatgattctttttatcaaaactatcttcaagtgcatctaacaacaattcgttcaaatttttttgttaaaacaggaattgacacc

SEQ ID NO: 202890 - DNA, 3990 bp, Zea Mays
cccaccacccctcacctaacattcctagcgtcacccccggcgcccaaagatcgaagctccgagcaggaaacgccaccgccctccatctcccccgtgtccctagccaggagcaccgtccccctcaccaccccgcctaactttcctatcctcatcccgacgcctggagatccatcctcaaacgccgctgctagggcaccgtcccgcgctaggaccccccgcgcctcgcaatcatgtcaccggcaactctgacgacctagggctcacaggaagttgactttcctctgctgctgttgtgctcagtgtggatgacattgtgctgcctcaggtacaactttccttttctgtgcttaagtaaaaaaatgttgttccattcgatacacagtcggattatttgatttaaagccttgctgaagttgacattgtgatatatcgtgaccctggtaaaaaatattttcaagttcagaaagcaggatacttcctttaatatgtctatcacacatgttcacggagataattctacacatggttttttatacctctttttgaccccacttggagatggaagcgagattttgaagttttaaggcctgcagtgccgtggtcttgcgttgatatctgtagttgtacatagaaattttctcatttggtgtatgtctttgctactttttccttaaacataaattatatttttataactatctggcagttattgatctatcactgccttactacatgatacctatctggcagttatgaaaatattcgaatccattttatatgtaaatcctaaaattttcgaatccaaagccacccattacaatattatgtactgaaattatatcttttacttatgtgtcactctgcatttttttaagatttaaaaaaatttcttccttattttatacatggttgaacaccaaccttcatgattcactggatcttcttagtattatctctaacaaaagaatttataaagttctttccccacaaatgcaaatataggtattagcttattgattttaaattggttattaaatgtctggcatggatctcctccctgctcacgggcctcaccatcctcaatggcgagtgtaaaacttcgcaccaacacactcgacaagcttgatggcgacccctacgtcaacatccgcatgggcaaggtcatgtaatttttatcttcatttcaatagtgattgaagcaaatgaaaattttaaaattttggcagtgagtatgcaacacttccaagcaatggataatgtattaatgtggggctgtgggcgttggaacgtgcgtgttgactagctttgattagcttgtcgatatacatacttagccatctattttttcttctcctttcaaatgctatgctattgctactgctgttggagtgtaccatttaacttgatatatgatttaatagatgctttgtgtgcataaatcgtctacagttaccatctggacttttttagccatgtttgagagatgtgacggagtttggatttcacttaaaaatgcaggtccagttgatgtttaatgtgcctgaactgcagttacagtcataaagctcaaacaatcttgagcatttggttttacattatattctctggtttctgtttttgtgatttgtgttctgatgatgcaaacgcttccattttttatgttgctcctgcacaagatttcctgcacaaccaactgttttttgaattctttatgttatttgatccagggagtggacacaatcaggctcttgcgcaagtatcccctgaatttactacctgtagtttcgaaatgggcttacccaaaaaaatatttgcactaagaatatttatgtttgtttagttggtctggacaaaccacaagatcagtttaagcattgcttccaaatgccattaaatatttatcttgactgaaaattcgcacacaagaatagtaatattctatgaccaagtgactgtagtatgaagaagcatgtgtcattttcctgattaatttagctggttcaactttgttggggtcccaagtcttggccagaacttgatgtaattaaactcctttagacaattgagtacctttctatgtggatttacatatccctttgcttatttagtaacttctgcaaaatttgaatcctaggcaatgtcaacctcaacaccttgatgaacatgttcagtgtgcttggtgctggtggtggccttggtggtcgaaatgcttctaatggtccctttatgtggcacacatgaatacctacaactccataatgttgctgaatgattaattatggaatgtggacaatgcaagatacattttgagtacccttttgatctaggctctggaccgccatgcttgcgtcggacgcgggacgtccacgccgccatcgcccgtgagcagctccgacagcctcatcgccgcgttgcacctgctcttgtgtcgcaggctcgggttaccgtcggtgctgacaccgaggaaggcatgatccatgcggagcagcccaaggcgcgatgccacctccgctgtcacgcatgatgagctgcttcgcctctggcaccgccttgttccttcgcgatctcacattggacggtggatgaacttgggcttccaagatccgtaatacaagataccatggggggagcatttgatccagctagctggcaaacaagatttggtgttaggatgcgacagggcctccctccaatgcaaaatcacattaaccatgtcaccgctgtcaattgttttcttgagtttgttcccaaaacctcttaattattattgcccacggatagtcatgttatctacataatccgttttgccactcttcagggttctgcattgtgaatagaggttcatctttgtgattagattgccaccgccgctgctttctactcattcgacgaatgttttgcaaagaagaaatctggtttatcttaccctcgattccttcctatgatacaactaacaaaatgaattggtacattcaggtatctttaaaaccttttcacttccaaattagaatgatatcatgctcaagaggtaacattttctgatgttttttattttaatagtaattattggtcgctgactttttaaaactatttgtgttgtacttcaagcatcttctacactgcatctaagctttgaagagttacggacaattttgtactaattgttttctttattttcccaaatgtgtgccacttcctttagtatttttgcagtgcagacgattgaaaactactgttttacatcacctctctgtcataggaatagtttactactctaatgctcattctattaacactaaaaaaagatatatcgcttgaaaacaggtatgtatttcaatcttctagatttatatttctttctttatatatacaaaacagaaacgattgaaaactattgtttcccgtcacctcctgtcatagatggcttggaccctcttattatcctgggagcctcggtggtttggaagcatagaaacagagtggtgttcggtagagtttcttccaacctcactcttattctggagtctgctaatgaggaaagcgagaaatgacaagttgcaggagccaagggttatcctttctggctgctccaagccatataatttagggtggttggatccttcatggatattttaatgtacttctgttgttggcctccgtaagaagtgcatgtatcccgggcgtctttcagctctttgtattcttcgtcttttaatatagtggggcgcagttctcctgtgcttttcgagaaaaaaaaatatgtgcatctatttaagtctcttaccaataagtgtttataaaatatgtttcattgttcttagcttgatatgtggtaaggtcttcttctttcttgatcatctatgtatgccttaattcatatactccgaaataatctttactgttagctatgattctttttatcaaaactatcttcaagtgcatctaacaacaattcgttcaaatttttttgttaaaacaggaattgacacc

SEQ ID NO: 202891 - DNA, 5576 bp, Zea Mays
cccaccacccctcacctaacattcctagcgtcacccccggcgcccaaagatcgaagctccgagcaggaaacgccaccgccctccatctcccccgtgtccctagccaggagcaccgtccccctcaccaccccgcctaactttcctatcctcatcccgacgcctggagatccatcctcaaacgccgctgctagggcaccgtcccgcgctaggaccccccgcgcctcgcaatcatgtcaccggcaactctgacgacctagggctcacagaggctagcaccacgatggccgacccgggcgcctccgtcaacatcgctgcgcgccaccacctcgcgtcgcagctcgcgaggcagccgccagtgacgcacacgggctggtggggaggggcgcgttcgtaccaccatgggaggggcgtggggcgtggcatcaagggtgagggaggggcgtcgaggaggcggacggcaacaagcccacacatccaacaccctaccaggaagttgactttcctctgctgctgttgtgctcagtgtggatgacattgtgctgcctcaggtacaactttccttttctgtgcttaagtaaaaaaatgttgttccattcgatacacagtcggattatttgatttaaagccttgctgaagttgacattgtgatatatcgtgaccctggtaaaaaatattttcaagttcagaaagcaggatacttcctttaatatgtctatcacacatgttcacggagataattctacacatggttttttatacctctttttgaccccacttggagatggaagcgagattttgaagttttaaggcctgcagtgccgtggtcttgcgttgatatctgtagttgtacatagaaattttctcatttggtgtatgtctttgctactttttccttaaacataaattatatttttataactatctggcagttattgatctatcactgccttactacatgatacctatctggcagttatgaaaatattcgaatccattttatatgtaaatcctaaaattttcgaatccaaagccacccattacaatattatgtactgaaattatatcttttacttatgtgtcactctgcatttttttaagatttaaaaaaatttcttccttattttatacatggttgaacaccaaccttcatgattcactggatcttcttagtattatctctaacaaaagaatttataaagttctttccccacaaatgcaaatataggtattagcttattgattttaaattggttattaaatgtctggcatggatctcctccctgctcacgggcctcaccatcctcaatggcgagtgtaaaacttcgcaccaacacactcgacaagcttgatggcgacccctacgtcaacatccgcatgggcaaggtcatgtaatttttatcttcatttcaatagtgattgaagcaaatgaaaattttaaaattttggcagtgagtatgcaacacttccaagcaatggataatgtattaatgtggggctgtgggcgttggaacgtgcgtgttgactagctttgattagcttgtcgatatacatacttagccatctattttttcttctcctttcaaatgctatgctattgctactgctgttggagtgtaccatttaacttgatatatgatttaatagatgctttgtgtgcataaatcgtctacagttaccatctggacttttttagccatgtttgagagatgtgacggagtttggatttcacttaaaaatgcaggtccagttgatgtttaatgtgcctgaactgcagttacagtcataaagctcaaacaatcttgagcatttggttttacattatattctctggtttctgtttttgtgatttgtgttctgatgatgcaaacgcttccattttttatgttgctcctgcacaagatttcctgcacaaccaactgttttttgaattctttatgttatttgatccagggagtggacacaatcaggctcttgcgcaagtatcccctgaatttactacctgtagtttcgaaatgggcttacccaaaaaaatatttgcactaagaatatttatgtttgtttagttggtctggacaaaccacaagatcagtttaagcattgcttccaaatgccattaaatatttatcttgactgaaaattcgcacacaagaatagtaatattctatgaccaagtgactgtagtatgaagaagcatgtgtcattttcctgattaatttagctggttcaactttgttggggtcccaagtcttggccagaacttgatgtaattaaactcctttagacaattgagtacctttctatgtggatttacatatccctttgcttatttagtaacttctgcaaaatttgaatcctaggcaatgtcaacctcaacaccttgatgaacatgttcagtgtgcttggtgctggtggtggccttggtggtcgaaatgcttctaatggtccctttatgtggcacacatgaatacctacaactccataatgttgctgaatgattaattatggaatgtggacaatgcaagatacattttgagtacccttttgatctaggctctggaccgccatgcttgcgtcggacgcgggacgtccacgccgccatcgcccgtgagcagctccgacagcctcatcgccgcgttgcacctgctcttgtgtcgcaggctcgggttaccgtcggtgctgacaccgaggaaggcatgatccatgcggagcagcccaaggcgcgatgccacctccgctgtcacgcatgatgagctgcttcgcctctggcaccgccttgttccttcgcgatctcacattggacggtggatgaacttgggcttccaagatccgtaatacaaggtaaattgagtaccttttgtgacctcttctgtatttctaggcctttgtataacagctgtggacaaaacctgtaaacatgttggatgaactggagcagctattgaaaggtaactctatggtgaaagagctaacgcctaggacaaatgactaccttgtttcatttcgagaatgtatgtccaccaggattttatctgttaatttgaacaaaattcatatcaaagcacgacaggtacttcttgatatttccttgatttgcacagtgattgagtgagcttttaagggtacgaatgtagcagcctagaataattctatatttacttactactataaagagcgggagcaaaatatagctatacaattgatgtatatttagcatatcaaacaatgctcaagatacttaattaattgcatactatagttaggctgtatataccaatgcaatggtcactagcaagataatgcagcctcacagtcttatgacatcagccaatatataaattagaccatttttgttgctgcaactgcaactaatactatgttgaagtgtttttcgttaactctgctctgaaaatgctttttgcttcactctttgacatatctatatgactatatagccgatgcctgtttttactatatgcttatcatgaatctcatgttttccatatgaataatgctagctgttgcaacatctttgtttggagctaatgatacatttaatcctagacttgatggcaaagaacgggtgcaattttttgtctctctatttcctatttatgttgcacaaataattgtttccttttgttatccaaataaataattacttccttctccacccttttctccagttgtagcgagtgagttttagtaagggataaacaatagtaggaagaactctgttgtgtttcaatctcgagtatttgatggatggggcattgttctatagatggtgtatacagaaatgatcttaactgtcattttggtcaaaaccacaatagttctacttatgttagaaaatcaaaagatttaagtgtcttccatggtttaaagttcatgatgagcaaatttgacttatttttaattgtttatcatattttgagaataattttgctgcctattcaacagataccatggggggagcatttgatccagctagctggcaaacaagatttggtggtaactgtttatgatgaaacaaatatttcgaatcattaattgctatgtttgtgtctgcatcctgtcagcaattaggatgtgacaggacatggcctccctccaatgcaaaaatcccaaaagctccttgcagacacacttatttgcattctttgcgctgacatgcagttaggatgcgacagggcctccctccaatgcaaaatcacattaaccatgtcaccgctgtcaattgttttcttgagtttgttcccaaaacctcttaattattattgcccacggatagtcatgttatctacataatccgttttgccactcttcagggttctgcattgtgaatagaggttcatctttgtgattagattgccaccgccgctgctttctactcattcgacgaatgttttgcaaagaagaaatctggtttatcttaccctcgattccttcctatgatacaactaacaaaatgaattggtacattcaggtatctttaaaaccttttcacttccaaattagaatgatatcatgctcaagaggtaacattttctgatgttttttattttaatagtaattattggtcgctgactttttaaaactatttgtgttgtacttcaagcatcttctacactgcatctaagctttgaagagttacggacaattttgtactaattgttttctttattttcccaaatgtgtgccacttcctttagtatttttgcagtgcagacgattgaaaactactgttttacatcacctctctgtcataggaatagtttactactctaatgctcattctattaacactaaaaaaagatatatcgcttgaaaacaggtatgtatttcaatcttctagatttatatttctttctttatatatacaaaacaggtaagtttgtaccatttgttttattttttaaaaaaagaaaaggtatgacacttacattagtattttttcccaccagaaacgattgaaaactattgtttcccgtcacctcctgtcatagatggcttggaccctcttattatcctgggagcctcggtggtttggaagcatagaaacagagtggtgttcggtagagtttcttccaacctcactcttattctggagtctgctaatgaggaaagcgagaaatgacaagttgcaggagccaagggttatcctttctggctgctccaagccatataatttagggtggttggatccttcatggatattttaatgtacttctgttgttggcctccgtaagaagtgcatgtatcccgggcgtctttcagctctttgtattcttcgtcttttaatatagtggggcgcagttctcctgtgcttttcgagaaaaaaaaatatgtgcatctatttaagtctcttaccaataagtgtttataaaatatgtttcattgttcttagcttgatatgtggtaaggtcttcttctttcttgatcatctatgtatgccttaattcatatactccgaaataatctttactgttagctatgattctttttatcaaaactatcttcaagtgcatctaacaacaattcgttcaaatttttttgttaaaacaggaattgacacc

SEQ ID NO: 202892 - DNA, 4656 bp, Zea Mays
taacattcctagcgtcacccccggcgcccaaagatcgaagctccgagcaggaaacgccaccgccctccatctcccccgtgtccctagccaggagcaccgtccccctcaccaccccgcctaactttcctatcctcatcccgacgcctggagatccatcctcaaacgccgctgctagggcaccgtcccgcgctaggaccccccgcgcctcgcaatcatgtcaccggcaactctgacgacctagggctcacagaggctagcaccacgatggccgacccgggcgcctccgtcaacatcgctgcgcgccaccacctcgcgtcgcagctcgcgaggcagccgccagtgacgcacacgggctggtggggaggggcgcgttcgtaccaccatgggaggggcgtggggcgtggcatcaagggtgagggaggggcgtcgaggaggcggacggcaacaagcccacacatccaacaccctaccaggtctttgatgctgctgcttcaccaaacaatgaaatgctcttgatgcatgattcaggagctaggaggatatctattgtcgtcgagttacatgaagttgactttcctctgctgctgttgtgctcagtgtggatgacattgtgctgcctcaggtacaactttccttttctgtgcttaagtaaaaaaatgttgttccattcgatacacagtcggattatttgatttaaagccttgctgaagttgacattgtgatatatcgtgaccctggtaaaaaatattttcaagttcagaaagcaggatacttcctttaatatgtctatcacacatgttcacggagataattctacacatggttttttatacctctttttgaccccacttggagatggaagcgagattttgaagttttaaggcctgcagtgccgtggtcttgcgttgatatctgtagttgtacatagaaattttctcatttggtgtatgtctttgctactttttccttaaacataaattatatttttataactatctggcagttattgatctatcactgccttactacatgatacctatctggcagttatgaaaatattcgaatccattttatatgtaaatcctaaaattttcgaatccaaagccacccattacaatattatgtactgaaattatatcttttacttatgtgtcactctgcatttttttaagatttaaaaaaatttcttccttattttatacatggttgaacaccaaccttcatgattcactggatcttcttagtattatctctaacaaaagaatttataaagttctttccccacaaatgcaaatataggtattagcttattgattttaaattggttattaaatgtctggcatggatctcctccctgctcacgggcctcaccatcctcaatggcgagtgtaaaacttcgcaccaacacactcgacaagcttgatggcgacccctacgtcaacatccgcatgggcaaggtcatgcaatgtcaacctcaacaccttgatgaacatgttcagtgtgcttggtgctggtggtggccttggtggtcgaaatgcttctaatggctctggaccgccatgcttgcgtcggacgcgggacgtccacgccgccatcgcccgtgagcagctccgacagcctcatcgccgcgttgcacctgctcttgtgtcgcaggctcgggttaccgtcggtgctgacaccgaggaaggcatgatccatgcggagcagcccaaggcgcgatgccacctccgctgtcacgcatgatgagctgcttcgcctctggcaccgccttgttccttcgcgatctcacattggacggtggatgaacttgggcttccaagatccgtaatacaaggtaaattgagtaccttttgtgacctcttctgtatttctaggcctttgtataacagctgtggacaaaacctgtaaacatgttggatgaactggagcagctattgaaaggtaactctatggtgaaagagctaacgcctaggacaaatgactaccttgtttcatttcgagaatgtatgtccaccaggattttatctgttaatttgaacaaaattcatatcaaagcacgacaggtacttcttgatatttccttgatttgcacagtgattgagtgagcttttaagggtacgaatgtagcagcctagaataattctatatttacttactactataaagagcgggagcaaaatatagctatacaattgatgtatatttagcatatcaaacaatgctcaagatacttaattaattgcatactatagttaggctgtatataccaatgcaatggtcactagcaagataatgcagcctcacagtcttatgacatcagccaatatataaattagaccatttttgttgctgcaactgcaactaatactatgttgaagtgtttttcgttaactctgctctgaaaatgctttttgcttcactctttgacatatctatatgactatatagccgatgcctgtttttactatatgcttatcatgaatctcatgttttccatatgaataatgctagctgttgcaacatctttgtttggagctaatgatacatttaatcctagacttgatggcaaagaacgggtgcaattttttgtctctctatttcctatttatgttgcacaaataattgtttccttttgttatccaaataaataattacttccttctccacccttttctccagttgtagcgagtgagttttagtaagggataaacaatagtaggaagaactctgttgtgtttcaatctcgagtatttgatggatggggcattgttctatagatggtgtatacagaaatgatcttaactgtcattttggtcaaaaccacaatagttctacttatgttagaaaatcaaaagatttaagtgtcttccatggtttaaagttcatgatgagcaaatttgacttatttttaattgtttatcatattttgagaataattttgctgcctattcaacagataccatggggggagcatttgatccagctagctggcaaacaagatttggtggtaactgtttatgatgaaacaaatatttcgaatcattaattgctatgtttgtgtctgcatcctgtcagcaattaggatgtgacaggacatggcctccctccaatgcaaaaatcccaaaagctccttgcagacacacttatttgcattctttgcgctgacatgcagttaggatgcgacagggcctccctccaatgcaaaatcacattaaccatgtcaccgctgtcaattgttttcttgagtttgttcccaaaacctcttaattattattgcccacggatagtcatgttatctacataatccgttttgccactcttcagggttctgcattgtgaatagaggttcatctttgtgattagattgccaccgccgctgctttctactcattcgacgaatgttttgcaaagaagaaatctggtttatcttaccctcgattccttcctatgatacaactaacaaaatgaattggtacattcaggtatctttaaaaccttttcacttccaaattagaatgatatcatgctcaagaggtaacattttctgatgttttttattttaatagtaattattggtcgctgactttttaaaactatttgtgttgtacttcaagcatcttctacactgcatctaagctttgaagagttacggacaattttgtactaattgttttctttattttcccaaatgtgtgccacttcctttagtatttttgcagtgcagacgattgaaaactactgttttacatcacctctctgtcataggaatagtttactactctaatgctcattctattaacactaaaaaaagatatatcgcttgaaaacaggtatgtatttcaatcttctagatttatatttctttctttatatatacaaaacaggtaagtttgtaccatttgttttattttttaaaaaaagaaaaggtatgacacttacattagtattttttcccaccagaaacgattgaaaactattgtttcccgtcacctcctgtcatagtaagtgtttcccgtcacctgaggatttccaattttctacaatggtgggagagatcttcaactattgtttctgacacttgaaaggatggcttggaccctcttattatcctgggagcctcggtggtttggaagcatagaaacagagtggtgttcggtagagtttcttccaacctcactcttattctggagtctgctaatgaggaaagcgagaaatgacaagttgcaggagccaagggttatcctttctggctgctccaagccatataatttagggtggttggatccttcatggatattttaatgtacttctgttgttggcctccgtaagaagtgcatgtatcccgggcgtctttcagctctttgtattcttcgtcttttaatatagtggggcgcagttctcctgtgcttttcgagaaaaaaaaatatgtgcatctatttaagtctcttaccaataagtgtttataaaatatgtttcattgttcttagcttgatatgtggtaaggtcttcttctttcttgatcatctatgtatgccttaattcatatactccgaaataatctttactgttagctatgattctttttatcaaaactatcttcaagtgcatctaacaacaattcgttcaaatttttttgttaaaacaggaattgacacc

SEQ ID NO: 202893 - DNA, 3822 bp, Zea Mays
gtcacccccggcgcccaaagatcgaagctccgagcaggaaacgccaccgccctccatctcccccgtgtccctagccaggagcaccgtccccctcaccaccccgcctaactttcctatcctcatcccgacgcctggagatccatcctcaaacgccgctgctagggcaccgtcccgcgctaggaccccccgcgcctcgcaatcatgtcaccggcaactctgacgacctagggctcacagaggctagcaccacgatggccgacccgggcgcctccgtcaacatcgctgcgcgccaccacctcgcgtcgcagctcgcgaggcagccgccagtgacgcacacgggctggtggggaggggcgcgttcgtaccaccatgggaggggcgtggggcgtggcatcaagggtgagggaggggcgtcgaggaggcggacggcaacaagcccacacatccaacaccctaccaggaagttgactttcctctgctgctgttgtgctcagtgtggatgacattgtgctgcctcaggcaatgtcaacctcaacaccttgatgaacatgttcagtgtgcttggtgctggtggtggccttggtggtcgaaatgcttctaatggtccctttatgtggcacacatgaatacctacaactccataatgttgctgaatgattaattatggaatgtggacaatgcaagatacattttgagtacccttttgatctaggctctggaccgccatgcttgcgtcggacgcgggacgtccacgccgccatcgcccgtgagcagctccgacagcctcatcgccgcgttgcacctgctcttgtgtcgcaggctcgggttaccgtcggtgctgacaccgaggaaggcatgatccatgcggagcagcccaaggcgcgatgccacctccgctgtcacgcatgatgagctgcttcgcctctggcaccgccttgttccttcgcgatctcacattggacggtggatgaacttgggcttccaagatccgtaatacaaggtaaattgagtaccttttgtgacctcttctgtatttctaggcctttgtataacagctgtggacaaaacctgtaaacatgttggatgaactggagcagctattgaaaggtaactctatggtgaaagagctaacgcctaggacaaatgactaccttgtttcatttcgagaatgtatgtccaccaggattttatctgttaatttgaacaaaattcatatcaaagcacgacaggtacttcttgatatttccttgatttgcacagtgattgagtgagcttttaagggtacgaatgtagcagcctagaataattctatatttacttactactataaagagcgggagcaaaatatagctatacaattgatgtatatttagcatatcaaacaatgctcaagatacttaattaattgcatactatagttaggctgtatataccaatgcaatggtcactagcaagataatgcagcctcacagtcttatgacatcagccaatatataaattagaccatttttgttgctgcaactgcaactaatactatgttgaagtgtttttcgttaactctgctctgaaaatgctttttgcttcactctttgacatatctatatgactatatagccgatgcctgtttttactatatgcttatcatgaatctcatgttttccatatgaataatgctagctgttgcaacatctttgtttggagctaatgatacatttaatcctagacttgatggcaaagaacgggtgcaattttttgtctctctatttcctatttatgttgcacaaataattgtttccttttgttatccaaataaataattacttccttctccacccttttctccagttgtagcgagtgagttttagtaagggataaacaatagtaggaagaactctgttgtgtttcaatctcgagtatttgatggatggggcattgttctatagatggtgtatacagaaatgatcttaactgtcattttggtcaaaaccacaatagttctacttatgttagaaaatcaaaagatttaagtgtcttccatggtttaaagttcatgatgagcaaatttgacttatttttaattgtttatcatattttgagaataattttgctgcctattcaacagataccatggggggagcatttgatccagctagctggcaaacaagatttggtggtaactgtttatgatgaaacaaatatttcgaatcattaattgctatgtttgtgtctgcatcctgtcagcaattaggatgtgacaggacatggcctccctccaatgcaaaaatcccaaaagctccttgcagacacacttatttgcattctttgcgctgacatgcagttaggatgcgacagggcctccctccaatgcaaaatcacattaaccatgtcaccgctgtcaattgttttcttgagtttgttcccaaaacctcttaattattattgcccacggatagtcatgttatctacataatccgttttgccactcttcagggttctgcattgtgaatagaggttcatctttgtgattagattgccaccgccgctgctttctactcattcgacgaatgttttgcaaagaagaaatctggtttatcttaccctcgattccttcctatgatacaactaacaaaatgaattggtacattcaggtatctttaaaaccttttcacttccaaattagaatgatatcatgctcaagaggtaacattttctgatgttttttattttaatagtaattattggtcgctgactttttaaaactatttgtgttgtacttcaagcatcttctacactgcatctaagctttgaagagttacggacaattttgtactaattgttttctttattttcccaaatgtgtgccacttcctttagtatttttgcagtgcagacgattgaaaactactgttttacatcacctctctgtcataggaatagtttactactctaatgctcattctattaacactaaaaaaagatatatcgcttgaaaacaggtatgtatttcaatcttctagatttatatttctttctttatatatacaaaacaggtaagtttgtaccatttgttttattttttaaaaaaagaaaaggtatgacacttacattagtattttttcccaccagaaacgattgaaaactattgtttcccgtcacctcctgtcatagtaagtgtttcccgtcacctgaggatttccaattttctacaatggtgggagagatcttcaactattgtttctgacacttgaaaggatggcttggaccctcttattatcctgggagcctcggtggtttggaagcatagaaacagagtggtgttcggtagagtttcttccaacctcactcttattctggagtctgctaatgaggaaagcgagaaatgacaagttgcaggagccaagggttatcctttctggctgctccaagccatataatttagggtggttggatccttcatggatattttaatgtacttctgttgttggcctccgtaagaagtgcatgtatcccgggcgtctttcagctctttgtattcttcgtcttttaatatagtggggcgcagttctcctgtgcttttcgagaaaaaaaaatatgtgcatctatttaagtctcttaccaataagtgtttataaaatatgtttcattgttcttagcttgatatgtggtaaggtcttcttctttcttgatcatctatgtatgccttaattcatatactccgaaataatctttactgttagctatgattctttttatcaaaactatcttcaagtgcatctaacaacaattcgttcaaatttttttgttaaaacaggaattgacacc

SEQ ID NO: 202894 - DNA, 3248 bp, Zea Mays
caaagatcgaagctccgagcaggaaacgccaccgccctccatctcccccgtgtccctagccaggagcaccgtccccctcaccaccccgcctaactttcctatcctcatcccgacgcctggagatccatcctcaaacgccgctgctagggcaccgtcccgcgctaggaccccccgcgcctcgcaatcatgtcaccggcaactctgacgacctagggctcacaggtctttgatgctgctgcttcaccaaacaatgaaatgctcttgatgcatgattcaggagctaggaggatatctattgtcgtcgagttacatgaagttgactttcctctgctgctgttgtgctcagtgtggatgacattgtgctgcctcaggcaatgtcaacctcaacaccttgatgaacatgttcagtgtgcttggtgctggtggtggccttggtggtcgaaatgcttctaatggctctggaccgccatgcttgcgtcggacgcgggacgtccacgccgccatcgcccgtgagcagctccgacagcctcatcgccgcgttgcacctgctcttgtgtcgcaggctcgggttaccgtcggtgctgacaccgaggaaggcatgatccatgcggagcagcccaaggcgcgatgccacctccgctgtcacgcatgatgagctgcttcgcctctggcaccgccttgttccttcgcgatctcacattggacggtggatgaacttgggcttccaagatccgtaatacaaggtaaattgagtaccttttgtgacctcttctgtatttctaggcctttgtataacagctgtggacaaaacctgtaaacatgttggatgaactggagcagctattgaaaggtaactctatggtgaaagagctaacgcctaggacaaatgactaccttgtttcatttcgagaatgtatgtccaccaggattttatctgttaatttgaacaaaattcatatcaaagcacgacaggtacttcttgatatttccttgatttgcacagtgattgagtgagcttttaagggtacgaatgtagcagcctagaataattctatatttacttactactataaagagcgggagcaaaatatagctatacaattgatgtatatttagcatatcaaacaatgctcaagatacttaattaattgcatactatagttaggctgtatataccaatgcaatggtcactagcaagataatgcagcctcacagtcttatgacatcagccaatatataaattagaccatttttgttgctgcaactgcaactaatactatgttgaagtgtttttcgttaactctgctctgaaaatgctttttgcttcactctttgacatatctatatgactatatagccgatgcctgtttttactatatgcttatcatgaatctcatgttttccatatgaataatgctagctgttgcaacatctttgtttggagctaatgatacatttaatcctagacttgatggcaaagaacgggtgcaattttttgtctctctatttcctatttatgttgcacaaataattgtttccttttgttatccaaataaataattacttccttctccacccttttctccagttgtagcgagtgagttttagtaagggataaacaatagtaggaagaactctgttgtgtttcaatctcgagtatttgatggatggggcattgttctatagatggtgtatacagaaatgatcttaactgtcattttggtcaaaaccacaatagttctacttatgttagaaaatcaaaagatttaagtgtcttccatggtttaaagttcatgatgagcaaatttgacttatttttaattgtttatcatattttgagaataattttgctgcctattcaacagataccatggggggagcatttgatccagctagctggcaaacaagatttggtgggttctgcattgtgaatagaggttcatctttgtgattagattgccaccgccgctgctttctactcattcgacgaatgttttgcaaagaagaaatctggtttatcttaccctcgattccttcctatgatacaactaacaaaatgaattggtacattcaggtatctttaaaaccttttcacttccaaattagaatgatatcatgctcaagaggtaacattttctgatgttttttattttaatagtaattattggtcgctgactttttaaaactatttgtgttgtacttcaagcatcttctacactgcatctaagctttgaagagttacggacaattttgtactaattgttttctttattttcccaaatgtgtgccacttcctttagtatttttgcagtgcagacgattgaaaactactgttttacatcacctctctgtcataggaatagtttactactctaatgctcattctattaacactaaaaaaagatatatcgcttgaaaacaggtatgtatttcaatcttctagatttatatttctttctttatatatacaaaacaggtaagtttgtaccatttgttttattttttaaaaaaagaaaaggtatgacacttacattagtattttttcccaccagaaacgattgaaaactattgtttcccgtcacctcctgtcatagtaagtgtttcccgtcacctgaggatttccaattttctacaatggtgggagagatcttcaactattgtttctgacacttgaaaggatggcttggaccctcttattatcctgggagcctcggtggtttggaagcatagaaacagagtggtgttcggtagagtttcttccaacctcactcttattctggagtctgctaatgaggaaagcgagaaatgacaagttgcaggagccaagggttatcctttctggctgctccaagccatataatttagggtggttggatccttcatggatattttaatgtacttctgttgttggcctccgtaagaagtgcatgtatcccgggcgtctttcagctctttgtattcttcgtcttttaatatagtggggcgcagttctcctgtgcttttcgagaaaaaaaaatatgtgcatctatttaagtctcttaccaataagtgtttataaaatatgtttcattgttcttagcttgatatgtggtaaggtcttcttctttcttgatcatctatgtatgccttaattcatatactccgaaataatctttactgttagctatgattctttttatcaaaactatcttcaagtgcatctaacaacaattcgttcaaatttttttgttaaaacaggaattgacacc

SEQ ID NO: 202895 - DNA, 4878 bp, Zea Mays
atcgaagctccgagcaggaaacgccaccgccctccatctcccccgtgtccctagccaggagcaccgtccccctcaccaccccgcctaactttcctatcctcatcccgacgcctggagatccatcctcaaacgccgctgctagggcaccgtcccgcgctaggaccccccgcgcctcgcaatcatgtcaccggcaactctgacgacctagggctcacaggaagttgactttcctctgctgctgttgtgctcagtgtggatgacattgtgctgcctcaggtacaactttccttttctgtgcttaagtaaaaaaatgttgttccattcgatacacagtcggattatttgatttaaagccttgctgaagttgacattgtgatatatcgtgaccctggtaaaaaatattttcaagttcagaaagcaggatacttcctttaatatgtctatcacacatgttcacggagataattctacacatggttttttatacctctttttgaccccacttggagatggaagcgagattttgaagttttaaggcctgcagtgccgtggtcttgcgttgatatctgtagttgtacatagaaattttctcatttggtgtatgtctttgctactttttccttaaacataaattatatttttataactatctggcagttattgatctatcactgccttactacatgatacctatctggcagttatgaaaatattcgaatccattttatatgtaaatcctaaaattttcgaatccaaagccacccattacaatattatgtactgaaattatatcttttacttatgtgtcactctgcatttttttaagatttaaaaaaatttcttccttattttatacatggttgaacaccaaccttcatgattcactggatcttcttagtattatctctaacaaaagaatttataaagttctttccccacaaatgcaaatataggtattagcttattgattttaaattggttattaaatgtctggcatggatctcctccctgctcacgggcctcaccatcctcaatggcgagtgtaaaacttcgcaccaacacactcgacaagcttgatggcgacccctacgtcaacatccgcatgggcaaggtcatgtaatttttatcttcatttcaatagtgattgaagcaaatgaaaattttaaaattttggcagtgagtatgcaacacttccaagcaatggataatgtattaatgtggggctgtgggcgttggaacgtgcgtgttgactagctttgattagcttgtcgatatacatacttagccatctattttttcttctcctttcaaatgctatgctattgctactgctgttggagtgtaccatttaacttgatatatgatttaatagatgctttgtgtgcataaatcgtctacagttaccatctggacttttttagccatgtttgagagatgtgacggagtttggatttcacttaaaaatgcaggtccagttgatgtttaatgtgcctgaactgcagttacagtcataaagctcaaacaatcttgagcatttggttttacattatattctctggtttctgtttttgtgatttgtgttctgatgatgcaaacgcttccattttttatgttgctcctgcacaagatttcctgcacaaccaactgttttttgaattctttatgttatttgatccagggagtggacacaatcaggctcttgcgcaagtatcccctgaatttactacctgtagtttcgaaatgggcttacccaaaaaaatatttgcactaagaatatttatgtttgtttagttggtctggacaaaccacaagatcagtttaagcattgcttccaaatgccattaaatatttatcttgactgaaaattcgcacacaagaatagtaatattctatgaccaagtgactgtagtatgaagaagcatgtgtcattttcctgattaatttagctggttcaactttgttggggtcccaagtcttggccagaacttgatgtaattaaactcctttagacaattgagtacctttctatgtggatttacatatccctttgcttatttagtaacttctgcaaaatttgaatcctaggcaatgtcaacctcaacaccttgatgaacatgttcagtgtgcttggtgctggtggtggccttggtggtcgaaatgcttctaatggtccctttatgtggcacacatgaatacctacaactccataatgttgctgaatgattaattatggaatgtggacaatgcaagatacattttgagtacccttttgatctaggctctggaccgccatgcttgcgtcggacgcgggacgtccacgccgccatcgcccgtgagcagctccgacagcctcatcgccgcgttgcacctgctcttgtgtcgcaggctcgggttaccgtcggtgctgacaccgaggaaggcatgatccatgcggagcagcccaaggcgcgatgccacctccgctgtcacgcatgatgagctgcttcgcctctggcaccgccttgttccttcgcgatctcacattggacggtggatgaacttgggcttccaagatccgtaatacaaggtaaattgagtaccttttgtgacctcttctgtatttctaggcctttgtataacagctgtggacaaaacctgtaaacatgttggatgaactggagcagctattgaaaggtaactctatggtgaaagagctaacgcctaggacaaatgactaccttgtttcatttcgagaatgtatgtccaccaggattttatctgttaatttgaacaaaattcatatcaaagcacgacaggtacttcttgatatttccttgatttgcacagtgattgagtgagcttttaagggtacgaatgtagcagcctagaataattctatatttacttactactataaagagcgggagcaaaatatagctatacaattgatgtatatttagcatatcaaacaatgctcaagatacttaattaattgcatactatagttaggctgtatataccaatgcaatggtcactagcaagataatgcagcctcacagtcttatgacatcagccaatatataaattagaccatttttgttgctgcaactgcaactaatactatgttgaagtgtttttcgttaactctgctctgaaaatgctttttgcttcactctttgacatatctatatgactatatagccgatgcctgtttttactatatgcttatcatgaatctcatgttttccatatgaataatgctagctgttgcaacatctttgtttggagctaatgatacatttaatcctagacttgatggcaaagaacgggtgcaattttttgtctctctatttcctatttatgttgcacaaataattgtttccttttgttatccaaataaataattacttccttctccacccttttctccagttgtagcgagtgagttttagtaagggataaacaatagtaggaagaactctgttgtgtttcaatctcgagtatttgatggatggggcattgttctatagatggtgtatacagaaatgatcttaactgtcattttggtcaaaaccacaatagttctacttatgttagaaaatcaaaagatttaagtgtcttccatggtttaaagttcatgatgagcaaatttgacttatttttaattgtttatcatattttgagaataattttgctgcctattcaacagataccatggggggagcatttgatccagctagctggcaaacaagatttggtggtaactgtttatgatgaaacaaatatttcgaatcattaattgctatgtttgtgtctgcatcctgtcagcaattaggatgtgacaggacatggcctccctccaatgcaaaaatcccaaaagctccttgcagacacacttatttgcattctttgcgctgacatgcagttaggatgcgacagggcctccctccaatgcaaaatcacattaaccatgtcaccgctgtcaattgttttcttgagtttgttcccaaaacctcttaattattattgcccacggatagtcatgttatctacataatccgttttgccactcttcagggttctgcattgtgaatagaggttcatctttgtgattagattgccaccgccgctgctttctactcattcgacgaatgttttgcaaagaagaaatctggtttatcttaccctcgattccttcctatgatacaactaacaaaatgaattggtacattcaggtatctttaaaaccttttcacttccaaattagaatgatatcatgctcaagagaaacgattgaaaactattgtttcccgtcacctcctgtcatagatggcttggaccctcttattatcctgggagcctcggtggtttggaagcatagaaacagagtggtgttcggtagagtttcttccaacctcactcttattctggagtctgctaatgaggaaagcgagaaatgacaagttgcaggagccaagggttatcctttctggctgctccaagccatataatttagggtggttggatccttcatggatattttaatgtacttctgttgttggcctccgtaagaagtgcatgtatcccgggcgtctttcagctctttgtattcttcgtcttttaatatagtggggcgcagttctcctgtgcttttcgagaaaaaaaaatatgtgcatctatttaagtctcttaccaataagtgtttataaaatatgtttcattgttcttagcttgatatgtggtaaggtcttcttctttcttgatcatctatgtatgccttaattcatatactccgaaataatctttactgttagctatgattctttttatcaaaactatcttcaagtgcatctaacaacaattcgttcaaatttttttgttaaaacaggaattgacacc

SEQ ID NO: 202896 - DNA, 4163 bp, Zea Mays
atcgaagctccgagcaggaaacgccaccgccctccatctcccccgtgtccctagccaggagcaccgtccccctcaccaccccgcctaactttcctatcctcatcccgacgcctggagatccatcctcaaacgccgctgctagggcaccgtcccgcgctaggaccccccgcgcctcgcaatcatgtcaccggcaactctgacgacctagggctcacaggtctttgatgctgctgcttcaccaaacaatgaaatgctcttgatgcatgattcaggagctaggaggatatctattgtcgtcgagttacatgaagttgactttcctctgctgctgttgtgctcagtgtggatgacattgtgctgcctcaggtacaactttccttttctgtgcttaagtaaaaaaatgttgttccattcgatacacagtcggattatttgatttaaagccttgctgaagttgacattgtgatatatcgtgaccctggtaaaaaatattttcaagttcagaaagcaggatacttcctttaatatgtctatcacacatgttcacggagataattctacacatggttttttatacctctttttgaccccacttggagatggaagcgagattttgaagttttaaggcctgcagtgccgtggtcttgcgttgatatctgtagttgtacatagaaattttctcatttggtgtatgtctttgctactttttccttaaacataaattatatttttataactatctggcagttattgatctatcactgccttactacatgatacctatctggcagttatgaaaatattcgaatccattttatatgtaaatcctaaaattttcgaatccaaagccacccattacaatattatgtactgaaattatatcttttacttatgtgtcactctgcatttttttaagatttaaaaaaatttcttccttattttatacatggttgaacaccaaccttcatgattcactggatcttcttagtattatctctaacaaaagaatttataaagttctttccccacaaatgcaaatataggtattagcttattgattttaaattggttattaaatgtctggcatggatctcctccctgctcacgggcctcaccatcctcaatggcgagtgtaaaacttcgcaccaacacactcgacaagcttgatggcgacccctacgtcaacatccgcatgggcaaggtcatgtaatttttatcttcatttcaatagtgattgaagcaaatgaaaattttaaaattttggcagtgagtatgcaacacttccaagcaatggataatgtattaatgtggggctgtgggcgttggaacgtgcgtgttgactagctttgattagcttgtcgatatacatacttagccatctattttttcttctcctttcaaatgctatgctattgctactgctgttggagtgtaccatttaacttgatatatgatttaatagatgctttgtgtgcataaatcgtctacagttaccatctggacttttttagccatgtttgagagatgtgacggagtttggatttcacttaaaaatgcaggtccagttgatgtttaatgtgcctgaactgcagttacagtcataaagctcaaacaatcttgagcatttggttttacattatattctctggtttctgtttttgtgatttgtgttctgatgatgcaaacgcttccattttttatgttgctcctgcacaagatttcctgcacaaccaactgttttttgaattctttatgttatttgatccagggagtggacacaatcaggctcttgcgcaagtatcccctgaatttactacctgtagtttcgaaatgggcttacccaaaaaaatatttgcactaagaatatttatgtttgtttagttggtctggacaaaccacaagatcagtttaagcattgcttccaaatgccattaaatatttatcttgactgaaaattcgcacacaagaatagtaatattctatgaccaagtgactgtagtatgaagaagcatgtgtcattttcctgattaatttagctggttcaactttgttggggtcccaagtcttggccagaacttgatgtaattaaactcctttagacaattgagtacctttctatgtggatttacatatccctttgcttatttagtaacttctgcaaaatttgaatcctaggcaatgtcaacctcaacaccttgatgaacatgttcagtgtgcttggtgctggtggtggccttggtggtcgaaatgcttctaatggctctggaccgccatgcttgcgtcggacgcgggacgtccacgccgccatcgcccgtgagcagctccgacagcctcatcgccgcgttgcacctgctcttgtgtcgcaggctcgggttaccgtcggtgctgacaccgaggaaggcatgatccatgcggagcagcccaaggcgcgatgccacctccgctgtcacgcatgatgagctgcttcgcctctggcaccgccttgttccttcgcgatctcacattggacggtggatgaacttgggcttccaagatccgtaatacaagataccatggggggagcatttgatccagctagctggcaaacaagatttggtggtaactgtttatgatgaaacaaatatttcgaatcattaattgctatgtttgtgtctgcatcctgtcagcaattaggatgtgacaggacatggcctccctccaatgcaaaaatcccaaaagctccttgcagacacacttatttgcattctttgcgctgacatgcagttaggatgcgacagggcctccctccaatgcaaaatcacattaaccatgtcaccgctgtcaattgttttcttgagtttgttcccaaaacctcttaattattattgcccacggatagtcatgttatctacataatccgttttgccactcttcagggttctgcattgtgaatagaggttcatctttgtgattagattgccaccgccgctgctttctactcattcgacgaatgttttgcaaagaagaaatctggtttatcttaccctcgattccttcctatgatacaactaacaaaatgaattggtacattcaggtatctttaaaaccttttcacttccaaattagaatgatatcatgctcaagaggtaacattttctgatgttttttattttaatagtaattattggtcgctgactttttaaaactatttgtgttgtacttcaagcatcttctacactgcatctaagctttgaagagttacggacaattttgtactaattgttttctttattttcccaaatgtgtgccacttcctttagtatttttgcagtgcagacgattgaaaactactgttttacatcacctctctgtcataggaatagtttactactctaatgctcattctattaacactaaaaaaagatatatcgcttgaaaacaggtatgtatttcaatcttctagatttatatttctttctttatatatacaaaacaggtaagtttgtaccatttgttttattttttaaaaaaagaaaaggtatgacacttacattagtattttttcccaccagaaacgattgaaaactattgtttcccgtcacctcctgtcatagatggcttggaccctcttattatcctgggagcctcggtggtttggaagcatagaaacagagtggtgttcggtagagtttcttccaacctcactcttattctggagtctgctaatgaggaaagcgagaaatgacaagttgcaggagccaagggttatcctttctggctgctccaagccatataatttagggtggttggatccttcatggatattttaatgtacttctgttgttggcctccgtaagaagtgcatgtatcccgggcgtctttcagctctttgtattcttcgtcttttaatatagtggggcgcagttctcctgtgcttttcgagaaaaaaaaatatgtgcatctatttaagtctcttaccaataagtgtttataaaatatgtttcattgttcttagcttgatatgtggtaaggtcttcttctttcttgatcatctatgtatgccttaattcatatactccgaaataatctttactgttagctatgattctttttatcaaaactatcttcaagtgcatctaacaacaattcgttcaaatttttttgttaaaacaggaattgacacc

SEQ ID NO: 202897 - DNA, 5279 bp, Zea Mays
atcgaagctccgagcaggaaacgccaccgccctccatctcccccgtgtccctagccaggagcaccgtccccctcaccaccccgcctaactttcctatcctcatcccgacgcctggagatccatcctcaaacgccgctgctagggcaccgtcccgcgctaggaccccccgcgcctcgcaatcatgtcaccggcaactctgacgacctagggctcacaggaagttgactttcctctgctgctgttgtgctcagtgtggatgacattgtgctgcctcaggtacaactttccttttctgtgcttaagtaaaaaaatgttgttccattcgatacacagtcggattatttgatttaaagccttgctgaagttgacattgtgatatatcgtgaccctggtaaaaaatattttcaagttcagaaagcaggatacttcctttaatatgtctatcacacatgttcacggagataattctacacatggttttttatacctctttttgaccccacttggagatggaagcgagattttgaagttttaaggcctgcagtgccgtggtcttgcgttgatatctgtagttgtacatagaaattttctcatttggtgtatgtctttgctactttttccttaaacataaattatatttttataactatctggcagttattgatctatcactgccttactacatgatacctatctggcagttatgaaaatattcgaatccattttatatgtaaatcctaaaattttcgaatccaaagccacccattacaatattatgtactgaaattatatcttttacttatgtgtcactctgcatttttttaagatttaaaaaaatttcttccttattttatacatggttgaacaccaaccttcatgattcactggatcttcttagtattatctctaacaaaagaatttataaagttctttccccacaaatgcaaatataggtattagcttattgattttaaattggttattaaatgtctggcatggatctcctccctgctcacgggcctcaccatcctcaatggcgagtgtaaaacttcgcaccaacacactcgacaagcttgatggcgacccctacgtcaacatccgcatgggcaaggtcatgtaatttttatcttcatttcaatagtgattgaagcaaatgaaaattttaaaattttggcagtgagtatgcaacacttccaagcaatggataatgtattaatgtggggctgtgggcgttggaacgtgcgtgttgactagctttgattagcttgtcgatatacatacttagccatctattttttcttctcctttcaaatgctatgctattgctactgctgttggagtgtaccatttaacttgatatatgatttaatagatgctttgtgtgcataaatcgtctacagttaccatctggacttttttagccatgtttgagagatgtgacggagtttggatttcacttaaaaatgcaggtccagttgatgtttaatgtgcctgaactgcagttacagtcataaagctcaaacaatcttgagcatttggttttacattatattctctggtttctgtttttgtgatttgtgttctgatgatgcaaacgcttccattttttatgttgctcctgcacaagatttcctgcacaaccaactgttttttgaattctttatgttatttgatccagggagtggacacaatcaggctcttgcgcaagtatcccctgaatttactacctgtagtttcgaaatgggcttacccaaaaaaatatttgcactaagaatatttatgtttgtttagttggtctggacaaaccacaagatcagtttaagcattgcttccaaatgccattaaatatttatcttgactgaaaattcgcacacaagaatagtaatattctatgaccaagtgactgtagtatgaagaagcatgtgtcattttcctgattaatttagctggttcaactttgttggggtcccaagtcttggccagaacttgatgtaattaaactcctttagacaattgagtacctttctatgtggatttacatatccctttgcttatttagtaacttctgcaaaatttgaatcctaggcaatgtcaacctcaacaccttgatgaacatgttcagtgtgcttggtgctggtggtggccttggtggtcgaaatgcttctaatggctctggaccgccatgcttgcgtcggacgcgggacgtccacgccgccatcgcccgtgagcagctccgacagcctcatcgccgcgttgcacctgctcttgtgtcgcaggctcgggttaccgtcggtgctgacaccgaggaaggcatgatccatgcggagcagcccaaggcgcgatgccacctccgctgtcacgcatgatgagctgcttcgcctctggcaccgccttgttccttcgcgatctcacattggacggtggatgaacttgggcttccaagatccgtaatacaaggtaaattgagtaccttttgtgacctcttctgtatttctaggcctttgtataacagctgtggacaaaacctgtaaacatgttggatgaactggagcagctattgaaaggtaactctatggtgaaagagctaacgcctaggacaaatgactaccttgtttcatttcgagaatgtatgtccaccaggattttatctgttaatttgaacaaaattcatatcaaagcacgacaggtacttcttgatatttccttgatttgcacagtgattgagtgagcttttaagggtacgaatgtagcagcctagaataattctatatttacttactactataaagagcgggagcaaaatatagctatacaattgatgtatatttagcatatcaaacaatgctcaagatacttaattaattgcatactatagttaggctgtatataccaatgcaatggtcactagcaagataatgcagcctcacagtcttatgacatcagccaatatataaattagaccatttttgttgctgcaactgcaactaatactatgttgaagtgtttttcgttaactctgctctgaaaatgctttttgcttcactctttgacatatctatatgactatatagccgatgcctgtttttactatatgcttatcatgaatctcatgttttccatatgaataatgctagctgttgcaacatctttgtttggagctaatgatacatttaatcctagacttgatggcaaagaacgggtgcaattttttgtctctctatttcctatttatgttgcacaaataattgtttccttttgttatccaaataaataattacttccttctccacccttttctccagttgtagcgagtgagttttagtaagggataaacaatagtaggaagaactctgttgtgtttcaatctcgagtatttgatggatggggcattgttctatagatggtgtatacagaaatgatcttaactgtcattttggtcaaaaccacaatagttctacttatgttagaaaatcaaaagatttaagtgtcttccatggtttaaagttcatgatgagcaaatttgacttatttttaattgtttatcatattttgagaataattttgctgcctattcaacagataccatggggggagcatttgatccagctagctggcaaacaagatttggtggtaactgtttatgatgaaacaaatatttcgaatcattaattgctatgtttgtgtctgcatcctgtcagcaattaggatgtgacaggacatggcctccctccaatgcaaaaatcccaaaagctccttgcagacacacttatttgcattctttgcgctgacatgcagttaggatgcgacagggcctccctccaatgcaaaatcacattaaccatgtcaccgctgtcaattgttttcttgagtttgttcccaaaacctcttaattattattgcccacggatagtcatgttatctacataatccgttttgccactcttcagggttctgcattgtgaatagaggttcatctttgtgattagattgccaccgccgctgctttctactcattcgacgaatgttttgcaaagaagaaatctggtttatcttaccctcgattccttcctatgatacaactaacaaaatgaattggtacattcaggtatctttaaaaccttttcacttccaaattagaatgatatcatgctcaagaggtaacattttctgatgttttttattttaatagtaattattggtcgctgactttttaaaactatttgtgttgtacttcaagcatcttctacactgcatctaagctttgaagagttacggacaattttgtactaattgttttctttattttcccaaatgtgtgccacttcctttagtatttttgcagtgcagacgattgaaaactactgttttacatcacctctctgtcataggaatagtttactactctaatgctcattctattaacactaaaaaaagatatatcgcttgaaaacaggtatgtatttcaatcttctagatttatatttctttctttatatatacaaaacaggtaagtttgtaccatttgttttattttttaaaaaaagaaaaggtatgacacttacattagtattttttcccaccagaaacgattgaaaactattgtttcccgtcacctcctgtcatagtaagtgtttcccgtcacctgaggatttccaattttctacaatggtgggagagatcttcaactattgtttctgacacttgaaaggatggcttggaccctcttattatcctgggagcctcggtggtttggaagcatagaaacagagtggtgttcggtagagtttcttccaacctcactcttattctggagtctgctaatgaggaaagcgagaaatgacaagttgcaggagccaagggttatcctttctggctgctccaagccatataatttagggtggttggatccttcatggatattttaatgtacttctgttgttggcctccgtaagaagtgcatgtatcccgggcgtctttcagctctttgtattcttcgtcttttaatatagtggggcgcagttctcctgtgcttttcgagaaaaaaaaatatgtgcatctatttaagtctcttaccaataagtgtttataaaatatgtttcattgttcttagcttgatatgtggtaaggtcttcttctttcttgatcatctatgtatgccttaattcatatactccgaaataatctttactgttagctatgattctttttatcaaaactatcttcaagtgcatctaacaacaattcgttcaaatttttttgttaaaacaggaattgacacc

SEQ ID NO: 202898 - DNA, 3386 bp, Zea Mays
atcgaagctccgagcaggaaacgccaccgccctccatctcccccgtgtccctagccaggagcaccgtccccctcaccaccccgcctaactttcctatcctcatcccgacgcctggagatccatcctcaaacgccgctgctagggcaccgtcccgcgctaggaccccccgcgcctcgcaatcatgtcaccggcaactctgacgacctagggctcacaggaagttgactttcctctgctgctgttgtgctcagtgtggatgacattgtgctgcctcaggcaatgtcaacctcaacaccttgatgaacatgttcagtgtgcttggtgctggtggtggccttggtggtcgaaatgcttctaatggctctggaccgccatgcttgcgtcggacgcgggacgtccacgccgccatcgcccgtgagcagctccgacagcctcatcgccgcgttgcacctgctcttgtgtcgcaggctcgggttaccgtcggtgctgacaccgaggaaggcatgatccatgcggagcagcccaaggcgcgatgccacctccgctgtcacgcatgatgagctgcttcgcctctggcaccgccttgttccttcgcgatctcacattggacggtggatgaacttgggcttccaagatccgtaatacaaggtaaattgagtaccttttgtgacctcttctgtatttctaggcctttgtataacagctgtggacaaaacctgtaaacatgttggatgaactggagcagctattgaaaggtaactctatggtgaaagagctaacgcctaggacaaatgactaccttgtttcatttcgagaatgtatgtccaccaggattttatctgttaatttgaacaaaattcatatcaaagcacgacaggtacttcttgatatttccttgatttgcacagtgattgagtgagcttttaagggtacgaatgtagcagcctagaataattctatatttacttactactataaagagcgggagcaaaatatagctatacaattgatgtatatttagcatatcaaacaatgctcaagatacttaattaattgcatactatagttaggctgtatataccaatgcaatggtcactagcaagataatgcagcctcacagtcttatgacatcagccaatatataaattagaccatttttgttgctgcaactgcaactaatactatgttgaagtgtttttcgttaactctgctctgaaaatgctttttgcttcactctttgacatatctatatgactatatagccgatgcctgtttttactatatgcttatcatgaatctcatgttttccatatgaataatgctagctgttgcaacatctttgtttggagctaatgatacatttaatcctagacttgatggcaaagaacgggtgcaattttttgtctctctatttcctatttatgttgcacaaataattgtttccttttgttatccaaataaataattacttccttctccacccttttctccagttgtagcgagtgagttttagtaagggataaacaatagtaggaagaactctgttgtgtttcaatctcgagtatttgatggatggggcattgttctatagatggtgtatacagaaatgatcttaactgtcattttggtcaaaaccacaatagttctacttatgttagaaaatcaaaagatttaagtgtcttccatggtttaaagttcatgatgagcaaatttgacttatttttaattgtttatcatattttgagaataattttgctgcctattcaacagataccatggggggagcatttgatccagctagctggcaaacaagatttggtggtaactgtttatgatgaaacaaatatttcgaatcattaattgctatgtttgtgtctgcatcctgtcagcaattaggatgtgacaggacatggcctccctccaatgcaaaaatcccaaaagctccttgcagacacacttatttgcattctttgcgctgacatgcagttaggatgcgacagggcctccctccaatgcaaaatcacattaaccatgtcaccgctgtcaattgttttcttgagtttgttcccaaaacctcttaattattattgcccacggatagtcatgttatctacataatccgttttgccactcttcagggttctgcattgtgaatagaggttcatctttgtgattagattgccaccgccgctgctttctactcattcgacgaatgttttgcaaagaagaaatctggtttatcttaccctcgattccttcctatgatacaactaacaaaatgaattggtacattcaggtatctttaaaaccttttcacttccaaattagaatgatatcatgctcaagaggtaacattttctgatgttttttattttaatagtaattattggtcgctgactttttaaaactatttgtgttgtacttcaagcatcttctacactgcatctaagctttgaagagttacggacaattttgtactaattgttttctttattttcccaaatgtgtgccacttcctttagtatttttgcagtgcagacgattgaaaactactgttttacatcacctctctgtcataggaatagtttactactctaatgctcattctattaacactaaaaaaagatatatcgcttgaaaacaggtatgtatttcaatcttctagatttatatttctttctttatatatacaaaacaggtaagtttgtaccatttgttttattttttaaaaaaagaaaaggtatgacacttacattagtattttttcccaccagaaacgattgaaaactattgtttcccgtcacctcctgtcatagatggcttggaccctcttattatcctgggagcctcggtggtttggaagcatagaaacagagtggtgttcggtagagtttcttccaacctcactcttattctggagtctgctaatgaggaaagcgagaaatgacaagttgcaggagccaagggttatcctttctggctgctccaagccatataatttagggtggttggatccttcatggatattttaatgtacttctgttgttggcctccgtaagaagtgcatgtatcccgggcgtctttcagctctttgtattcttcgtcttttaatatagtggggcgcagttctcctgtgcttttcgagaaaaaaaaatatgtgcatctatttaagtctcttaccaataagtgtttataaaatatgtttcattgttcttagcttgatatgtggtaaggtcttcttctttcttgatcatctatgtatgccttaattcatatactccgaaataatctttactgttagctatgattctttttatcaaaactatcttcaagtgcatctaacaacaattcgttcaaatttttttgttaaaacaggaattgacacc

SEQ ID NO: 202899 - DNA, 5143 bp, Zea Mays
gtcatctccccacgttgggggtgggttagtgggtaggattcaatcgtacaggccagatccagtgcaggaggatcggtctttgatgctgctgcttcaccaaacaatgaaatgctcttgatgcatgattcaggagctaggaggatatctattgtcgtcgagttacatgaagttgactttcctctgctgctgttgtgctcagtgtggatgacattgtgctgcctcaggtacaactttccttttctgtgcttaagtaaaaaaatgttgttccattcgatacacagtcggattatttgatttaaagccttgctgaagttgacattgtgatatatcgtgaccctggtaaaaaatattttcaagttcagaaagcaggatacttcctttaatatgtctatcacacatgttcacggagataattctacacatggttttttatacctctttttgaccccacttggagatggaagcgagattttgaagttttaaggcctgcagtgccgtggtcttgcgttgatatctgtagttgtacatagaaattttctcatttggtgtatgtctttgctactttttccttaaacataaattatatttttataactatctggcagttattgatctatcactgccttactacatgatacctatctggcagttatgaaaatattcgaatccattttatatgtaaatcctaaaattttcgaatccaaagccacccattacaatattatgtactgaaattatatcttttacttatgtgtcactctgcatttttttaagatttaaaaaaatttcttccttattttatacatggttgaacaccaaccttcatgattcactggatcttcttagtattatctctaacaaaagaatttataaagttctttccccacaaatgcaaatataggtattagcttattgattttaaattggttattaaatgtctggcatggatctcctccctgctcacgggcctcaccatcctcaatggcgagtgtaaaacttcgcaccaacacactcgacaagcttgatggcgacccctacgtcaacatccgcatgggcaaggtcatgtaatttttatcttcatttcaatagtgattgaagcaaatgaaaattttaaaattttggcagtgagtatgcaacacttccaagcaatggataatgtattaatgtggggctgtgggcgttggaacgtgcgtgttgactagctttgattagcttgtcgatatacatacttagccatctattttttcttctcctttcaaatgctatgctattgctactgctgttggagtgtaccatttaacttgatatatgatttaatagatgctttgtgtgcataaatcgtctacagttaccatctggacttttttagccatgtttgagagatgtgacggagtttggatttcacttaaaaatgcaggtccagttgatgtttaatgtgcctgaactgcagttacagtcataaagctcaaacaatcttgagcatttggttttacattatattctctggtttctgtttttgtgatttgtgttctgatgatgcaaacgcttccattttttatgttgctcctgcacaagatttcctgcacaaccaactgttttttgaattctttatgttatttgatccagggagtggacacaatcaggctcttgcgcaagtatcccctgaatttactacctgtagtttcgaaatgggcttacccaaaaaaatatttgcactaagaatatttatgtttgtttagttggtctggacaaaccacaagatcagtttaagcattgcttccaaatgccattaaatatttatcttgactgaaaattcgcacacaagaatagtaatattctatgaccaagtgactgtagtatgaagaagcatgtgtcattttcctgattaatttagctggttcaactttgttggggtcccaagtcttggccagaacttgatgtaattaaactcctttagacaattgagtacctttctatgtggatttacatatccctttgcttatttagtaacttctgcaaaatttgaatcctaggcaatgtcaacctcaacaccttgatgaacatgttcagtgtgcttggtgctggtggtggccttggtggtcgaaatgcttctaatggctctggaccgccatgcttgcgtcggacgcgggacgtccacgccgccatcgcccgtgagcagctccgacagcctcatcgccgcgttgcacctgctcttgtgtcgcaggctcgggttaccgtcggtgctgacaccgaggaaggcatgatccatgcggagcagcccaaggcgcgatgccacctccgctgtcacgcatgatgagctgcttcgcctctggcaccgccttgttccttcgcgatctcacattggacggtggatgaacttgggcttccaagatccgtaatacaaggtaaattgagtaccttttgtgacctcttctgtatttctaggcctttgtataacagctgtggacaaaacctgtaaacatgttggatgaactggagcagctattgaaaggtaactctatggtgaaagagctaacgcctaggacaaatgactaccttgtttcatttcgagaatgtatgtccaccaggattttatctgttaatttgaacaaaattcatatcaaagcacgacaggtacttcttgatatttccttgatttgcacagtgattgagtgagcttttaagggtacgaatgtagcagcctagaataattctatatttacttactactataaagagcgggagcaaaatatagctatacaattgatgtatatttagcatatcaaacaatgctcaagatacttaattaattgcatactatagttaggctgtatataccaatgcaatggtcactagcaagataatgcagcctcacagtcttatgacatcagccaatatataaattagaccatttttgttgctgcaactgcaactaatactatgttgaagtgtttttcgttaactctgctctgaaaatgctttttgcttcactctttgacatatctatatgactatatagccgatgcctgtttttactatatgcttatcatgaatctcatgttttccatatgaataatgctagctgttgcaacatctttgtttggagctaatgatacatttaatcctagacttgatggcaaagaacgggtgcaattttttgtctctctatttcctatttatgttgcacaaataattgtttccttttgttatccaaataaataattacttccttctccacccttttctccagttgtagcgagtgagttttagtaagggataaacaatagtaggaagaactctgttgtgtttcaatctcgagtatttgatggatggggcattgttctatagatggtgtatacagaaatgatcttaactgtcattttggtcaaaaccacaatagttctacttatgttagaaaatcaaaagatttaagtgtcttccatggtttaaagttcatgatgagcaaatttgacttatttttaattgtttatcatattttgagaataattttgctgcctattcaacagataccatggggggagcatttgatccagctagctggcaaacaagatttggtggtaactgtttatgatgaaacaaatatttcgaatcattaattgctatgtttgtgtctgcatcctgtcagcaattaggatgtgacaggacatggcctccctccaatgcaaaaatcccaaaagctccttgcagacacacttatttgcattctttgcgctgacatgcagttaggatgcgacagggcctccctccaatgcaaaatcacattaaccatgtcaccgctgtcaattgttttcttgagtttgttcccaaaacctcttaattattattgcccacggatagtcatgttatctacataatccgttttgccactcttcagggttctgcattgtgaatagaggttcatctttgtgattagattgccaccgccgctgctttctactcattcgacgaatgttttgcaaagaagaaatctggtttatcttaccctcgattccttcctatgatacaactaacaaaatgaattggtacattcaggtatctttaaaaccttttcacttccaaattagaatgatatcatgctcaagaggtaacattttctgatgttttttattttaatagtaattattggtcgctgactttttaaaactatttgtgttgtacttcaagcatcttctacactgcatctaagctttgaagagttacggacaattttgtactaattgttttctttattttcccaaatgtgtgccacttcctttagtatttttgcagtgcagacgattgaaaactactgttttacatcacctctctgtcataggaatagtttactactctaatgctcattctattaacactaaaaaaagatatatcgcttgaaaacaggtatgtatttcaatcttctagatttatatttctttctttatatatacaaaacaggtaagtttgtaccatttgttttattttttaaaaaaagaaaaggtatgacacttacattagtattttttcccaccagaaacgattgaaaactattgtttcccgtcacctcctgtcatagatggcttggaccctcttattatcctgggagcctcggtggtttggaagcatagaaacagagtggtgttcggtagagtttcttccaacctcactcttattctggagtctgctaatgaggaaagcgagaaatgacaagttgcaggagccaagggttatcctttctggctgctccaagccatataatttagggtggttggatccttcatggatattttaatgtacttctgttgttggcctccgtaagaagtgcatgtatcccgggcgtctttcagctctttgtattcttcgtcttttaatatagtggggcgcagttctcctgtgcttttcgagaaaaaaaaatatgtgcatctatttaagtctcttaccaataagtgtttataaaatatgtttcattgttcttagcttgatatgtggtaaggtcttcttctttcttgatcatctatgtatgccttaattcatatactccgaaataatctttactgttagctatgattctttttatcaaaactatcttcaagtgcatctaacaacaattcgttcaaatttttttgttaaaacaggaattgacacc

SEQ ID NO: 202900 - DNA, 3334 bp, Zea Mays
gtcatctccccacgttgggggtgggttagtgggtaggattcaatcgtacaggccagatccagtgcaggaggatcggtctttgatgctgctgcttcaccaaacaatgaaatgctcttgatgcatgattcaggagctaggaggatatctattgtcgtcgagttacatgaagttgactttcctctgctgctgttgtgctcagtgtggatgacattgtgctgcctcaggcaatgtcaacctcaacaccttgatgaacatgttcagtgtgcttggtgctggtggtggccttggtggtcgaaatgcttctaatggctctggaccgccatgcttgcgtcggacgcgggacgtccacgccgccatcgcccgtgagcagctccgacagcctcatcgccgcgttgcacctgctcttgtgtcgcaggctcgggttaccgtcggtgctgacaccgaggaaggcatgatccatgcggagcagcccaaggcgcgatgccacctccgctgtcacgcatgatgagctgcttcgcctctggcaccgccttgttccttcgcgatctcacattggacggtggatgaacttgggcttccaagatccgtaatacaaggtaaattgagtaccttttgtgacctcttctgtatttctaggcctttgtataacagctgtggacaaaacctgtaaacatgttggatgaactggagcagctattgaaaggtaactctatggtgaaagagctaacgcctaggacaaatgactaccttgtttcatttcgagaatgtatgtccaccaggattttatctgttaatttgaacaaaattcatatcaaagcacgacaggtacttcttgatatttccttgatttgcacagtgattgagtgagcttttaagggtacgaatgtagcagcctagaataattctatatttacttactactataaagagcgggagcaaaatatagctatacaattgatgtatatttagcatatcaaacaatgctcaagatacttaattaattgcatactatagttaggctgtatataccaatgcaatggtcactagcaagataatgcagcctcacagtcttatgacatcagccaatatataaattagaccatttttgttgctgcaactgcaactaatactatgttgaagtgtttttcgttaactctgctctgaaaatgctttttgcttcactctttgacatatctatatgactatatagccgatgcctgtttttactatatgcttatcatgaatctcatgttttccatatgaataatgctagctgttgcaacatctttgtttggagctaatgatacatttaatcctagacttgatggcaaagaacgggtgcaattttttgtctctctatttcctatttatgttgcacaaataattgtttccttttgttatccaaataaataattacttccttctccacccttttctccagttgtagcgagtgagttttagtaagggataaacaatagtaggaagaactctgttgtgtttcaatctcgagtatttgatggatggggcattgttctatagatggtgtatacagaaatgatcttaactgtcattttggtcaaaaccacaatagttctacttatgttagaaaatcaaaagatttaagtgtcttccatggtttaaagttcatgatgagcaaatttgacttatttttaattgtttatcatattttgagaataattttgctgcctattcaacagataccatggggggagcatttgatccagctagctggcaaacaagatttggtggtaactgtttatgatgaaacaaatatttcgaatcattaattgctatgtttgtgtctgcatcctgtcagcaattaggatgtgacaggacatggcctccctccaatgcaaaaatcccaaaagctccttgcagacacacttatttgcattctttgcgctgacatgcagttaggatgcgacagggcctccctccaatgcaaaatcacattaaccatgtcaccgctgtcaattgttttcttgagtttgttcccaaaacctcttaattattattgcccacggatagtcatgttatctacataatccgttttgccactcttcagggttctgcattgtgaatagaggttcatctttgtgattagattgccaccgccgctgctttctactcattcgacgaatgttttgcaaagaagaaatctggtttatcttaccctcgattccttcctatgatacaactaacaaaatgaattggtacattcaggtatctttaaaaccttttcacttccaaattagaatgatatcatgctcaagaggtaacattttctgatgttttttattttaatagtaattattggtcgctgactttttaaaactatttgtgttgtacttcaagcatcttctacactgcatctaagctttgaagagttacggacaattttgtactaattgttttctttattttcccaaatgtgtgccacttcctttagtatttttgcagtgcagacgattgaaaactactgttttacatcacctctctgtcataggaatagtttactactctaatgctcattctattaacactaaaaaaagatatatcgcttgaaaacaggtatgtatttcaatcttctagatttatatttctttctttatatatacaaaacaggtaagtttgtaccatttgttttattttttaaaaaaagaaaaggtatgacacttacattagtattttttcccaccagaaacgattgaaaactattgtttcccgtcacctcctgtcatagatggcttggaccctcttattatcctgggagcctcggtggtttggaagcatagaaacagagtggtgttcggtagagtttcttccaacctcactcttattctggagtctgctaatgaggaaagcgagaaatgacaagttgcaggagccaagggttatcctttctggctgctccaagccatataatttagggtggttggatccttcatggatattttaatgtacttctgttgttggcctccgtaagaagtgcatgtatcccgggcgtctttcagctctttgtattcttcgtcttttaatatagtggggcgcagttctcctgtgcttttcgagaaaaaaaaatatgtgcatctatttaagtctcttaccaataagtgtttataaaatatgtttcattgttcttagcttgatatgtggtaaggtcttcttctttcttgatcatctatgtatgccttaattcatatactccgaaataatctttactgttagctatgattctttttatcaaaactatcttcaagtgcatctaacaacaattcgttcaaatttttttgttaaaacaggaattgacacc

SEQ ID NO: 202901 - DNA, 6063 bp, Zea Mays
aaggctgcaatttttgcggctagttgcatttgtcatctgtcagatgacttctcaaggataattcttgaagtgttcagaagattgatatgttctcagacatcagagccacaagtcatcatgtcagcagctaaggctttctggaagcttggttctacgttggctgttatccataaagttcatgaggttggaaaacagatggttctaggcacactggaagacgtcttcaaatctgaaatgctcttttcactctcaagactgtcatccaagtcgatcattttgttttctgaccaggtggatttattgttactgtttatggatcataattcctcttctatgaagtctgtggcgttaaaatgcatgtgttttatgtttcggagaaatatctgccattttccagttattaggaatgtttttggcagattgtttccattaattgatgatgaggattttccacttgactgtaagagcgatgtgttaaggattctgcagaagatgttatgcagtaaaacgtcaagtaatcatcgtgccaatggttctgagttatctaagctacttctagctgctgaaagttctttagattcttcttgtttggaggtgcaaggtaccgctctggaaattcttgtggaaatcttttgtattctcaaggaagttgggtcagataacatatcagttctcaagggttcgtcatttgcacatgctgagtggcaaggaataacgaacaatgtaccattaactgaagataatagtatgaacggacctctgtgtaagatcattgcaatgattgtgaatcatattatatccctggccaatgaagttgctagcagagatatctgcatatcatctgcagtggataaggcatacaaaactcctttcagacttatgctaaagcttgtttcatgctacccttctgctgctgctgtaactcttcatatactgaaaagccttgtaaaagaactgtttctaattaatggaagtgattactctgaagtttctgttacatctgttgaaccattccagacaagtgttgcccttaaagaattgagtacttcagatgacaatgttcaactgttagctacatgcatcaaagcttcctgcattggaacacttattggcaatggaaaactggattttctcaaaattgattgcaagaatagaaagtccataatgcatgatctaatttgttgcatgctcaaatttgcaaatgcttgtcatgaggtgctatgtgaaacatctggtgctagatacaatcttcatgatagcatcaagggtctaatcaagtatgtgcgtcaggatgcccctcagcactggagcacatatgaatccttccatttgataatgtgtgcttgtgttacccggaatacttgtaaaatcaatcgtggtaatcaagaatctggtgattcaaaagagcatcataatacactattcactccttctgtttggataactcaggaattatgtgcacttcgaatgaccaaaatgcttataaagaagcagaaatactgggaagcttataggtcttctatgtactgttgttgtaaaggtctttggttcacagcttcttttgtcttcagaaaactggcagatgcttttgaagcaggctctttcagtttttggctcaaatcgttgctacttttttctgctggcgaaattgagatgaagctattgtttttttcctcagcaactataaagttagttggtgagctaaaaatggagggtgatttaagtgaggatctttactgtaatgaaacagatgctgatagcaccctcagtagatcatcagagttacatggtttccaagcaaagatatctgatatttgtggcagaacattattagcaaataatgctcttgcatccagtgcctcttcagatcatgacttcgtattccagaggtggttcatcagccttaggtcatcatttcttgaggtcctaacaaaagttcttgatatccttaatgcacactcttcctatgaagcaagaggagaccatttatctttgtctggagagtttgtcaaagaccaagtgcttgctttggatcattgctctctaagattaagtgacttggcaaaaagttatgaccttcttgctgcatcccatatggacctggagcgacatggctcaagtagtatagccaggcttgctttcatgtgctcacttttggcattttgtactgcatattctgtttatttctcaaaggcatgtaactacgtagagtactgcaagcttccaaagaggttttcccatgcttcaatcctacaagatttgtatggaagagtagatgggtctgactggcaggttgtttcccagctgcgacagtttatgtccacttcttttgacgaacttgacagcttacagtccagcacatggatcagtggttcatgtaatctggagaaggatttgtattctctttgtcattttgctgtggcatctttgcttggtgtatgtgatagtgctgaagctgaaaaaatacaaaatggagaggattgtttatctgctttgcaaggaggattgcaagtgttgtccagcatcttgcagaagtatttggaattgccttttgtggttcccaagtactttttcagagtaaagccttgccttggtgctgaactttacatatttgattcaaatcatttgaatgaaaaaggaatgtctatagagcctggttttctattgtctctaaccctctgcatgaagtggaagtgtgtgttagaaagaagcaccattcgcatcgtgaaattgtactgcattttggccgcaagcttagagacctgcttggatacagcaggaacaagaagcaagcagtttgatcagcacaggaccgctgaaatggtcgaattgaactccaagctgctacagtacataaagaatgatctgaggaaggctaggaatgagaagaagaattcccatagtgtcatggagatggtgactgcctttgcatgctttgaaccaacagatagtgggcaggggttctcaggatgcctgctggatgtctcctcgttccctgaaggctcttatcagataaagtggcaggcgtgctgtgtcgatgagaatgggtcctattttagtctcctgcccctgaacgatggttccatattttctgtccagaagtcctaactctaactgaatggccgctgcggttatgggaatggaagatggaacatactcttcttgctcgcagtgtctgttcctgagttcatttttatgcacacagaaggcttgtgtgtctatgatccgcctatatggtctgggtttgacatgttcactctattacttgtgttgtggcagtaaattacagaggcctggtgctgaggcttgtaggcagcatgaactgatgaatgagcagatgttgctgctgatcttcaccttgctgctattctgaacagaatcagcactagcagataacatagatcgtttgatgaattgacacaggtgtagctccaccttttcctattctgaatttgactttctaatggctttagttgagttttagttgagtttcaacttgtgtagaagcagtacaggttccagttcccctgtaacttgtagtttagagaaaaatagtatagtgctactcctacacggctagtacaaggcaatggctctgagcttctggatacaattttggatagtactatttatcatactttaactcgaattcgagtagaaatacatatattgtcgaatactaatgcaaaatggatatcgtaaatttgaatccaaattcagatgtctaaattttgaagataacatgttttttattgatagtttcgtagtctaataaaatcatcatagatgaaggaatttaaaacatagctatacaacaccgtgtataaagacaactaaaatattttaataattaaatatataaaatagaagaaaattatagataatataaattgagtactaaattcaaataaattttagaagtatataaataaaacaaaatactaatttagctgctttatccatctgtccctgccgtggatctgtttgtttagtgtttgcatgcgtgcacaactgcttgctgattccaaattaatcacatcaccaactccctatcggcatgtagtgcctccctccctttgtttgtttgggatcgaattgggcactgatacacaccactgatgcttgatatgcagtgctcccttcgtttgcattgccgcctatataggtcccatagttaacttcgtgtgctccctttcattctcctatggcagaaccggtttaccaccttccgtttgctagaaacggggaccaatttatcaatgttattatacaaatgactgggtgtgctgtcaattatataatatttgggattacttgaatcacttctatgtcacatttatcagccagaggcagatgtttttcagctggttaatgtgcattctctgtctctgtgggcaacctgaccgatgacaattcacattgtacacctgtttgtagcgctgattattcttttaatgcagattgtgtataggcctggcgaaaaattgaatctacgagatttccagtatcctgtaaataacgtatctcatatctctggatgactttattgctgaccaacctggtggatctctgactactggaggatgcaacagaacagagtgttgctgtggattttataatgttggaagtagaagctgcattcatgtgcgatggtgcttctaaaatgccaattcttttgtaaacagaatttgtgatcttgaaaactttgtggtacggagatacaattctggtaatgagacccaaggtcatgggctagtgaagagatggttagaacttagaagagcttaaggatgacaaggaggatacactgcatgcaagtaccgtggtcaccctattgagcttgtcaccccaaataacgcaaaatggacttgtccaataaatgaacagcttgcagcttctgatgttactgacactgctgtgagaattgaagaacaaacagtgttgtttctgcctacttcggaagacagtccaaacttgcagggagcctctgcggttgggttgatagcccagtggtgaaggcggcgttgtccctttcaccaggtcaggggttcgaccgttggttccgcacccataaaaaaaatcccctcactgtcccgcctgctcttggggatcgatgtcctgtgcgccaccttccgtttgggccgctgcagagtggacagttgtactcgggccgttagtgatgtgggccaaggttcagaggttttctcagccaggaccagtggtttgggtcctttagtattataccacaagagcggtcattcccttcccggccgttttttttgcagtgagcctctccttccatttcttttgatgtaattgatagcctcaacaaacgaaggagtcataatggggaggttttatgttgtgattcccagttcaaacgatgttgaagcttctctaactgatgagagctcagatgggaacactcaaattttctatggtctatatgaaacccttttcgagcttgaccagggacttgtttgctcctcatcatgcaatattggaaagatgaaaattggaactcttcagtgttactacctactatcttcttgaacaatctgaaaaaggaccagtgctccccctgtcagggacggatctagcggtgggtgggcggggctcgagtctccctaccgtttcggatcccatgaagccccactacagtctcctctaatctaaaatgtatacaatataatgtagaatgagcttttatactgcagcaatttagttcagtccctcctaaacttttttctggctctgtccctgcccctgttctattttgatttgtgatgtagtgagagacatattttttatttttgtgaaatgtatatttcaccgcttgtagtaagtagcctaaaaccatattggattggattcctaccgctgaataactatctttgtcataatgcttgtacttcagatgcttataagttgccagaatagaaagtattccctccgtcctaaaatacaatttgttttagactaaatatacattcattcaataacctatgaatatagtttataggtatgtctatatacattcattcattcggggacataaaaaag

SEQ ID NO: 202902 - DNA, 6670 bp, Zea Mays
ttggagcggattccagcggcatccgccatggactggagcatcgacctcgacaggggtctccgctcccgccaaccagcaacgcgcgtccgcgccgtcgacgccgccggcccacgcctccgccagctctgcacttgcgccaccgcccccgcgcccgtcgcctccgcgtacggcgtcttgcccggggaggcgcgcgtcttcgcggagaccatgctcctccgcctcgccaccgaattcaggagcgccgacgtcgccatgcgggtccgcatcatcaagaccctcctcaattctgccacgggtccaggggcgctagccggggcgcgcatcacggagcctgaccagctgctcaggagggtcaaggtggtctacgacactgggaacaagcgggacagggcgcttgcactgcgcatgttcgggtgcttcgccgacatcgccaaggacagcgtgcacgtccgctctctcatactttccagtttgagtgcctccagtgctttggaggtcaaggctgcaatttttgcggctagttgcatttgtcatctgtcagatgacttctcaaggataattcttgaagtgttcagaagattgatatgttctcagacatcagagccacaagtcatcatgtcagcagctaaggctttctggaagcttggttctacgttggctgttatccataaagttcatgaggttggaaaacagatggttctaggcacactggaagacgtcttcaaatctgaaatgctcttttcactctcaagactgtcatccaagtcgatcattttgttttctgaccaggtggatttattgttactgtttatggatcataattcctcttctatgaagtctgtggcgttaaaatgcatgtgttttatgtttcggagaaatatctgccattttccagttattaggaatgtttttggcagattgtttccattaattgatgatgaggattttccacttgactgtaagagcgatgtgttaaggattctgcagaagatgttatgcagtaaaacgtcaagtaatcatcgtgccaatggttctgagttatctaagctacttctagctgctgaaagttctttagattcttcttgtttggaggtgcaaggtaccgctctggaaattcttgtggaaatcttttgtattctcaaggaagttgggtcagataacatatcagttctcaagggttcgtcatttgcacatgctgagtggcaaggaataacgaacaatgtaccattaactgaagataatagtatgaacggacctctgtgtaagatcattgcaatgattgtgaatcatattatatccctggccaatgaagttgctagcagagatatctgcatatcatctgcagtggataaggcatacaaaactcctttcagacttatgctaaagcttgtttcatgctacccttctgctgctgctgtaactcttcatatactgaaaagccttgtaaaagaactgtttctaattaatggaagtgattactctgaagtttctgttacatctgttgaaccattccagacaagtgttgcccttaaagaattgagtacttcagatgacaatgttcaactgttagctacatgcatcaaagcttcctgcattggaacacttattggcaatggaaaactggattttctcaaaattgattgcaagaatagaaagtccataatgcatgatctaatttgttgcatgctcaaatttgcaaatgcttgtcatgaggtgctatgtgaaacatctggtgctagatacaatcttcatgatagcatcaagggtctaatcaagtatgtgcgtcaggatgcccctcagcactggagcacatatgaatccttccatttgataatgtgtgcttgtgttacccggaatacttgtaaaatcaatcgtggtaatcaagaatctggtgattcaaaagagcatcataatacactattcactccttctgtttggataactcaggaattatgtgcacttcgaatgaccaaaatgcttataaagaagcagaaatactgggaagcttataggtcttctatgtactgttgttgtaaaggtctttggttcacagcttcttttgtcttcagaaaactggcagatgcttttgaagcaggctctttcagtttttggctcaaatcgttgctacttttttctgctggcgaaattgagatgaagctattgtttttttcctcagcaactataaagttagttggtgagctaaaaatggagggtgatttaagtgaggatctttactgtaatgaaacagatgctgatagcaccctcagtagatcatcagagttacatggtttccaagcaaagatatctgatatttgtggcagaacattattagcaaataatgctcttgcatccagtgcctcttcagatcatgacttcgtattccagaggtggttcatcagccttaggtcatcatttcttgaggtcctaacaaaagttcttgatatccttaatgcacactcttcctatgaagcaagaggagaccatttatctttgtctggagagtttgtcaaagaccaagtgcttgctttggatcattgctctctaagattaagtgacttggcaaaaagttatgaccttcttgctgcatcccatatggacctggagcgacatggctcaagtagtatagccaggcttgctttcatgtgctcacttttggcattttgtactgcatattctgtttatttctcaaaggcatgtaactacgtagagtactgcaagcttccaaagaggttttcccatgcttcaatcctacaagatttgtatggaagagtagatgggtctgactggcaggttgtttcccagctgcgacagtttatgtccacttcttttgacgaacttgacagcttacagtccagcacatggatcagtggttcatgtaatctggagaaggatttgtattctctttgtcattttgctgtggcatctttgcttggtgtatgtgatagtgctgaagctgaaaaaatacaaaatggagaggattgtttatctgctttgcaaggaggattgcaagtgttgtccagcatcttgcagaagtatttggaattgccttttgtggttcccaagtactttttcagagtaaagccttgccttggtgctgaactttacatatttgattcaaatcatttgaatgaaaaaggaatgtctatagagcctggttttctattgtctctaaccctctgcatgaagtggaagtgtgtgttagaaagaagcaccattcgcatcgtgaaattgtactgcattttggccgcaagcttagagacctgcttggatacagcaggaacaagaagcaagcagtttgatcagcacaggaccgctgaaatggtcgaattgaactccaagctgctacagtacataaagaatgatctgaggaaggctaggaatgagaagaagaattcccatagtgtcatggagatggtgactgcctttgcatgctttgaaccaacagatagtgggcaggggttctcaggatgcctgctggatgtctcctcgttccctgaaggctcttatcagataaagtggcaggcgtgctgtgtcgatgagaatgggtcctattttagtctcctgcccctgaacgatggttccatattttctgtccagaagtcctaactctaactgaatggccgctgcggttatgggaatggaagatggaacatactcttcttgctcgcagtgtctgttcctgagttcatttttatgcacacagaaggcttgtgtgtctatgatccgcctatatggtctgggtttgacatgttcactctattacttgtgttgtggcagtaaattacagaggcctggtgctgaggcttgtaggcagcatgaactgatgaatgagcagatgttgctgctgatcttcaccttgctgctattctgaacagaatcagcactagcagataacatagatcgtttgatgaattgacacaggtgtagctccaccttttcctattctgaatttgactttctaatggctttagttgagttttagttgagtttcaacttgtgtagaagcagtacaggttccagttcccctgtaacttgtagtttagagaaaaatagtatagtgctactcctacacggctagtacaaggcaatggctctgagcttctggatacaattttggatagtactatttatcatactttaactcgaattcgagtagaaatacatatattgtcgaatactaatgcaaaatggatatcgtaaatttgaatccaaattcagatgtctaaattttgaagataacatgttttttattgatagtttcgtagtctaataaaatcatcatagatgaaggaatttaaaacatagctatacaacaccgtgtataaagacaactaaaatattttaataattaaatatataaaatagaagaaaattatagataatataaattgagtactaaattcaaataaattttagaagtatataaataaaacaaaatactaatttagctgctttatccatctgtccctgccgtggatctgtttgtttagtgtttgcatgcgtgcacaactgcttgctgattccaaattaatcacatcaccaactccctatcggcatgtagtgcctccctccctttgtttgtttgggatcgaattgggcactgatacacaccactgatgcttgatatgcagtgctcccttcgtttgcattgccgcctatataggtcccatagttaacttcgtgtgctccctttcattctcctatggcagaaccggtttaccaccttccgtttgctagaaacggggaccaatttatcaatgttattatacaaatgactgggtgtgctgtcaattatataatatttgggattacttgaatcacttctatgtcacatttatcagccagaggcagatgtttttcagctggttaatgtgcattctctgtctctgtgggcaacctgaccgatgacaattcacattgtacacctgtttgtagcgctgattattcttttaatgcagattgtgtataggcctggcgaaaaattgaatctacgagatttccagtatcctgtaaataacgtatctcatatctctggatgactttattgctgaccaacctggtggatctctgactactggaggatgcaacagaacagagtgttgctgtggattttataatgttggaagtagaagctgcattcatgtgcgatggtgcttctaaaatgccaattcttttgtaaacagaatttgtgatcttgaaaactttgtggtacggagatacaattctggtaatgagacccaaggtcatgggctagtgaagagatggttagaacttagaagagcttaaggatgacaaggaggatacactgtaagctgtatttgtgtttagagatcacattatcgattctgttaaacacatatattgcaacatgtatgcatcagcagaccagatagctgatggttttccaccttgccaggcatgcaagtaccgtggtcaccctattgagcttgtcaccccaaataacgcaaaatggacttgtccaataaatgaacagcttgcagcttctgatgttactgacactgctgtgagaattgaagaacaaacagtgttgtttctgcctacttcggaagacagtccaaacttgcagggagcctctgcggttgggttgatagcccagtggtgaaggcggcgttgtccctttcaccaggtcaggggttcgaccgttggttccgcacccataaaaaaaatcccctcactgtcccgcctgctcttggggatcgatgtcctgtgcgccaccttccgtttgggccgctgcagagtggacagttgtactcgggccgttagtgatgtgggccaaggttcagaggttttctcagccaggaccagtggtttgggtcctttagtattataccacaagagcggtcattcccttcccggccgttttttttgcagtgagcctctccttccatttcttttgatgtaattgatagcctcaacaaacgaaggagtcataatggggaggttttatgttgtgattcccagttcaaacgatgttgaagcttctctaactgatgagagctcagatgggaacactcaaattttctatggtctatatgaaacccttttcgagcttgaccagggacttgtttgctcctcatcatgcaatattggaaagatgaaaattggaactcttcagtgttactacctactatcttcttgaacaatctgaaaaaggaccagtgctccccctgtcagggacggatctagcggtgggtgggcggggctcgagtctccctaccgtttcggatcccatgaagccccactacagtctcctctaatctaaaatgtatacaatataatgtagaatgagcttttatactgcagcaatttagttcagtccctcctaaacttttttctggctctgtccctgcccctgttctattttgatttgtgatgtagtgagagacatattttttatttttgtgaaatgtatatttcaccgcttgtagtaagtagcctaaaaccatattggattggattcctaccgctgaataactatctttgtcataatgcttgtacttcagatgcttataagttgccagaatagaaagtattccctccgtcctaaaatacaatttgttttagactaaatatacattcattcaataacctatgaatatagtttataggtatgtctatatacattcattcattcggggacataaaaaag

SEQ ID NO: 202903 - DNA, 3161 bp, Zea Mays
ctacctctcccgtcgcacctcgccctctcccttgccctgccccagatctcggcctccagtcctcgctgccgccgcgacttgctcgccccgtctccctccggccctgcctcatcgcggccgtggtggccaaggaacacgagctcattggaaacactcttaaataaagcttcaatgaacaagacaggagctcgacttcgcctagctccgaacaagcggttgacgaggcggaggtctcgcgtcctacgtgcgtcgcgccgttgcctggctccgtcctcgccgttcctctgtagaagctggccgctgacccccgcccgcctccgcttggccgtctggccgccccccgcgtggtcacctagatggctggccgcgcccctagatttgggttcctaccttgttaggacttccatcttcgttcattttgctgtgtgtccgtcggatagatgactaatgcatcctcaaagttctccaaggcggagccttgcatctttgtgtgtttgatttggttgagctgcaacccgtgctgctgtccttttcagtataaaaaaagatttagatgtaggttggcattcggatgaaaaatggaccgtgaaaaaaaaggaggtccattcaccttgtgttctgtcatttgagcacggatcctttagtgtataggaaagcgtgatatttctgataatcttctgcttttcagagaaaagctttgagtaattgagatgtatattcctctattgaaagaaaaagaggggttttcaagcaatatgaaagcttgatgctttcgttcttcgttttatttaagatcactttcctcccttgttcttatgaaatgtgcaactctttaatcagggatggcaaccgatagtgaagcctcgaaggcagctgaggttgtggttgactggcataaacaggacagcaagaggatgctccatgcagtttaccgtgttggggatctggaccgcacaatcaagtactacacagaatgctttgggatgaaactgctgaggaaaagggatgttcctgatgagaagtacaccaacgccttccttggctttgggccagagaacaccaactttgcagttgaattgaccaactttgcggaggtctcgcgtcctacgtgcgtcgcgccgttgcctggctccgtcctcgccgttcctctgtagaagctggccgctgacccccgccgtggtggccgtcgcgccgttttttattagatgaagaatgaatcaacccttgtagaagctaaagatagaagataacactactctgtttttgaatgtctgaagtgtaattttgcagccttgcaactataaaacaaacaatgtatggctaaattattgcagttgcacagtgtgaagatttaaaattgaagtgctatgaagagatggataagaggaagaaactttataatattgttcaagagacaaaaggaaattatcagggttttttgtcgatgccgacccttaagcaaaaatgaggtgtcatcaggcctgaatgcaaatggcggaacaactaaaaagacatttaagtttgatagagtattcacgccgaaggatgatcaaggtgtgggcgtctccggcggcccgactatacgaagcgagggcgtatcggggctaaggacacgaaaggccaagcgcaaagggcgtacggcagtaagcccgcctgcaccgcaccagaccgccacccgcgacgtgcccatgtcatgacgccacggtggcggcacgctgacccatcgacgtcaccctcttcctcgcttccgctcgacagcctccagtttcctggtcagtcttcgtgccgcctctctaccacacaccgtctctcagagatggaatcaccacccctcacggttgaagcgaccgcttttaccgagaaaatgatggacatgactttggaggatataatcaagatgtgaaagaaaaagaatcctggaggcaagaaaccccctaggcggccggtaaactctaaggtctataactctggatgtgtggtggtgttgaaattagttttgtgtataactgttccaacttcaaatagcttcgttttaggtgctatgtttgggaataaattttccagttaaaagtacatgacgtccacgatggactttcttggttttccaaggctcagttacttgctgcgatatattcctttggtgaagttttgccgtgcaccatgtgtgtatcttcaagattaaactaaattttgcattattcatcggttttcttaattcttgtagttgaatagctttaacctgaaacaatacaccagtcgctttcgctgttgtttactttggtggatagtttctattgggaagtgatttgacaccagcaaaggcatttacttctcttttttatttgtagtctgaaggtttagggttttcatgctctcgactctgatagctaactcaggtatgtacaacattatcttattttcctattattaaattatctataaagctgctaggaaattacgcaacatttatatttctatatagagtagcttcttatgtccttaattgtaattagttatttaatttgatgattaccatcttgtaatatttgtataggaacgaaccaatggtaacaattttcttcatttaatggtggattaaatgaaactatcttcggtctttggtacttgctcaacatctacaataagtaggtcagtggaacatatgtcctgtcaccgttagattgggcgatcgaaccatggtacatcagtcaccttctttaatgatttttttgttctacttactaatctgctgctttactcttccctggtgtttgtactgacctttttaggaaatcttgcagaactgatattcaatgtaaaatattcagtgtgatagaaaaaagaagattagtcgagtatgatctttatttcaatctgccaatgctcttgcgtgtcaatggatgtttgcaaagacaacagatgccaatgcagactggcttcttcctaacaacaaacctcaacaagccaagagagacgacaattggcgacgtaggaaaaaagacgcattaatcaataacgtgtggattcctggcagtggcgtagacaaggggctctaaggtttgtacaaacatataaatacatattaattactactattttttaaatagttaagtatataaaaacagtgactgattcaataaagatttgttatttcttttgtt

SEQ ID NO: 202904 - DNA, 2338 bp, Zea Mays
tacatttgtactataataggttactcagaccttataattttagagaaggaagctggtgatgagctgatcaaatttctctagagaagcattaaaacaaatggttccagtgacagtggggagcttgaagtattccatatgtctgctcttaaattgggaattacatcttttagggcagcactcactgatagaagagcccttaagaagataattcagaacggccattttaagataaaagatgtcggtgaaattgtaccacttgttagaaactggggtttaagataaaattgcagctagatatgattgtagtgagtgctttgaggaaatcatggagggctaattacagttacttacaggtacatcctacctggagctttaaaaattgtgtttcatcgcccattgatcaatattatccatcgggttatcaacgtcatccgagcctgtccagtcaggttaacagtgtggctaagtcatatgaaaaaatataactcaaaagataaccccagtttcttgcaatattaccttcctgtgtatgttctaggtataatacctgactttggtaatacatagttattctgttttaactgaaatagtttgtcgatttttgcgtgggaacaacaaatacatgatggtaccccttccatccaaaaaatgcaaggcctctatttgacaaacagtcgaactcttagtagaggcggtccagaggtcgttagtggatagtcaagaagagattcacagttgatgtcgaacaaataaaggaatccaataaacttactgcaacattgagaagggaaaatcctacatcagctacatgtataatcgaattatttgtataaacaagataggtacaggcagagcaattcggtagagagaagggagggtgcatgcttgcagcctcattagattactcagttactattttaggctgtcttattgcgccttcatagttggaagtagtatagattttaatcttctctgtatgagcttaatatacttttatttagcttcttgcaagcttgaatttcctggtgctcaaatgccacctgccacttttgtagtctctgctcggaactgtgttttcttactctaattatacatatacgttcatatagagatggaatcaccacccctcacggttgaagcgaccgcttttaccgagaaaatgatggacatgactttggaggatataatcaagatgtgaaagaaaaagaatcctggaggcaagaaaccccctaggcggccggtaaactctaagtctgaaggtttagggttttcatgctctcgactctgatagctaactcaggaacgaaccaatggtaacaattttcttcatttaatggtggattaaatgaaactatcttcggtctttggtacttgctcaacatctacaataagtaggtcagtggaacatatgtcctgtcaccgttagattgggcgatcgaaccatgaactgatattcaatgtaaaatattcagtgtgatagaaaaaagaagattagtcgagtatgatctttatttcaatctgccaatgctcttggtaattccagtttgcctaatagtcaacttgtttttttgtaatgttcgagcattcgctgaaattactgatcgtattcaaaattgttgctaaattgacgattaacccttgtttccatggatagcgagaggtgtgacgtggtatgtttatagctattgtgcagtatacaccttgcttacaggttgccacaactccgccggttggatccactaaacttccaatgtgtcctgtttgcattggtgtgcttacagttttgtatttttgtttcttagggcccacgccaccatgatgtcacatttcaattcattttgtgacctctgatgaagagatttaaacacatctgttctatcctatccatagttttaacttcaaatattgttctatttaatgccacaacaacatatatctttactatgtcatattatatatgattttgttggcttacaacctctcgatagggcgcccgaatgggcgcctcatgttctagttatatttatgacgtatcttatataattttccctccgtaatccatgcagcgtgtcaatggatgtttgcaaagacaacagatgccaatgcagactggcttcttcctaacaacaaacctcaacaagccaagagagacgacaattggcgacgtaggaaaaaagacgcattaatcaataacgtgtggattcctggcagtggcgtagacaaggggctctaaggtttgtacaaacatataaatacatattaattactactattttttaaatagttaagtatataaaaacagtgactgattcaataaagatttgttatttcttttgtt

SEQ ID NO: 202905 - DNA, 2004 bp, Zea Mays
ctcagaccttataattttagagaaggaagctggtgatgagctgatcaaatttctctagagaagcattaaaacaaatggttccagtgacagtggggagcttgaagtattccatatgtctgctcttaaattgggaattacatcttttagggcagcactcactgatagaagagcccttaagaagataattcagaacggccattttaagataaaagatgtcggtgaaattgtaccacttgttagaaactggggtttaagataaaattgcagctagatatgattgtagtgagtgctttgaggaaatcatggagggctaattacagttacttacaggtacatcctacctggagctttaaaaattgtgtttcatcgcccattgatcaatattatccatcgggttatcaacgtcatccgagcctgtccagtcaggttaacagtgtggctaagtcatatgaaaaaatataactcaaaagataaccccagtttcttgcaatattaccttcctgtgtatgttctagagatggaatcaccacccctcacggttgaagcgaccgcttttaccgagaaaatgatggacatgactttggaggatataatcaagatgtgaaagaaaaagaatcctggaggcaagaaaccccctaggcggccggtaaactctaagtctgaaggtttagggttttcatgctctcgactctgatagctaactcaggtatgtacaacattatcttattttcctattattaaattatctataaagctgctaggaaattacgcaacatttatatttctatatagagtagcttcttatgtccttaattgtaattagttatttaatttgatgattaccatcttgtaatatttgtataggaacgaaccaatggtaacaattttcttcatttaatggtggattaaatgaaactatcttcggtctttggtacttgctcaacatctacaataagtaggtcagtggaacatatgtcctgtcaccgttagattgggcgatcgaaccatggtacatcagtcaccttctttaatgatttttttgttctacttactaatctgctgctttactcttccctggtgtttgtactgacctttttaggaaatcttgcagaactgatattcaatgtaaaatattcagtgtgatagaaaaaagaagattagtcgagtatgatctttatttcaatctgccaatgctcttggtaattccagtttgcctaatagtcaacttgtttttttgtaatgttcgagcattcgctgaaattactgatcgtattcaaaattgttgctaaattgacgattaacccttgtttccatggatagcgagaggtgtgacgtggtatgtttatagctattgtgcagtatacaccttgcttacaggttgccacaactccgccggttggatccactaaacttccaatgtgtcctgtttgcattggtgtgcttacagttttgtatttttgtttcttagggcccacgccaccatgatgtcacatttcaattcattttgtgacctctgatgaagagatttaaacacatctgttctatcctatccatagttttaacttcaaatattgttctatttaatgccacaacaacatatatctttactatgtcatattatatatgattttgttggcttacaacctctcgatagggcgcccgaatgggcgcctcatgttctagttatatttatgacgtatcttatataattttccctccgtaatccatgcagcgtgtcaatggatgtttgcaaagacaacagatgccaatgcagactggcttcttcctaacaacaaacctcaacaagccaagagagacgacaattggcgacgtaggaaaaaagacgcattaatcaataacgtgtggattcctggcagtggcgtagacaaggggctctaaggtttgtacaaacatataaatacatattaattactactattttttaaatagttaagtatataaaaacagtgactgattcaataaagatttgttatttcttttgtt

SEQ ID NO: 202906 - DNA, 2405 bp, Zea Mays
ctcagaccttataattttagagaaggaagctggtgatgagctgatcaaatttctctagagaagcattaaaacaaatggttccagtgacagtggggagcttgaagtattccatatgtctgctcttaaattgggaattacatcttttagggcagcactcactgatagaagagcccttaagaagataattcagaacggccattttaagataaaagatgtcggtgaaattgtaccacttgttagaaactggggtttaagataaaattgcagctagatatgattgtagtgagtgctttgaggaaatcatggagggctaattacagttacttacaggtacatcctacctggagctttaaaaattgtgtttcatcgcccattgatcaatattatccatcgggttatcaacgtcatccgagcctgtccagtcaggttaacagtgtggctaagtcatatgaaaaaatataactcaaaagataaccccagtttcttgcaatattaccttcctgtgtatgttctaggtataatacctgactttggtaatacatagttattctgttttaactgaaatagtttgtcgatttttgcgtgggaacaacaaatacatgatggtaccccttccatccaaaaaatgcaaggcctctatttgacaaacagtcgaactcttagtagaggcggtccagaggtcgttagtggatagtcaagaagagattcacagttgatgtcgaacaaataaaggaatccaataaacttactgcaacattgagaagggaaaatcctacatcagctacatgtataatcgaattatttgtataaacaagataggtacaggcagagcaattcggtagagagaagggagggtgcatgcttgcagcctcattagattactcagttactattttaggctgtcttattgcgccttcatagttggaagtagtatagattttaatcttctctgtatgagcttaatatacttttatttagcttcttgcaagcttgaatttcctggtgctcaaatgccacctgccacttttgtagtctctgctcggaactgtgttttcttactctaattatacatatacgttcatatagagatggaatcaccacccctcacggttgaagcgaccgcttttaccgagaaaatgatggacatgactttggaggatataatcaagatgtgaaagaaaaagaatcctggaggcaagaaaccccctaggcggccgtctgaaggtttagggttttcatgctctcgactctgatagctaactcaggaacgaaccaatggtaacaattttcttcatttaatggtggattaaatgaaactatcttcggtctttggtacttgctcaacatctacaataagtaggtcagtggaacatatgtcctgtcaccgttagattgggcgatcgaaccatggtacatcagtcaccttctttaatgatttttttgttctacttactaatctgctgctttactcttccctggtgtttgtactgacctttttaggaaatcttgcagaactgatattcaatgtaaaatattcagtgtgatagaaaaaagaagattagtcgagtatgatctttatttcaatctgccaatgctcttggtaattccagtttgcctaatagtcaacttgtttttttgtaatgttcgagcattcgctgaaattactgatcgtattcaaaattgttgctaaattgacgattaacccttgtttccatggatagcgagaggtgtgacgtggtatgtttatagctattgtgcagtatacaccttgcttacaggttgccacaactccgccggttggatccactaaacttccaatgtgtcctgtttgcattggtgtgcttacagttttgtatttttgtttcttagggcccacgccaccatgatgtcacatttcaattcattttgtgacctctgatgaagagatttaaacacatctgttctatcctatccatagttttaacttcaaatattgttctatttaatgccacaacaacatatatctttactatgtcatattatatatgattttgttggcttacaacctctcgatagggcgcccgaatgggcgcctcatgttctagttatatttatgacgtatcttatataattttccctccgtaatccatgcagcgtgtcaatggatgtttgcaaagacaacagatgccaatgcagactggcttcttcctaacaacaaacctcaacaagccaagagagacgacaattggcgacgtaggaaaaaagacgcattaatcaataacgtgtggattcctggcagtggcgtagacaaggggctctaaggtttgtacaaacatataaatacatattaattactactattttttaaatagttaagtatataaaaacagtgactgattcaataaagatttgttatttcttttgtt

SEQ ID NO: 202907 - DNA, 1857 bp, Zea Mays
attctgttttaactgaaatagtttgtcgatttttgcgtgggaacaacaaatacatgatggtaccccttccatccaaaaaatgcaaggcctctatttgacaaacagtcgaactcttagtagaggcggtccagaggtcgttagtggatagtcaagaagagattcacagttgatgtcgaacaaataaaggaatccaataaacttactgcaacattgagaagggaaaatcctacatcagctacatgtataatcgaattatttgtataaacaagataggtacaggcagagcaattcggtagagagaagggagggtgcatgcttgcagcctcattagattactcagttactattttaggctgtcttattgcgccttcatagttggaagtagtatagattttaatcttctctgtatgagcttaatatacttttatttagcttcttgcaagcttgaatttcctggtgctcaaatgccacctgccacttttgtagtctctgctcggaactgtgttttcttactctaattatacatatacgttcatatagagatggaatcaccacccctcacggttgaagcgaccgcttttaccgagaaaatgatggacatgactttggatgtgaaagaaaaagaatcctggaggcaagaaaccccctaggcggccggtaaactctaagtctgaaggtttagggttttcatgctctcgactctgatagctaactcaggaacgaaccaatggtaacaattttcttcatttaatggtggattaaatgaaactatcttcggtctttggtacttgctcaacatctacaataagtaggtcagtggaacatatgtcctgtcaccgttagattgggcgatcgaaccatggtacatcagtcaccttctttaatgatttttttgttctacttactaatctgctgctttactcttccctggtgtttgtactgacctttttaggaaatcttgcagaactgatattcaatgtaaaatattcagtgtgatagaaaaaagaagattagtcgagtatgatctttatttcaatctgccaatgctcttggtaattccagtttgcctaatagtcaacttgtttttttgtaatgttcgagcattcgctgaaattactgatcgtattcaaaattgttgctaaattgacgattaacccttgtttccatggatagcgagaggtgtgacgtggtatgtttatagctattgtgcagtatacaccttgcttacaggttgccacaactccgccggttggatccactaaacttccaatgtgtcctgtttgcattggtgtgcttacagttttgtatttttgtttcttagggcccacgccaccatgatgtcacatttcaattcattttgtgacctctgatgaagagatttaaacacatctgttctatcctatccatagttttaacttcaaatattgttctatttaatgccacaacaacatatatctttactatgtcatattatatatgattttgttggcttacaacctctcgatagggcgcccgaatgggcgcctcatgttctagttatatttatgacgtatcttatataattttccctccgtaatccatgcagcgtgtcaatggatgtttgcaaagacaacagatgccaatgcagactggcttcttcctaacaacaaacctcaacaagccaagagagacgacaattggcgacgtaggaaaaaagacgcattaatcaataacgtgtggattcctggcagtggcgtagacaaggggctctaaggtttgtacaaacatataaatacatattaattactactattttttaaatagttaagtatataaaaacagtgactgattcaataaagatttgttatttcttttgtt

SEQ ID NO: 202908 - DNA, 2574 bp, Zea Mays
acctactcctccctcccctgctttcactccattcgcgtctcggggtttggaccagccacccggcggcggcgggcaaacacagacagggccgcagggccgagcgaccggagcgccgccgccaccggcaaagccacggcacggcacccatggagtcgcgcgccctcctgcacgcccggcctgccgccctccctgcccgcgccggcctgcgcctccctccccagctcccgcgcccgcgggcagtctccttctcccccgccgccaagcccgcgctccggtccccgctcctcgcgtcgaggggccccttcctcccgcggcacgacgcgcttctggggaacgggttcctgaagcagagagcggtcagcgttggcggtgacgtgtccttccgcgcccaggcggcggcggcggcggtgccggcgccgcagccggaggagtccgctaaaaagttcctcggcatcgacgtgaagacgctcaggaagatcgtgccgctggggctcatgttcttctgcatcctcttcaactacaccatcctgcgggacaccaaggacgtgctggtggtcaccgccaaggggagcagcgccgagatcatccctttcctcaagacctgggttaacctgcccatggccatcggattcatgctcctctacaccaagctttcaaacgttctctcgcgggaggcgctcttctacaccgtcatcttcccgttcatcgccttcttcggcgccttcgcctttgtgctctacccgctcaggaacgtcatccatcccaccgcgctcgcggacaagctgctcgccgcgctcggcccgagcttccttgggcccgtggcgatactgaggatttggagcttctgcctgttctatgttatggctgagctctggggcagcgtcgtcatctccgtgctcttctgggggttcgctaatcagttgatgaagctaaggaattctacccgttatttggccttggggctaatattgcccttatcttttctgggcgcactgtgaagtatttctcaaatttgcgcaagacattgggtcctggaattgatggctgggaagtatctttgaaaggaatgatgagcatagtcgtacttcttggacttgtcataacttccatctattggggagtaaacaaatttgttttgaatgatccttcacttccaaagtctgatcgtaagaagaaaaaggaaaagcctaaacttggcatgaaagagagtctgaaggttctgctctcctcgaggtatgtgagggatctagctaccctagtggttgcttatggcattagtatcaatcttgtcgaagtcacatggaaatcaaaactcaaggcacagttccctagtccaaatgaatactcatctttcatgggtgatttctcaaccgcaactggaattgcaactttcacgatgatgctgttaggacgtattatactacggaaatttggctggggtgtggccgcaatgatcacccccaccgttctgttgctaactggtgttggattcttctctctgattttgtttggacagccgctgactcctatgcttgccactatgggtatgacccccctactggcagccgtttatgtgggcgccatgcagaatatatttagcaagagtgcaaagtacagtttatttgacccatgcaaggagatggcttatattcctttggatgaagatatgaaggtaaaaggaaaggcagccattgatgttgtttgcaacccactgggcaagtccggcggtgcacttatccaacaattcatgatcctgacgttcggatccctggcgaattcaactccataccttgggggcatactgctggtcatcgttctcgcgtggctaggcgcggcgagctcattggacaagcagttctcgagcttggctaaggaggacctgaagaaggataaggctgcccgagagaaagtagaaccctcgctgctcaaggcgcctgcagagggcagtgatgatgtactggcggagcagacaaatggatctgtgacgccccaagcaaccggaacggagagctcgccgtcgaactcatcccccattcaataatagctccagcatcataagttgtactagctaggagagttattacagcgagcagaaataattggtactccctccggttttttttatatatttggcgttggttagtgtaagggggtgtttggtttctagggactaatgtttagtccctagattttattccattttagttccaaaattgccaaatatagaaactaaaactttattttattttctatatttagcaatttatacactaaaaaggaataaaatgaagggactaaacattagtccctagaaaccaaacacccactaaatttgactagctagcgtcaaataaaaaaatggaaatggaggtaatattaaaataactcatggttttcaagtctgtaacggcgtgcagcttcaggctgctagtgatttttgtttgtaacatgagcaaattttgacggccggcggcgaacgtcgttctgggaatggccccgcccctttgtgccgatgtcaaatgcataaactgtgtgttttgagccgatatgaagcatggttctctctcaagagtg

SEQ ID NO: 202909 - DNA, 2178 bp, Zea Mays
gttcgttacacctgtacagtgtacatatcatgggttaacacctcgattcgcgccgagagccttccagagcaaagaagccggccaccaacaaaacccgacccgacgacgacgagcaagtagctgccagaacccagcacagctctacccaccaattctgattctggaagacagacagtagtcgatcgcatcgcatcgcatggcgacgaggccggcagcggaggagaagccgtgggagctggcggcgcacccgcggctgcccaagggcaggacggtggccgtggtggtgctggacggctggggcgaggcggcgcccgaccccttcaactgcatccacgtcgccgacacgcccacgctcgacgccctcaagaaggcagctccggagagatggaggctcatcaaggcgcacgggacggcggtggggctgccgacggacgacgacatggggaacagcgaggtcggccacaatgcgctcggagcgggacagatatacgcgcagggcgcgaaactggtcgatctggcgctgggttccgggaagatatacgagggcgaaggtttcaagtacatccagcagtccttccaggacggcactctgcacctcatcggcctgctcagcgacggaggcgtgcactccaggttcgaccagctgcagctgctgctccaaggtgctagcgagcgcggggcgaagaggatacgtgtgcacgtcctcacggatgggcgggacgtggcggacggcagcagcgtcaggttcgtggagatgcttgaggaggacctcgctaggcttcgggagaagggcgtcgatgcgagaatagcgtctggcggtggcaggatgtatgtgacgatggaccgttacgagaacgactggcaggtcgtgaagcgaggctgggacgcgcacgtcctgggcgaagccccgcacaggttcaggagcgcgctcgaggccctgaggaagctgagggaggaggaccccaagaaggccagcgaccagtacctgccccccttcgtcgtagtcgacgggagcggggagccggtcggcccggtgcgggacggagacgccgtggtgacgttcaacttcagggccgaccggatggtgatgctcgccaaggcgctggagtacgagggcttcgacaggttcgaccgcgtcaggttccccaggacgcggtacgccggcatgctccagtacgacggcgagctcaagctcccgcgccactacctcgttgctcccccggagatccagaggacgtccggcgagtacttggcgcgcaacggcgtccgcacctacgcttgcagcgagacggtcaagtttgggcacgtcacttttttctggaacgggaatcggtctggttacttcgaccagaacctggaaaaatacgaggagattcccagcgatgccggcatccccttcaatgtccagccgaagatgaaggccttggaaatcgcgcagaaggcgagggacgccatcctgagccaaaaattcgatcaggtaagggtcaacattgcaaacggagatatggttggccatacaggagacatggaggcaaccattgttgggtgcaaggcagctgatgaggctgttaagatcatcctcgacgccgttgagcaagtgggcggcgttttcgtggtgactgccgaccacggcaacgccgaggacatggcgaaaagagacaagtctggagaaccactccgggacaaggacggcaaggtgcagaccctgacttcgcacacgctgaatccggtcccaatcgcgataggaggccccgggcttgcgcctggcgtcaggttccgtacagacctcgcaagtgccggcctcgccaatgttgcggcgacggtcatgaaccttcatgggtttcaggcacccgatcactatgagccaacgctgatccaagtcgtcgacgagtgatttccgctttgctggttgctgcgttgcagttttcagacattatctgaactaactcctaccacagttgtccggcatgtaatcgtactcaaactagactacctgggcaattacctgtgccaattaccgtgtcgaatgttcaaaaatgttttcgttaaggccttgttcgtttgtattacactcgtaattgttgtagctaatcaaagtttatataaattagagaaacaatccggataggaatcgttccgatttactaatccggcacaaatgaacaaggtaagtatttt

SEQ ID NO: 202910 - DNA, 3009 bp, Zea Mays
gtccagtccaaccgacccggcatcgtctcgcgagccgcgactcgtctcgtcatttccatcgaacgcccagatcccacattcccacctagctctgcgcgatccatcccggccgccacgccaaggaggccctcgcctgacctcggatcaaagcctcctccatccgccttcatcccggccggtggttcgggccgtcacgggaggggtccatcactggttactcggtggagagctcggggctcggctcccatctcacgattctcaccccacacgcgcaccgggtcacctcgattcggcagcctcgcggtgagttgagttcttcgcttgtcgggccagtccgcctctcgcttggcgcggttatggattcgcgggtggcgtggcgtcgtccgcgatcgctctagctcgcattgagcgattcgcgagttgcgactccttgttttgtttgctctctgtttttttttatgtcgatggtgatatgtggcggcgggattctgagctcggttgcttctaaccttccgcggagtggtttagctaatcggttttgaagctgttgatatggatgtgccgtgtgcgtgacgaatcgaatgggccgcagcaggattcctacgcagctcggcagcagggggaattggatcctgcgaccatgcgaatttggaaccctggagcagtggagtgctaggaggtctcggtgtcgtcatttttttctaggggcgtaggagtcgacttggttggaatctagttagtcataatttctctttctgatttcattggtctgtccatgcgtctgttttcgtcaaacaagaagtttgttattgccaagcatcccgctatggaggaagctgcctgccgtattgtgttacgcgaatccggtgagctgggctctgcgcgttcctcttgacgccctttgcgcgaacgacgagctttcttccagctcggttgcccctgaacaaccaacgccaaaagcagctccagaattttcctgatgtcgtctctatatttttgccttctaagtcatgcttaatggcagagtccttgttgcgtgggtcactgcctcactgggttctgaggcaaggaaaagaaggcttcagtagtcaggtctgggtcaagccatgatggagagatcgctgctggaggtgctggccacggcggcgcaaggagggaccgaggggacgtcagtgctgagcatgctcaagtacgccgtgctgcccatcgccaaggtgttcactgtctgcttcatggggttccttatggcctccaagtacgtcaacattctccagcccaacggccgcaagcttctcaatgggcttgtgttttcccttctgcttccatgccttatattttcccaattgggtagagcaatcactatcgagaagatgatacaatggtggtatattccagtaaatattgttgttggcgcagtatcgggctctttgattggatttgttgtggcatctatcatcagacctccatatccatacttcaagttcactgttatccatataggaataggaaatattggaaatatacctctggtcctcattgcagcgttatgtcgtgatccttctaacccatttggcgactctgataaatgcaatcaagatgggaatgcatatatctcatttggccaatgggttggtgcaattattgtttacacatatgtattcaaaatgcttgctccaccaccaggacagacctttgatggttctgaagaggatggaatcccaatcaaggcatctggagagaatacagtgccccaagtaggaaaatatcctatgaacactaacagtagtactgtaccagagaatgaacctttgttatctgctggggaagttcaaaaggagcgtgccacttctgtaggaacaaagataatgggctatgttaaatgtgtggttaagtttctgaaagacaagcagcttctccagccaccaattattgcatctgcttttgcaattgcaatcggtgttatcccattcttgaagaattttgtacttacggatgatgctcctctgttctttttcacagacagctgcctcattcttggagaagctatgatcccatgcattttacttgctgttgggggcaatcttgtcgatggccctggtgaaggaagtaagaggcttggcgtgcgtaccactgttgctataatttttgcacggttggtcttggtccctcttgctggggttggcattaccatgttagttgataaacttggtttcattcccgaaggtgatagaatgttcaagtttgtcctgctactgcagcattctatgcccacatcagtgttgtcaggtgctgttgcaaatctgagaggttgtggaaaagaatcagctgcaattttgttctgggttcacatttttgctgtgttctccatggcgggatggattatattctatctgagtttgctcttctaaatgccttactgcgcaggaatatctttgagatcaaatatggtccaaaatgttgaggaagaaaccagtatcatgaactgtacagatatatcgttgcagaggtacaagtgtatctgtacagatatatggatacggtccctcctataatcccatattaccgtggtctcctgctgctacaagccgtgagcgatgggaacactttccctttccctccacgtatcaacaggttcacacccaaccctagattgggatgctggccttcttagttctccataatattatttcatttgtacttcctgtatattgtaaaccttgagatggctgtgttcaaatagtttcttattgggcgagggctgaagtagtagtatagatgtattatactacctatttgagtgttcggttatgccgcaaatgatgctttattatgcagaacttgtgcccgctgctggcccgtcggtcgtactaactaaaattgccaatcgcggagacttgcatgttgcaagctcaggccggcgcccagcggtttgcagcaaatttttttttttgactcggctatctccaatagaatactcaactcaatatttatatttaaactctactctat

SEQ ID NO: 202911 - DNA, 2407 bp, Zea Mays
agcgaggctgggcgtacagcccaggacggcacgcccgcaattcctcgtgcccctgacctcctctcctccccccctgctacggattccaaaacggatataaaatgcgcgtgtattatctagtccagtccaaccgacccggcatcgtctcgcgagccgcgactcgtctcgtcatttccatcgaacgcccagatcccacattcccacctagctctgcgcgatccatcccggccgccacgccaaggaggccctcgcctgacctcggatcaaagcctcctccatccgccttcatcccggccggtggttcgggccgtcacgggaggggtccatcactggttactcggtggagagctcggggctcggctcccatctcacgattctcaccccacacgcgcaccgggtcacctcgattcggcagcctcgcgagtccttgttgcgtgggtcactgcctcactgggttctgaggcaaggaaaagaaggcttcagtagtcaggtctgggtcaagccatgatggagagatcgctgctggaggtgctggccacggcggcgcaaggagggaccgaggggacgtcagtgctgagcatgctcaagtacgccgtgctgcccatcgccaaggtgttcactgtctgcttcatggggttccttatggcctccaagtacgtcaacattctccagcccaacggccgcaagcttctcaatgggcttgtgttttcccttctgcttccatgccttatattttcccaattgggtagagcaatcactatcgagaagatgatacaatggtggtatattccagtaaatattgttgttggcgcagtatcgggctctttgattggatttgttgtggcatctatcatcagacctccatatccatacttcaagttcactgttatccatataggaataggaaatattggaaatatacctctggtcctcattgcagcgttatgtcgtgatccttctaacccatttggcgactctgataaatgcaatcaagatgggaatgcatatatctcatttggccaatgggttggtgcaattattgtttacacatatgtattcaaaatgcttgctccaccaccaggacagacctttgatggttctgaagaggatggaatcccaatcaaggcatctggagagaatacagtgccccaagtaggaaaatatcctatgaacactaacagtagtactgtaccagagaatgaacctttgttatctgctggggaagttcaaaaggagcgtgccacttctgtaggaacaaagataatgggctatgttaaatgtgtggttaagtttctgaaagacaagcagcttctccagccaccaattattgcatctgcttttgcaattgcaatcggtgttatcccattcttgaagaattttgtacttacggatgatgctcctctgttctttttcacagacagctgcctcattcttggagaagctatgatcccatgcattttacttgctgttgggggcaatcttgtcgatggccctggtgaaggaagtaagaggcttggcgtgcgtaccactgttgctataatttttgcacggttggtcttggtccctcttgctggggttggcattaccatgttagttgataaacttggtttcattcccgaaggtgatagaatgttcaagtttgtcctgctactgcagcattctatgcccacatcagtgttgtcaggtgctgttgcaaatctgagaggttgtggaaaagaatcagctgcaattttgttctgggttcacatttttgctgtgttctccatggcgggatggattatattctatctgagtttgctcttctaaatgccttactgcgcaggaatatctttgagatcaaatatggtccaaaatgttgaggaagaaaccagtatcatgaactgtacagatatatcgttgcagaggtacaagtgtatctgtacagatatatggatacggtccctcctataatcccatattaccgtggtctcctgctgctacaagccgtgagcgatgggaacactttccctttccctccacgtatcaacaggttcacacccaaccctagattgggatgctggccttcttagttctccataatattatttcatttgtacttcctgtatattgtaaaccttgagatggctgtgttcaaatagtttcttattgggcgagggctgaagtagtagtatagatgtattatactacctatttgagtgttcggttatgccgcaaatgatgctttattatgcagaacttgtgcccgctgctggcccgtcggtcgtactaactaaaattgccaatcgcggagacttgcatgttgcaagctcaggccggcgcccagcggtttgcagcaaatttttttttttgactcggctatctccaatagaatactcaactcaatatttatatttaaactctactctat

SEQ ID NO: 202912 - DNA, 841 bp, Zea Mays
atgctatgcttggatgcacatgattctccttgattcaagacaatgatgtgtaattgcaagaggtgtccaaggatatcaagtatgctgacaatcaaccaatagtgctttggggaccaagattctccagatcaacagtgaaggacatgcgcataaatatggcaatatcagcagcatttgaatatggcgaggttgaaggacgaggaataagaatggcaaaaagagtagtccgtgctctgggtttgatttttggatgtgtgttcactgcatccctggcttatacagcagctagtaacatggttgagctttcattgcagtatactccccgtatgttttactactatcaggagctgattgttactgtggctgcctccgttcttctgtacatcacggcttcatggtaccgataaacacgacaaacaattatggcctggcttagatgattgcgagatgttaggacatgccttgagtttcagatagagaccaacctgtggtgccttccgcatctaagggatagccaagaacccgcaaattctgtagcattcttccagctttgaggcaggtagttcttagtggaggatcatgtgaccagctatggattcagtagtacaatgaagatggccaatggatgaaaattgtttcgcgagaatatttgaacagcggtgttgtccatgcaatttttaattagatcttggacatatgcttagacgacatacttaactgtgatgtgcatgtgcttttttttgcctgaatgagtgctgagcttcttctgtgttaggctgcctctcgggagctcccatttgtcggacacccatgagcatgagtagctgcactagttaagggg

SEQ ID NO: 202913 - DNA, 861 bp, Zea Mays
gtactcttctcttaattcataagaagacccagctattgctaacatgctcattgtttatggttattcacttgttgtttggatagctattatgggcaatgcagactggaagcctttgcagttcctatgttttgctttcttctgcagaatactacagaagctaagagctactgaaccactaataactccaatatacaatgaatatggcgaggttgaaggacgaggaataagaatggcaaaaagagtagtccgtgctctgggtttgatttttggatgtgtgttcactgcatccctggcttatacagcagctagtaacatggttgagctttcattgcagtatactccccgtatgttttactactatcaggagctgattgttactgtggctgcctccgttcttctgtacatcacggcttcatggtaccgataaacacgacaaacaattatggcctggcttagatgattgcgagatgttaggacatgccttgagtttcagatagagaccaacctgtggtgccttccgcatctaagggatagccaagaacccgcaaattctgtagcattcttccagctttgaggcaggtagttcttagtggaggatcatgtgaccagctatggattcagtagtacaatgaagatggccaatggatgaaaattgtttcgcgagaatatttgaacagcggtgttgtccatgcaatttttaattagatcttggacatatgcttagacgacatacttaactgtgatgtgcatgtgcttttttttgcctgaatgagtgctgagcttcttctgtgttaggctgcctctcgggagctcccatttgtcggacacccatgagcatgagtagctgcactagttaagggg

SEQ ID NO: 202914 - DNA, 679 bp, Zea Mays
aacgaaaaccagctctcatattggcataattccaaatttctctcgtccgcaccgccgccactcgccttttcattccgcaccgccgccaacccgccgcctcttctttccatggaagtggacgacggtagccgcgccaccccgccactggacgccgtggccgccgccttcaagtcccaagtcatggagttgcaggacctcgtcctcgcccgcagcatgttcccggccacggcgctgcccgacctcgccaacgtggacgcgttggtgacggcgatggagtcgcaggtggaaaccatcagccgccgccttcaggaggagcttgacgccatccctaaggccaagaagctagtccagcggtccttgaaggaggaagagaagctgcagcatatgcttgcgaacttaccttctggaatgcgcaagaatgattttgctaatcagcacgaacagagctcatcaaggatgctgcctcattttaactcttcttttactgaagctaatgaatgtgaactgaagattaaggatgaaccagttgcagctcctagggtacatgaggggaagactgactttggaaaaggttaatatcgcaataaatgaagtggcttcatatgcagatgccaatgctcatcttgttacatgccctaagaaaaagttgtcagaagatacatgggaaaaagctttggta

SEQ ID NO: 202915 - DNA, 325 bp, Zea Mays
gtgatggagcccaaaaacagaaccttgtagcaggacctagaagagaaggcccgaagactcgaatctccacacatggtgatcttcctgatgagtgagcacaatctcacccaaggtgtcccaaagcaagggaagagcacctgcacctcgttggtatatctcaaccgaggagcttgattcactctcatcgtacatgaggggaagactgactttggaaaaggttaatatcgcaataaatgaagtggcttcatatgcagatgccaatgctcatcttgttacatgccctaagaaaaagttgtcagaagatacatgggaaaaagctttggta

SEQ ID NO: 202916 - DNA, 756 bp, Zea Mays
cgacgatattagacaacacttggagtgtcaattttctacaatgcaaatgtgggatttgctctagcaagcttgaaaggggttaacatcccaatgtatattgcaatcaaaaggatcactccccttgctgtgttggtggctgggtgcatgcggggaaaggggaagccaccgacacaggtcattctttcagttatctgcaccgccaatggtgtcctcgttgcagcacttggagatttttcctttgacctatatggatactacatggctctaacatcagtcttcttccagactatgtatttgattctggtggagaaatcaggtgccgaggatggtctttcctcagtggacttgatgttttacaacagcatattgtcacttccatttctgtttttcctcattatagcaacaagagaattcccccattctcttacagtattatctgcaaaggcagcctctctgatgttcggtgtcgttctcgttatctcgctgatgatgggaatcgttctcaatttcactatgttttggtgcacaattgtgaactctgctctgactacaacaatagtaggagttctcaagggtgtcggatcaacgaccctcggtttcgatctgttgggaggtgtcgaagtacatgctctgaatgttactggactggtgatcaacacatttggtggcctatggtactcttatgcgaagtataagcagaaaaggaaaacaccacggaagatccaacatgatgtagagtcgcatgcccacaagtag

SEQ ID NO: 202917 - DNA, 1888 bp, Zea Mays
caaaatcgtattaagaattccagccccggagacaaaatttggcatacacacctcattatcagattcatatcagcaaacatctcacagaatttgtcccgtgttcaaatcctactcccatgatcagatctaacaacaggaacacccgtagcacacgacttcacggggcccaaaccgagatcacgaagtgagatacacaaaggaagggctgaaccttgagcgacgggcggtagagcgcgttccgccgcatccggcggacgcaaacgcccacctcccacttgaacgcccgcttccggctgtcgaggaagccatccacctcctctcgaaccgcctgcggcgtcgaccccttccggaacagacgccggtacagcgcctcctccacgtacttcttggtcgacctccgcgccacgtccttcatccgcgtcgccatctccgcctccgccctctcctcttcaccgccggcgtctcgggttttgagggttttggcggcggcgcggggagaagctctcgcctcactactccccagtcccactcgtgtgatcgcgttgggcttttctgggccttgatgggccgtgggctctgaaattacaagccgtcggtttctccccattagccaggggtaaaacgggaaagacggagaacgaagaggaggggaggggggcgacgtcgccggcggtcggaggcgacggggatgagtcggaaggaggaagtggcagtggccgggagctggcagatgcgctggcgcggcgacgtttgtaccgggaggtgacgctggcgctgcactcagggttgcgcgacgccaaggcggacttctccttcctccgcgcgcgtgggctccgcagcctgctcggattccttcgctccaccgcctccgcggccgacgacgcgctgctgctccttttccgccactcccaatccatccccgatctccaagttattcctgttctctttcagaattcgttgcatcaaccaaagcaagatcctgttgtgacattggatcatatatttggaacggaaccaatgaagattacaagcccccctacaggttctgaaattgctcttgcacttagagtcttggaaggttgttgccttttatatagccgatgcacagctctggcccacaaatacaaggctgtgaaggtactcttgaatatattagccagccgaggtccaactgagcaaggagtttgcttggacacactgatatcgctgatgttggactcaccctccaatcagatggatttcgaagaatacagtggacttgaaaaggttgctgaacttttaaaggatgtgcaagtggaaaagcatataagattgaaatgtggggaattcctattgttgctcattggacatgtttttgtgaaggaaaactctcccatacatgaacaaatgaaaaatctgtttggtgagcagtgcgcatcacttatatgggcagcaagccggttcggctccaccttggatgcagagcaaaggcagacgaccttgcaaatacaagcaatgagagttgtcgaatccttggaaccctactaggactggtgcattcatctgtgtaacttacgggtgatgacaatttgatgtctctaatctgagctgcatgctccattttgttcatgcaagctttgttgtcattctcttctgtgtaaagccattcttatgctactctttttagtaagctttgttaaaaggatcgtattagttccatttgagaacaatgcattagggagacactaggaaaacattaaaatatccattttgttgtggtagatttgagctgttgtacctgtgattcaaataaaagtggttagtccaaagtgctagtgaatgttattgatcccttaactgattaaactgaatacagtcggttcttgttcagtgcattggcacgcattgc

SEQ ID NO: 202918 - DNA, 1670 bp, Zea Mays
ctacttcttcctcccccacgtcctcacgccgctccagggcacccacccaaaatcggccgcgtccgggccgacctcctcgaccaccccgctgccagggccagggaccccatcttctgggagggctggggtggttccaatctcggcagggatttgcccacgcccaaggagatttgtaaggggctcgacaagtatgtgattgggcaggacagagccaagaaggtgctatctgttgcagtttacaaccactataaacggatataccatcaaactttacaaaagggatttgggtggttttaatggggaagctgatgatgacgacaacgtggaactagagaaaagcaatgtgctgttaatgggacctactggctctggtaaaactttacttgcaaagacattagctcgttttgtgaatgtaccatttgtaattgctgatgcaacaacattgacccaggcagggtatgtaggagaagatgtagaatctatattatacaagttactcacggtggcagattttaatgtgcaagcagcacaacaagggatggtgtacatagatgaagttgataagatcacaaaaaaggctgaaagtcttaacattagcagagacgtatctggtgaaggtgttcagcaggcattgctgaaaatgctggaaggcacgatagtcaacgttcctgagaaaggagcaaggaagcatcctcgtggtgataatatacagatagataccaaagatattctttttatatgtggtggtgctttcgtggatttggaaaaaactatatcagagagacggcaggattcatctattggtttcggcgccccagttcgtgcaaacatgagggctggtggcatttcaagtgctcaagtgacatcatccttgttggaatctgttgagagtggtgatctaatagcttatggacttatcccagaatttattggacgcttccctatccttgtgagcctggccgctctaaatgaggaccagcttgttcaggttctgattgagccaaagaatgccctgggcaaacaattcaagaaattgtttagcatgaataatgttaagcttcactttacagatggtgcacttagaataattgccaaaaaggcaatgtcaaaaaatacaggtgcacggggtttaagaactatccttgagaatattctcatggattctatgtatgagatcccagatgcaaaatctggggagaagcgaatcgatgcagtggttgtagatgaagatgcagtaggatcagtggaccaacctggctgcggagctaagattctttacggtgatggtgctttggatcaatatctatcccagataaaggtgtcaggagacggagtggggagcgaaatggatggggaagctgagctttcgtcatcgagagccattggcatgtgattcctggttctgaccgcaccagtgtaacctgtaaaaatctaatcccagttatatcaatgattttaatgagtgtagtcgagcaggttcgtgtagataccagtcgcttataaatggcgcaatgccatgaattgtaatagctgccggatctatgttaaaacttgaaacaaagaaatggatcaagagggcatggagttgcaaatttgtgatctcgattcttttcgaaactgcattgcatagcgttatcctggcattgcttgaagagaggattttttgttac

SEQ ID NO: 202919 - DNA, 1523 bp, Zea Mays
cttcacttgattgagggaatttaacacagctgggtttgattgtttgctgtttcaacaaaatgtgctatctgttgcagtttacaaccactataaacggatataccatcaaactttacaaaaggggtctggagcagatttgggtggttttaatggggaagctgatgatgacgacaacgtggaactagagaaaagcaatgtgctgttaatgggacctactggctctggtaaaactttacttgcaaagacattagctcgttttgtgaatgtaccatttgtaattgctgatgcaacaacattgacccaggcagggtatgtaggagaagatgtagaatctatattatacaagttactcacggtggcagattttaatgtgcaagcagcacaacaagggatggtgtacatagatgaagttgataagatcacaaaaaaggctgaaagtcttaacattagcagagacgtatctggtgaaggtgttcagcaggcattgctgaaaatgctggaaggcacgatagtcaacgttcctgagaaaggagcaaggaagcatcctcgtggtgataatatacagatagataccaaagatattctttttatatgtggtggtgctttcgtggatttggaaaaaactatatcagagagacggcaggattcatctattggtttcggcgccccagttcgtgcaaacatgagggctggtggcatttcaagtgctcaagtgacatcatccttgttggaatctgttgagagtggtgatctaatagcttatggacttatcccagaatttattggacgcttccctatccttgtgagcctggccgctctaaatgaggaccagcttgttcaggttctgattgagccaaagaatgccctgggcaaacaattcaagaaattgtttagcatgaataatgttaagcttcactttacagatggtgcacttagaataattgccaaaaaggcaatgtcaaaaaatacaggtgcacggggtttaagaactatccttgagaatattctcatggattctatgtatgagatcccagatgcaaaatctggggagaagcgaatcgatgcagtggttgtagatgaagatgcagtaggatcagtggaccaacctggctgcggagctaagattctttacggtgatggtgctttggatcaatatctatcccagataaaggtgtcaggagacggagtggggagcgaaatggatggggaagctgagctttcgtcatcgagagccattggcatgtgattcctggttctgaccgcaccagtgtaacctgtaaaaatctaatcccagttatatcaatgattttaatgagtgtagtcgagcaggttcgtgtagataccagtcgcttataaatggcgcaatgccatgaattgtaatagctgccggatctatgttaaaacttgaaacaaagaaatggatcaagagggcatggagttgcaaatttgtgatctcgattcttttcgaaactgcattgcatagcgttatcctggcattgcttgaagagaggattttttgttac

SEQ ID NO: 202920 - DNA, 1858 bp, Zea Mays
ctagtttgaggagtggatgacctgttttggaaggaatccaagatgggtgtaatcagcacagtgctgggtttctctggttttggctttgggttctcggctggcattgttattggttacttcctcttcatctacgtccagccaactgatgtcaaggctatctgcagaactgcacaggatatcgcgaagccaattattgctgagaacactgcaaagtataagatagactctgttgagtttgaatcacttactttgggtagcttaccacccacctttcaagggatgaaagtctatgtcacagaggagcaagagctgataatggaaccatctcttaaatgggctgcaaacccaaatattactgttgctgtaaaagcctatggtttgaaagctactatccagattgtggatctacaagtctttgcatcacctcgcattactctgaagccattggtgcctacatttccttgctttgcaaaaatccttgtctcactcatggagaagccacatgttgactttgggctaaaacttcttggagcagatgtaatggctattcctggtctttacagatttgttcaggagaccatcaagaaacaagtagcaagcatgtatttgtggccgaagacactagaagtacctataatggatccctcaaaagcatcaaaaaggcctgttggaattctacttgtgaaggttgtgagagcccaaaatctgcggaagaaggatctgctgggtaaatctgacccatacgtgaaacttaagatgtcagatgataaacttccatccaagaagacaactgtaaagcgcagcaatctcaatccagagtggggtgaagacttcaagtttgttgtgacagatccagaaaaccaggctcttgaagttaatgtcttcgactgggaacaggttgggaaacatgaaaagatgggaatgaacatgatcccacttagagaactcctaccagaggggactaaagttactaccctcaacttgcttaagaccatggacccaaacgatgtacaaaatgagaagtctcgtggtgagcttactctagagctcacatacaagcctttcaaggaagaagatatagagaaagaagatacacagggtgctgatgtgatagagaaagctccagatggcactccagctggtggtggcttgctttatgttgttgttcatgaagcccaagatcttgaggggaagcaccatacaaacccatatgcaaaaataattttcaaaggcgaggagaagaaaactaaggtcatcaagaagaatagggatccaagatgggaggatgagtttgagttcgtgtgtgaggagcctcctgtgaatgataaactgcatgttgaagtcataagtaaagccccgaaggcagggctgatacatggcaaggaaactttgggctatattgatattagccttgcagacgtgatcagcaacaagcggattaatgaaaagtaccatctcatagactcgaaaaatggtcagatccagatcgagttgcagtggagaacttcctagacaggaaggagccagaatgccttgatgttcctctattcagtttgcgtatatctgtgattgagattgaggtcatgtagatatttcttttttttatagacatctgttgttcggatcttctcttaatcgatcaagtttccgacaagaactatgcagacatgttacagaccctgagaatggaactgaacaaatgacacgtcatacaattacactcggcattctggcatactgagaatttacaccatgctccaaatatatttcactgctatcttctaagagcatttagcgtgtgccgtgtggcatgcgtaccgaaatggttcgatgaacttgcaaagttgtatattaccaa

SEQ ID NO: 202921 - DNA, 1202 bp, Zea Mays
gcaagcatcgtcatcagcaattcagcatagcgaaggtccgacgacacgacgacgacgatatagcaaatatcgatgacgacgacgacgtccgctcgactccggccgctcgccgtcggcgtcgctctctttgtcttcctaccgtggctgagctacgtgctcgaggctgccgaggagggccgggcggcggcgccgtggttctggccaccacagatcggcggcgacgacccctactactactgcctcagctggcgcctgatggtggaggcgggcaacgccaaggggtggcgcgcggtgccggcgcagtgcgtgggctacgtgcgcgtgtacatggcctggggccagtaccaccgcgacgtgggcgccgtcgcggagctggcggccgccggtgcggacgggctgatcgacgcctgggtgctggacgtcgacgacacctgcctgtccaaccagccctactaccaggtgaagcagttcggggcgtatgatccggtggctttcagggcgtgggcgagctgggcgacctgcccggggatacctgcgatgcaatggctgttccagacgctgagaggcagagggttcagggtgttcctcgtgactgggagggacgaggagaccctgggctcaagcacggccgccaatctcgccgccgccggcttctccggaagcgcggcgtaccgtgggcagagcgcggtggcgttcaagtcggcggtgcggaggaagctggcggaggaggaggggtaccggatccggggcaacgtgggcgaccagtggagcgacctgcagggcgaatgcgccggggaccgcgtcttcaaggtgcccaaccccatgtacctggtcccatgatcgatcatctcctttcttcttactccctccgtttcttttagttgtctctggatagtttaattttgtactatccagcgacaactaaaacgaaacggatggagcaggtatcaccagctccaccgtacccgtggtggccggcgccatgcatgtactgtatttctactactactagtgggctgagcaaacttctcaatcttcgagcaagcctggaaaggaagctgcagttcgctgcccttaataaaaatattagggaagtcatgtagatggacctccaagggatccaacattcccttccttgtcacaataatttgctttggctgctcttctctgcaagaagagatcaaactaatgcaacaacctcc

SEQ ID NO: 202922 - DNA, 1157 bp, Zea Mays
cacaaagccttcaaaaaatacagaaagctctctgtagacctgcagtctgagctacactccttcaatgtttctgcaacccaagcctccgtatgctcgacaaaaacatttggaggttgcacagaacacatcatttggtcagatcccaaggggaactctatttacaggaggctggaaactagtctgtagaagaacgaagcagttaatctattcttctctgataccagcgcttggaaacaagaataacataagagtttccttgcgaaggaacacctcaagagtctaaagtctaaagggtgttgtcccagaatctgcagcgtttacatatatgtgcatcaactttggaaaacaagtgtttgcagaggtataaataagttaacgactcatgtgcccactctcaatcttgtacttgatggaaacatgtcaggctttccccttggaaaatctttggcaggtaccgtggcagttcagtgtcctcccaggataacacttgcgaccatactgaacgggtcaatgggcagagtgaatagagatgcaggctaccattgcaggggtacaggaggattgatgtggcgaaccccgcagggaagttaggagtttactctgcagatggtgtctgtgctctgaaccagtttcagtttctctgtaacctcagatatcgatttctgcttgctccacacgaagacagagtttgcagaagcagccagacatgaacacacaagatggcagaagaagtcctggtgcattctgctattggcatttggcagtggcaccctatctgttgggcggtttcgccagcttctttctgctgccgcgcttgcgttgcatttgcattcagctcgctgctcttcttgccttgttgtgtgtgatctgggccaatctgacggcattttgggcacagttggtggtcgcgtatcccgtcggcccgtgttctcagttgctgagccaagcatattcagaatgggtcgcatcgcaacctaacatgtgctccatgttcacaaaaagctgggcccggatgttctctcaatataaagaaaaaaatatattttatgtctaccaattatggttaaagttagttttttcttcctcaactataaaaacccaacacagctccttcatcatcttctaaaaccagacacatgaccgtcctagctgttttt

SEQ ID NO: 202923 - DNA, 2759 bp, Zea Mays
gttgctgaggataatatgcacaaagccttcaaaaaatacagaaagctctctgtagacctgcagtctgagctacactccttcaatgtttctgcaacccaagcctccgtatgctcgacaaaaacatttggaggttgcacagaacacatcatttggtcagatcccaaggggaactctatttacaggaggctggaaactagtctgtagaagaacgaagcagttaatctattcttctctgataccagcgcttggaaacaagaataacataagagtttccttgcgaaggaacacctcaagagtctaaagtctaaagggtgttgtcccagggtacgagcaaggaagggacacagacaaagtttgtttgaagaaaaagaatggcatacggaaattgtcgttggattggtattcaagatgggaggatcagccaaatgacatggaagaagagttatcattaaatatggagaaggaattgcatttgctcgacaatcttgaaccaccatcaaaaatcgagaagctgagaattcgtggctaccggggttcacaattgccatgttggatggcaaagcaaagtgactcttgtggtccagccgatgatacacatatagtaatgcaaagaaatccatctgaattctcccatctgactaaactagtattggacaacttaccaaacttggagcatcttggggagcttgtggaactgccactgataaagatccttaagctcaaaagactgccaaagttgggagagctgcttacgaccacaactggggaggaaggagtggaagcgcaatgttgtttccatcacgtttccactctagtaataattgattgcccgaaacttgttgtgaagccgtactttcctccgtccttgcagagattgacactagaaggaaacaatatgcagttggtttcttcaggatgcttcttccatccacgtcatcatcatgcatctcatgctcatggtgacgagtcttcatcttcctcctattttgcggatgagacgggtactcacctcgagagacttgaacttcgtcggttgacaggatcatcatctggttgggaggtgctgcagcatctcactgggcttcataccctagaaatattcaagtgcacaggccttacgcatttacctgagagcatccactgccccaccaatctctgtagactggtgataacacagtgtgataatcttcgtgtgctgcctgactggcttgtggaactgaaatctctacagagtctggaagtacggttatgtgatgctctccagcagcttcctgaacaaataggagaactctgctcactccagcacctcaccatatcttctttgacttccctgacttgccttcccgagagcatgcagcacctcacctcgcttcgaactctcaacttgtgtctttgtaacgcgttgacccatctgccggagtggctaggcgaactctctgtacttcaaaaactctggctccagggctgccgtggccttacatccttgccccaatccatacaacgccttactgctctagaggacttacttataagctacaaccctgacctagataggcgttgcacggaaggattgggggaggattggcaccttgtctcacatattcaaaatttaaggctacgggactaggggcttcagattagtgcataatattctaaggaagacaaggatggccaggtgagacatttttgtttctctctggcatgtgagcacacatatttattttcttatgtttgtgaaagttgcacagcttagatattggcacttgattatatgctgcctcgtttgttcctcaaaaaatcgtattgtgtgctcgtgttacattgccactttttgctatattgttggttcacaggatccacactcttgctttcattctcatccctacttgttctcaggatccacactcttccctctaagtagcgtcgaaagtcgaaactaactgttccttttttatcagaatctgcagcgtttacatatatgtgcatcaactttggaaaacaagtgtttgcagaggtataaataagttaacgactcatgtgcccactctcaatcttgtacttgatggaaacatgtcaggctttccccttggaaaatctttggcaggtaccgtggcagttcagtgtcctcccaggataacacttgcgaccatactgaacgggtcaatgggcagagtgaatagagatgcaggctaccattgcaggggtacaggaggattgatgtggcgaaccccgcagggaagttaggagtttactctgcagatggtgtctgtgctctgaaccagtttcagtttctctgtaacctcagatatcgatttctgcttgctccacacgaagacagagtttgcagaagcagccagacatgaacacacaagatggcagaagaagtcctggtgcattctgctattggcatttggcattgcgttgcatttgcattcagctcgctgctcttcttgccttgttgtgtgtgatctgggccaatctgacggcattttgggcacagttggtggtcgcgtatcccgtcggcccgtgttctcagttgctgagccaagcatattcagaatgggtcgcatcgcaacctaacatgtgctccatgttcacaaaaagctgggcccggatgttctctcaatataaagaaaaaaatatattttatgtctaccaattatggttaaagttagttttttcttcctcaactataaaaacccaacacagctccttcatcatcttctaaaaccagacacatgaccgtcctagctgttttt

SEQ ID NO: 202924 - DNA, 884 bp, Zea Mays
gacggcaaaggcaaaggcaacggagccagccaggtccagcctcaattccagactggccgatcctgccgcaaactgcaaacagccccccgcaacggctgtgcatgtgcgtggacccaccgccggcgcaacacgccatagcagtcccagcgagggggggtggagtgaatgcacatgcggtacaagcagagctgatcgggattcctcgtctctggtctgtctgtgctccaccacctgctgctggtgccatggccatgggtagtctcgccttcgccacggcgctcgtcttcgtcttcgtcttcgccatcgccgtgccggccgtcgccgccgccgcgcaggcccccgccccggcgcccaccagcgacgggacgtcgattgaccagggcatcgcgtacctgctgatgatcatggcgctggtgctcacctacctcatccaccctctggacgcctccgccccgtacaagctcttctgagcgagcagattttctcctccattttttggtaggcttttgtagtggatcactagagtaactgggggtggtggtgtgggtgtgtgggtgagattcggtacctattcattgccatgaattacattcggtttcgcgtgtgtatattattactcctatatgtcttctggttcatgcttcgatgtccattggttgtcgctttgtgttgcatcggggagacctcgaggagtagttcttgttcagtagtgcctagcgcgcatctgagatctgacctgacctgaccttccacacgcgaagccttgtggtgtggtgtttgttgttggggctttcgcaggatctgaattagtcaaaccgttaaggccctatttcccgatagcaatcgagatcatcggttcatgttagaatgcgccgggagcagga

SEQ ID NO: 202925 - DNA, 805 bp, Zea Mays
ccgcaggtggaacatttgtgcggccagccagattgagatgacggcaaaggcaaaggcaacggagccagccagggggggtggagtgaatgcacatgcggtacaagcagagctgatcgggattcctcgtctctggtctgtctgtgctccaccacctgctgctggtgccatggccatgggtagtctcgccttcgccacggcgctcgtcttcgtcttcgtcttcgccatcgccgtgccggccgtcgccgccgccgcgcaggcccccgccccggcgcccaccagcgacgggacgtcgattgaccagggcatcgcgtacctgctgatgatcatggcgctggtgctcacctacctcatccaccctctggacgcctccgccccgtacaagctcttctgagcgagcagattttctcctccattttttggtaggcttttgtagtggatcactagagtaactgggggtggtggtgtgggtgtgtgggtgagattcggtacctattcattgccatgaattacattcggtttcgcgtgtgtatattattactcctatatgtcttctggttcatgcttcgatgtccattggttgtcgctttgtgttgcatcggggagacctcgaggagtagttcttgttcagtagtgcctagcgcgcatctgagatctgacctgacctgaccttccacacgcgaagccttgtggtgtggtgtttgttgttggggctttcgcaggatctgaattagtcaaaccgttaaggccctatttcccgatagcaatcgagatcatcggttcatgttagaatgcgccgggagcagga

SEQ ID NO: 202926 - DNA, 2117 bp, Zea Mays
gtgtcaagatgagtagagctcagctgtgtacaccagaaatcattttcgtgtcgacgtagcagtgcccgaggattacaaacaactacctgcatggacctgctggtctgaccaaactggcatacgtgtttcacggggtgggggtgggggcctggcagatcgacatcagcgacaggaaaaagggagacgaacctaatccatctatcgccgtaatcaaatcaggaacaggtttgcgtcaggggcggcggtggcggtgcggttaattagctgttaaaacagcgcgcgtccagcgtggtggtggtggtggtgggagagtggtaggcatccatccatcagcacaagcacacacggtggttgtcgcttacctcactttacacctaaccgccggagttcccgttccacgggtcacggcccccggcgtcctctttgcgaaactcagtggcagtgatgagctggggtggggccgtgggggagtcctaccgctaccacccaccaactcagctctctagaagacctaccctcccgcgattcctcagtcaagtgcctatgcctatctataaaatccagccccgcttcacccacacacccttggccttggcctggcgctcgcacctcacagcagcagcagcaacaacaacctccactgccgcaacccaccgagaggcgagaccggcggcggcaaaaggacgatacaaaagcagccagggttgctggcaacagcgtcggtcgcccgcccgctcgccatggggaggtcgccgtgctgcgagaaggcgcacaccaacaagggcgcgtggaccaaggaggaggacgagcgcctggtcgcgcacatcagggcgcacggcgaggggtgctggcgctcgctgcccaaggccgccggcctcctgcgctgcggcaagagctgccgcctccgctggatcaactacctccgccccgacctcaagcgcggcaacttcacggaggaggaggacgagctcatcgtcaagctgcacagcgtcctcggcaacaagtggtccctgatcgccggaaggctgcccggcaggacggacaacgagatcaagaactactggaacacgcacatccggaggaagctgctgagcagggggatcgacccggtgacgcaccgcccggtcacggagcaccacgcgtccaacatcaccatatcgttcgagacggaggtggccgccgctgcccgtgatgataagaagggcgccgtcttccggctggaggaggaggaggagcgcaacaaggcgacgatggtcgtcggccgcgaccggcagagccagagccagagccacagccaccccgccggcgagtggggccaggggaagaggccgctcaagtgccccgacctcaacctggacctctgcatcagcccgccgtgccaggaggaggaggagatggaggaggctgcgatgagagtgagaccggcggtgaagcgggaggccgggctctgcttcggctgcagcctggggctccccaggaccgcggactgcaagtgcagcagcagcagcttcctcgggctcaggaccgccatgctcgacttcagaagcctcgagatgaaatgagcgcgcttctaccctctctgtgtagcttctcccccccgtcgtcctcgtttttgttttgccacacctcacatggatgatgaattgatgatacgtggttggttagttttttcgtaggtgaaaaatacgcgatggtgagcgagtgaaagagagattttgtgccctgggtcctcctccctgctctctcttgctgctccattttgcctccctctgtcctctctctctctctctctctctctctctctctctctctctctgtatctctgtaattaccatcgccaaatgatcatgggggcaatatcatgctaggtctctggaaattgacgctaatcccgtttccaggagctgaggctaggttcagttgcctggtgtggccgccggccgtgcagtctcagaaaagaaacactggagcatgtgctgaggcctgagccagatcttacgtttaccaaacctctagaccagcagcatgtgagcatcgcctaatcgtgcagtccccataaagcgcctcgtgccttagacgacgcctttttccaatctgacctgcttcttcttcttttt

SEQ ID NO: 202927 - DNA, 2062 bp, Zea Mays
gcaaacgagcttctcttgtcactcatcagcacggttagtatagctagccaccatgaaggtagagcgcgatctccacatgagccggggcgacggcgaggacagctacgcctccaactcaaggcttcaggagaagtccatactgaagacgaggccggtgctgcacaaggccgtggcggcggcgcacgccttgtcgctctcctcaggaggacccggcggcggcgccatggtcgtcgcggacctcggctgctcgtcggggcccaacacactgctcgtcgtctcggaggtgctagcagcggtggcgatggtggccggcggcagcgcccaaccgcagcacgtgcagttcttcctgaacgacctccccgggaacgactttaacctcgtcttccggtcgctggacctgttgaagaacaagaagctggccgccaaggacaggcgggaggagtcgctgctaccgccgtactacgtggccgggctgccgggctccttctacacccggctgttcccggaccactgcgtccacctcttccactcctcctactgcctcatgtggcgctccaaggtccccgacgagctcgccggtggcgcggtcctcaacgagggccacatgtacatctgggaaaccacgccgcaggcggtggtggccctgtacaggaggcagttccaggaggacatgtcgctgttcctcaggctttgccacagggagctcgtgcccggtggccacatggtgctggcgttcctgggcaggaagaagagcaaggacgtgcttcgtggcgaggtcagctacacgtgggggctcctcgcgcaggctctccagtccctcgtcaaacagggccgtgtgaagaaggataagctggactccttcaacctgccgttctacgcaccttcgatggacgaggtgagggacgtgatcacgcggagccaggcgttcgacatcacccacatccagctcttcgagtccaactgggatccacacgacgacgacgacgtggagatgaagatggaagaagacgtcgccgccgtccagagcggcgtcaacgtcgccaggtccatcagggccgtgatcgggcccctcatcgcccgccactttggcgagcacatactcgacgatctcttcgagctgcatgccaaaaatgtcgcagtgcacctgcagaaagtgaagaccaagtaccctgtcatcgtcgtttccctccaggcgaaatgagccgcgcgccaaataaaggaccaagctagctgatgcaaaatctggcgtcaagttagctattagtaccgctactattatatgcatgcagaataattagtcaaacaatcagaaaaataaagtgcctcagagactgttagtggcagatccaatgtttcgttaattatatgtagtgtaatggtaatggtaatggtaatggtagacatcaggtttcatcgtccatataatatagggtgggcagatcatgggctctggctttttctttaaaaaagctagagaagtggtaaacattgattttaaaatgacttcccatgaaaagctagagcagtggtaaaaatcctctatgctggactagagcaagtccctaggcagtagcttttaatgttgaagaatgtttgggttaaagagaatgagaggacatttgcaattgtgcaaaggtatagaatggggaattcattctctaattctgcatatatggatgacatcttacttgtcagttgtgatgaaaagttcttgtcctcaagattaagtgaaattggtctcggtgaagtgtctcttgttctaagaattgagattcattgagatagaagagaaaaggggtacgtattaggattattgcatatataggcatgctaagaaaggttgtaaagaaataaagtattcatgcgagaaacctacgtctgttccagtgatcaagggtaatggatttgggaactttaatgttctaaagtggtaatatgtaatagattaaatgtaccatatgcttcaactgtttgaagctcaataaatgcacaagtatggtgttaccctgacgttgtttatatgtccgggttgttttggtagtgtccaatccagatatagatc

SEQ ID NO: 202928 - DNA, 1388 bp, Zea Mays
gcaaacgagcttctcttgtcactcatcagcacggttagtatagctagccaccatgaaggtagagcgcgatctccacatgagccggggcgacggcgaggacagctacgcctccaactcaaggcttcaggagaagtccatactgaagacgaggccggtgctgcacaaggccgtggcggcggcgcacgccttgtcgctctcctcaggaggacccggcggcggcgccatggtcgtcgcggacctcggctgctcgtcggggcccaacacactgctcgtcgtctcggaggtgctagcagcggtggcgatggtggccggcggcagcgcccaaccgcagcacgtgcagttcttcctgaacgacctccccgggaacgactttaacctcgtcttccggtcgctggacctgttgaagaacaagaagctggccgccaaggacaggcgggaggagtcgctgctaccgccgtactacgtggccgggctgccgggctccttctacacccggctgttcccggaccactgcgtccacctcttccactcctcctactgcctcatgtggcgctccaaggtccccgacgagctcgccggtggcgcggtcctcaacgagggccacatgtacatctgggaaaccacgccgcaggcggtggtggccctgtacaggaggcagttccaggaggacatgtcgctgttcctcaggctttgccacagggagctcgtgcccggtggccacatggtgctggcgttcctgggcaggaagaagagcaaggacgtgcttcgtggcgaggtcagctacacgtgggggctcctcgcgcaggctctccagtccctcgtcaaacagggccgtgtgaagaaggataagctggactccttcaacctgccgttctacgcaccttcgatggacgaggtgagggacgtgatcacgcggagccaggcgttcgacatcacccacatccagctcttcgagtccaactgggatccacacgacgacgacgacgtggagatgaagatggaagaagacgtcgccgccgtccagagcggcgtcaacgtcgccaggtccatcagggccgtgatcgggcccctcatcgcccgccactttggcgagcacatactcgacgatctcttcgagctgcatgccaaaaatgtcgcagtgcacctgcagaaagtgaagaccaagtaccctgtcatcgtcgtttccctccaggcgaaatgagccgcgcgccaaataaaggaccaagtaccctgtcatcgtcgtttccctccaggcgaaatgagccgcgcgccaaataaaggaccaagctagcagatgaaaaataatattaaatctggcgtcaccgctactactatatgcacgcagaagtattaatcaaccaatcagaaaaataaagtgcctcagagac

SEQ ID NO: 202929 - DNA, 3285 bp, Zea Mays
cttttttttcccccacgaccaggatcggtgagcgagtccaagcggccaaatccaatcgctaaccaccgccggcgtcctcgtctacgtctactacctgctctgctctctctcccccacaggccccgcagcatccacacgaggacttcagaatcagcagcagccagcaggcagcagctcagcgagacagacgcgtccggggctcccctccgcgcgcccgccgatcaaggatcaacaacacacggggacgcctcccgtctccttcattcccagcctgcactgcgccgccccagacgcccgcgaccctctccacctcctccggcgaataccgttcctccccggcaagctaccctccgatcctttgttccgggtctgcgaggtagtaccgtcgacgaggcctccctcccctccggcgagccccccttccgaagtcgtgagtcctcccagggtttatgcatgacagcccctgtgtctcttccaaatgagctagaagcggtctcccattctgcaagggttgagttattccgagacgctagttgcaacatagaaaatgaggtgttggccagtttgggaaatggccaagattcaactgctgttggagcaactcctggtttcagagttggagagatcaggtttgctaatggagatatttattctggcacattgttggggaacacaccagagggttcaggccagtatcgctggtcagatggttgcacctatgatggtgagtggaataaagggatgaggcatgggcaaggaaagacggaatggccatctggagccacctatgagggtgagtattctggtggctatgtatatggtgaaggtacctataagggtccagataaaatcatttacaagggacgatggaagttgaatcacaagcatggacttggacatcagacatatccaaatggagacatgtttgaaggttcgtggattcagggagaaatagtaggtcatgggaagtacacgtgggcaaacggggacacttacgttggcaacatgaaaagtggcaagatgtcagggaaaggaactcttacatggaaaaatggggactcgtatgagggtaactggatagatggcatgatgcatgggtatggaatctatacatggaatgaatgtgggtattatattggaacatggacaaggggactgaaggatgggaaaggtaaattctttccgaaaggttgtagagtacctgttaacgacgagatgtatatcaataatctaagaaatcgtggtgtactgcctgatattagaaggcagaatcatggttcacgcatacttcactcttcctcggttgacatggggaacatgaaggagtttttcagactcctcaaagaagacaaaacgccgccagaagaaaacggtgagggacacaaaaaagcctggagagacaataattaagggacacagaagctatgatttaatgctcagcctgcagcttggaatcaggtacacagttggaaagatcacaccaattcaaaaacgtgaagttcgtgcttcagattttggaccaagagcaagtttctggatgaacttcccaaaagaaggatctcggcttactccttcacattcagcggaagattttaaatggaaagactactgtcccatggttttcaggaatttgagagagatgttcaagattgatgctgcagactatatgatctccatatgtggaaattctgctcttaggcaactatcttcccctggaaagagtggaagtgtctttttcctgtcacaagatgatagattcatgattaagactctccgaaaatctgaagtgcaggttcttttacgaatgcttccaaactattatgatcatgtccgtacctatgagaacaccctcataactaagttttttggcctccacagggtgaaaccttctagtggtcaaaagtttcggtttgttgtaatgggaaacatgttttgcactgaattgagaatccaccggaggtttgatttgaaaggatcatctttaggccgttctactgataaaattgaaattgacgagaacacaactctgaaggatttggatcttaactattccttttatcttgaaccttcctggcgtgaggctcttcttaaacagattgaaacagacagtgattttttgagaacacagcggataatggattacagcctactgcttggtgtccattatagagctccacagcacttgcggacacgtgcatcttatcaccggagcatggcagcagatagattgactgttgtttcagaagaagatgctcaggaagatgatgcccttagccatccagaaggactagtcttggttcaaagcagtggtgagaacagtgttattgttggccctcacataagaggcagccgcttgcgtgcatcggctgctggatttggcgaagtagacctactgctgcctggaacagccaggcttcagatccagctaggagttaacatgcctgcaagggcagagcagacccctaaggaagatgaaagcaaaccgttccgtgaggtgtacgatgtggtcctctacctgggcatcattgacatactgcaagagtacaacatgacaaagaaaatcgagcacgctgtcaagtccatgcagtatgactcggtctcgatctcggctgtggacccccagttctactcggagcgtttcttgaacttcatccagaccgtcttccctgagaattcgtagctccatccaccaatacttttcttggaagatgcccgcccactaccacttgctgagaacttcatccagacgacagtccatgtcttcgaatttggagcttgcgagcatcataagaacattgcactctcttcagtgcgtgcctgttccttcctggatgaactggcaggaagagtggccaacaaaatgagattcgttagtgaaattgtgcagaagcaaatcgatcttctctaggctattttgccccgatccctggggtcaccggatcagccgtctggcttcctggagtaggcttggcgtattgggactcgagcaggaagtagatgtgagttgcgaggattctagtgacagcggcgccatagagctctgggattcactgttatgtctcggcagttgcagaaagctgaagcgcctgttgcctctggctcgtgtttcatctgttaaggtgctatggaggatatgtttaataagtccctgaaaacacgcatcaagctccgatacatttttttgtaggacaaacaaaagagtactatgtattttatcgcaaaaacgaaaagaaatggaagcaacagatgaaaatcgcgcgtggtgacggaggaattacgagtgcg

SEQ ID NO: 202930 - DNA, 3626 bp, Zea Mays
cttttttttcccccacgaccaggatcggtgagcgagtccaagcggccaaatccaatcgctaaccaccgccggcgtcctcgtctacgtctactacctgctctgctctctctcccccacaggccccgcagcatccacacgaggacttcagaatcagcagcagccagcaggcagcagctcagcgagacagacgcgtccggggctcccctccgcgcgcccgccgatcaaggatcaacaacacacggggacgcctcccgtctccttcattcccagcctgcactgcgccgccccagacgcccgcgaccctctccacctcctccggcgaataccgttcctccccggcaagctaccctccgatcctttgttccgggtgagtctacgcgcagcgcttcctcccgcggccggatccccatcggcgcgacgcgattcgtggatccggcggccggggtcttcgccgtccacagcagtctgcgaggtagtaccgtcgacgaggcctccctcccctccggcgagccccccttccgaagtcgtgagtcctcccagggtttatgcatgacagcccctgtgtctcttccaaatgagctagaagcggtctcccattctgcaagggttgagttattccgagacgctagttgcaacatagaaaatgaggtgttggccagtttgggaaatggccaagattcaactgctgttggagcaactcctggtttcagagttggagagatcaggtttgctaatggagatatttattctggcacattgttggggaacacaccagagggttcaggccagtatcgctggtcagatggttgcacctatgatggtgagtggaataaagggatgaggcatgggcaaggaaagacggaatggccatctggagccacctatgagggtgagtattctggtggctatgtatatggtgaaggtacctataagggtccagataaaatcatttacaagggacgatggaagttgaatcacaagcatggacttggacatcagacatatccaaatggagacatgtttgaaggttcgtggattcagggagaaatagtaggtcatgggaagtacacgtgggcaaacggggacacttacgttggcaacatgaaaagtggcaagatgtcagggaaaggaactcttacatggaaaaatggggactcgtatgagggtaactggatagatggcatgatgcatgggtatggaatctatacatggaatgaatgtgggtattatattggaacatggacaaggggactgaaggatgggaaaggtaaattctttccgaaaggttgtagagtacctgttaacgacgagatgtatatcaataatctaagaaatcgtggtgtactgcctgatattagaaggcagaatcatggttcacgcatacttcactcttcctcggttgacatggggaacatgaaggttggtatggctaggcaatcttcagatgttttgttcaaaaggaattcagctgagcaatcttctttgaagaatgtgtctttggaaagacggtggagtcttgaggtggctattgaaaaatttattggccatgaatccagcgaaagttctggtctagaaagcttggaaaacttgagtgattctcgtttgcccatactggaaagagaatacatgcaaggtgttctaatcagtgaggtggttcttgacaggagtttttcagactcctcaaagaagacaaaacgccgccagaagaaaacggtgagggacacaaaaaagcctggagagacaataattaagggacacagaagctatgatttaatgctcagcctgcagcttggaatcaggtacacagttggaaagatcacaccaattcaaaaacgtgaagttcgtgcttcagattttggaccaagagcaagtttctggatgaacttcccaaaagaaggatctcggcttactccttcacattcagcggaagattttaaatggaaagactactgtcccatggttttcaggaatttgagagagatgttcaagattgatgctgcagactatatgatctccatatgtggaaattctgctcttaggcaactatcttcccctggaaagagtggaagtgtctttttcctgtcacaagatgatagattcatgattaagactctccgaaaatctgaagtgcaggttcttttacgaatgcttccaaactattatgatcatgtccgtacctatgagaacaccctcataactaagttttttggcctccacagggtgaaaccttctagtggtcaaaagtttcggtttgttgtaatgggaaacatgttttgcactgaattgagaatccaccggaggtttgatttgaaaggatcatctttaggccgttctactgataaaattgaaattgacgagaacacaactctgaaggatttggatcttaactattccttttatcttgaaccttcctggcgtgaggctcttcttaaacagattgaaacagacagtgattttttgagaacacagcggataatggattacagcctactgcttggtgtccattatagagctccacagcacttgcggacacgtgcatcttatcaccggagcatggcagcagatagattgactgttgtttcagaagaagatgctcaggaagatgatgcccttagccatccagaaggactagtcttggttcaaagcagtggtgagaacagtgttattgttggccctcacataagaggcagccgcttgcgtgcatcggctgctggatttggcgaagtagacctactgctgcctggaacagccaggcttcagatccagctaggagttaacatgcctgcaagggcagagcagacccctaaggaagatgaaagcaaaccgttccgtgaggtgtacgatgtggtcctctacctgggcatcattgacatactgcaagagtacaacatgacaaagaaaatcgagcacgctgtcaagtccatgcagtatgactcggtctcgatctcggctgtggacccccagttctactcggagcgtttcttgaacttcatccagaccgtcttccctgagaattcgtagctccatccaccaatacttttcttggaagatgcccgcccactaccacttgctgagaacttcatccagacgacagtccatgtcttcgaatttggagcttgcgagcatcataagaacattgcactctcttcagtgcgtgcctgttccttcctggatgaactggcaggaagagtggccaacaaaatgagattcgttagtgaaattgtgcagaagcaaatcgatcttctctaggctattttgccccgatccctggggtcaccggatcagccgtctggcttcctggagtaggcttggcgtattgggactcgagcaggaagtagatgtgagttgcgaggattctagtgacagcggcgccatagagctctgggattcactgttatgtctcggcagttgcagaaagctgaagcgcctgttgcctctggctcgtgtttcatctgttaaggtgctatggaggatatgtttaataagtccctgaaaacacgcatcaagctccgatacatttttttgtaggacaaacaaaagagtactatgtattttatcgcaaaaacgaaaagaaatggaagcaacagatgaaaatcgcgcgtggtgacggaggaattacgagtgcg

SEQ ID NO: 202931 - DNA, 3755 bp, Zea Mays
cttttttttcccccacgaccaggatcggtgagcgagtccaagcggccaaatccaatcgctaaccaccgccggcgtcctcgtctacgtctactacctgctctgctctctctcccccacaggccccgcagcatccacacgaggacttcagaatcagcagcagccagcaggcagcagctcagcgagacagacgcgtccggggctcccctccgcgcgcccgccgatcaaggatcaacaacacacggggacgcctcccgtctccttcattcccagcctgcactgcgccgccccagacgcccgcgaccctctccacctcctccggcgaataccgttcctccccggcaagctaccctccgatcctttgttccgggtgagtctacgcgcagcgcttcctcccgcggccggatccccatcggcgcgacgcgattcgtggatccggcggccggggtcttcgccgtccacagcagtacagcatcgcttctcagtcctcctcctccccttgcctctagtctggcagcgcacccctgcctccactagtccactgtcctttttttacatggagactagagttgaccctccgcacggatcctctccgtcctcaccctcttctccctctccctccctctccatatctctgcaggtctgcgaggtagtaccgtcgacgaggcctccctcccctccggcgagccccccttccgaagtcgtgaggcagtgcttttgatattagtttttgcatttttgtggatcagtcctcccagggtttatgcatgacagcccctgtgtctcttccaaatgagctagaagcggtctcccattctgcaagggttgagttattccgagacgctagttgcaacatagaaaatgaggtgttggccagtttgggaaatggccaagattcaactgctgttggagcaactcctggtttcagagttggagagatcaggtttgctaatggagatatttattctggcacattgttggggaacacaccagagggttcaggccagtatcgctggtcagatggttgcacctatgatggtgagtggaataaagggatgaggcatgggcaaggaaagacggaatggccatctggagccacctatgagggtgagtattctggtggctatgtatatggtgaaggtacctataagggtccagataaaatcatttacaagggacgatggaagttgaatcacaagcatggacttggacatcagacatatccaaatggagacatgtttgaaggttcgtggattcagggagaaatagtaggtcatgggaagtacacgtgggcaaacggggacacttacgttggcaacatgaaaagtggcaagatgtcagggaaaggaactcttacatggaaaaatggggactcgtatgagggtaactggatagatggcatgatgcatgggtatggaatctatacatggaatgaatgtgggtattatattggaacatggacaaggggactgaaggatgggaaaggtaaattctttccgaaaggttgtagagtacctgttaacgacgagatgtatatcaataatctaagaaatcgtggtgtactgcctgatattagaaggcagaatcatggttcacgcatacttcactcttcctcggttgacatggggaacatgaaggttggtatggctaggcaatcttcagatgttttgttcaaaaggaattcagctgagcaatcttctttgaagaatgtgtctttggaaagacggtggagtcttgaggtggctattgaaaaatttattggccatgaatccagcgaaagttctggtctagaaagcttggaaaacttgagtgattctcgtttgcccatactggaaagagaatacatgcaaggtgttctaatcagtgaggtggttcttgacaggagtttttcagactcctcaaagaagacaaaacgccgccagaagaaaacggtgagggacacaaaaaagcctggagagacaataattaagggacacagaagctatgatttaatgctcagcctgcagcttggaatcaggtacacagttggaaagatcacaccaattcaaaaacgtgaagttcgtgcttcagattttggaccaagagcaagtttctggatgaacttcccaaaagaaggatctcggcttactccttcacattcagcggaagattttaaatggaaagactactgtcccatggttttcaggaatttgagagagatgttcaagattgatgctgcagactatatgatctccatatgtggaaattctgctcttaggcaactatcttcccctggaaagagtggaagtgtctttttcctgtcacaagatgatagattcatgattaagactctccgaaaatctgaagtgcagggtgaaaccttctagtggtcaaaagtttcggtttgttgtaatgggaaacatgttttgcactgaattgagaatccaccggaggtttgatttgaaaggatcatctttaggccgttctactgataaaattgaaattgacgagaacacaactctgaaggatttggatcttaactattccttttatcttgaaccttcctggcgtgaggctcttcttaaacagattgaaacagacagtgattttttgagaacacagcggataatggattacagcctactgcttggtgtccattatagagctccacagcacttgcggacacgtgcatcttatcaccggagcatggcagcagatagattgactgttgtttcagaagaagatgctcaggaagatgatgcccttagccatccagaaggactagtcttggttcaaagcagtggtgagaacagtgttattgttggccctcacataagaggcagccgcttgcgtgcatcggctgctggatttggcgaagtagacctactgctgcctggaacagccaggcttcagatccagctaggagttaacatgcctgcaagggcagagcagacccctaaggaagatgaaagcaaaccgttccgtgaggtgtacgatgtggtcctctacctgggcatcattgacatactgcaagagtacaacatgacaaagaaaatcgagcacgctgtcaagtccatgcagtatgactcggtctcgatctcggctgtggacccccagttctactcggagcgtttcttgaacttcatccagaccgtcttccctgagaattcgtagctccatccaccaatacttttcttggaagatgcccgcccactaccacttgctgagaacttcatccagacgacagtccatgtcttcgaatttggagcttgcgagcatcataagaacattgcactctcttcagtgcgtgcctgttccttcctggatgaactggcaggaagagtggccaacaaaatgagattcgttagtgaaattgtgcagaagcaaatcgatcttctctaggctattttgccccgatccctggggtcaccggatcagccgtctggcttcctggagtaggcttggcgtattgggactcgagcaggaagtagatgtgagttgcgaggattctagtgacagcggcgccatagagctctgggattcactgttatgtctcggcagttgcagaaagctgaagcgcctgttgcctctggctcgtgtttcatctgttaaggtgctatggaggatatgtttaataagtccctgaaaacacgcatcaagctccgatacatttttttgtaggacaaacaaaagagtactatgtattttatcgcaaaaacgaaaagaaatggaagcaacagatgaaaatcgcgcgtggtgacggaggaattacgagtgcg

SEQ ID NO: 202932 - DNA, 2568 bp, Zea Mays
atggggggtctgtgcgattatgtgggagctgtagcttggacccaatttagatctgtcctcaacttcaacttcaaccctcaagatcagtatttaaaaatcaagatggttaacttcgggaagaaattgatggcagatcaaattccagaatggaaaggatattatatcaattacaagttgatgaagaagaaagttaaacagtatggccagcagctccagcagggggaaaaagatcgtcgtcgggttctgaaggatttctcgaagatgcttgatgatcagatagagaagatcgtcctgtttctgttggaacaacaaggactattggcaagcaggattgagaagttaggaaagcaaagggcaatactacaagagcagccagatatatctggcattgctgagttacgagaagcttatagggaagttggtatcaatctcatcaaacttctcaagttcgttgaccttaatgcaactggcattcggaaaatcttgaagaagtttgataagcgttttggctatagatttactgattactatgtgacaagtagatcgaatcacccttactctcagctgcaacaggtctttaagcatgtgggtgtaggagctgttgtaggagctttgtcacgtaaccttgctgaactccaagaacgtcaaggaagctacttatctatttatgatcagccatcttctgctcttaaggaccccatcattgatatgataaattcttcagttgataagttgacaaggtcaactaattttcttcgctttttggggcaacatgccatgattgtggatgaggagtctcctagcactgcaggagaggaagaaatagaagatcagaaataccatttcatgtcccttatgctgaacctggtgaacacattcctttacatggtcaacacgtacatcattgtgccaactgcagatgactattcagtgagccttggggcagcttctactgtttgtggtgtggtcattggttcaatggctgttgcgcaaatattttcctctatttacttcagtgcatggtccaacaagtcatatttcaaaccgcttgttttcagtagcattgttttgttcttggggaatatatgctatgctatggcatatgatatgaagtctctaacggtccttattatcggccgtttactctgtgggatgggttctgcaagagctgtcaatcgccgatatattagtgattgtgtccctgcaaggatacgcatgcaagcttcggctggatttgttagcgcaagtgcacttggcatggcctgtgggccagcgctagctggtttacttcagtggaaattcaaggtctacatggttacattcaatcaatcgactctaccgggttgggtgatggcagttgcatggctattgtatttgatttggctatggttctcattcaaagaaccgaaccgtgctaccgaggtgaatgaagccccacaaaatcctgcttctggacaaactgttgatattggacgactagagaatggaattgcacagcctctgctcaaggattccgtggataaacaaaatgaagatgaagacgaagttgatgatattgaagaaactgcagatgattctcgcaaacctgcaacatcaattggctcagcataccgattgcttaccccgtcagtgaaggtccagttgttgatatacttcatgctcaaatacgcaatggagattttgctttcggagtcgagtgttatcaccaatcactatttcagttggaatacaagcgcagtggcaatatttctagcaatcctagggttgacagtccttcctgtaaacgctgttgttggaacatacatcagcaatatgtttgaggacaggcaactcctcatggtgtctcaaattacgttgctagtaggcattatcttcagcttcaaagtcacgagcacatactatgtcgtccagtatgttgtctcagcactggtcacatttgtttctgccgaagttcttgaaggcgtcaacctttccctcctatcgagcgtgatgtcgtcccgcctctcccgtggcacgtacaacggtggtctcctctcgacggaggctgggaccctggccagggtggtcgccgactgcaccatcaccgcggcggggtacctgggcgtggggaagctcctcaacgtcaccctgctaccgtcgctggtgatatgtgttgcgtccatcgcctgcaccttcctgacgtacaactcgcttttctgatggagcttcgcgacgtatttgtgtcgtcatgattcgttccaaatcaaggcagctgggagaccgccgttgccattgcccgaaggggctgttgtgttattatattatatatgtgcgtcgatttgattgctgtaaattgacaaaatgatggcagccactggccttgccctgcaaaattttgatcgcttatgtccgtgacgttgtcaatgctatgttgtgttgacgtgttggtccaaactgtaattatgctactctcgactgatctgatctccgctgcgatgcggttttgagagtggagtcgtacgagagtggatcggcgtttttgtccattgggcttgattggatttatgagataaatagtttgtcggctaa

SEQ ID NO: 202933 - DNA, 2463 bp, Zea Mays
atggggggtctgtgcgattatgtgggagctgtagcttggacccaatttagatctgtcctcaacttcaacttcaaccctcaagatcagtatttaaaaatcaagatggttaacttcgggaagaaattgatggcagatcaaattccagaatggaaaggatattatatcaattacaagttgatgaagaagaaagttaaacagtatggccagcagctccagcagggggaaaaagatcgtcgtcgggttctgaaggatttctcgaagatgcttgatgatcagatagagaagatcgtcctgtttctgttggaacaacaaggactattggcaagcaggattgagaagttaggaaagcaaagggcaatactacaagagcagccagatatatctggcattgctgagttacgagaagcttatagggaagttggtatcaatctcatcaaacttctcaagttcgttgaccttaatgcaactggcattcggaaaatcttgaagaagtttgataagcgttttggctatagatttactgattactatgtgacaagtagatcgaatcacccttactctcagctgcaacaggtctttaagcatgtggaccccatcattgatatgataaattcttcagttgataagttgacaaggtcaactaattttcttcgctttttggggcaacatgccatgattgtggatgaggagtctcctagcactgcaggagaggaagaaatagaagatcagaaataccatttcatgtcccttatgctgaacctggtgaacacattcctttacatggtcaacacgtacatcattgtgccaactgcagatgactattcagtgagccttggggcagcttctactgtttgtggtgtggtcattggttcaatggctgttgcgcaaatattttcctctatttacttcagtgcatggtccaacaagtcatatttcaaaccgcttgttttcagtagcattgttttgttcttggggaatatatgctatgctatggcatatgatatgaagtctctaacggtccttattatcggccgtttactctgtgggatgggttctgcaagagctgtcaatcgccgatatattagtgattgtgtccctgcaaggatacgcatgcaagcttcggctggatttgttagcgcaagtgcacttggcatggcctgtgggccagcgctagctggtttacttcagtggaaattcaaggtctacatggttacattcaatcaatcgactctaccgggttgggtgatggcagttgcatggctattgtatttgatttggctatggttctcattcaaagaaccgaaccgtgctaccgaggtgaatgaagccccacaaaatcctgcttctggacaaactgttgatattggacgactagagaatggaattgcacagcctctgctcaaggattccgtggataaacaaaatgaagatgaagacgaagttgatgatattgaagaaactgcagatgattctcgcaaacctgcaacatcaattggctcagcataccgattgcttaccccgtcagtgaaggtccagttgttgatatacttcatgctcaaatacgcaatggagattttgctttcggagtcgagtgttatcaccaatcactatttcagttggaatacaagcgcagtggcaatatttctagcaatcctagggttgacagtccttcctgtaaacgctgttgttggaacatacatcagcaatatgtttgaggacaggcaactcctcatggtgtctcaaattacgttgctagtaggcattatcttcagcttcaaagtcacgagcacatactatgtcgtccagtatgttgtctcagcactggtcacatttgtttctgccgaagttcttgaaggcgtcaacctttccctcctatcgagcgtgatgtcgtcccgcctctcccgtggcacgtacaacggtggtctcctctcgacggaggctgggaccctggccagggtggtcgccgactgcaccatcaccgcggcggggtacctgggcgtggggaagctcctcaacgtcaccctgctaccgtcgctggtgatatgtgttgcgtccatcgcctgcaccttcctgacgtacaactcgcttttctgatggagcttcgcgacgtatttgtgtcgtcatgattcgttccaaatcaaggcagctgggagaccgccgttgccattgcccgaaggggctgttgtgttattatattatatatgtgcgtcgatttgattgctgtaaattgacaaaatgatggcagccactggccttgccctgcaaaattttgatcgcttatgtccgtgacgttgtcaatgctatgttgtgttgacgtgttggtccaaactgtaattatgctactctcgactgatctgatctccgctgcgatgcggttttgagagtggagtcgtacgagagtggatcggcgtttttgtccattgggcttgattggatttatgagataaatagtttgtcggctaa

SEQ ID NO: 202934 - DNA, 2694 bp, Zea Mays
ctccccttcccctgccactctccgcctctggcctagcgcccccgcccgctcgatccgcctagtaggtaacggcgaggctcaccgcgtccgcactcgcccgtgaatccgtgatttctcccaccttcctttcagcgccgctctcccaccttcctttcagcgccgcccgccgtccttttcgatcagtatttaaaaatcaagatggttaacttcgggaagaaattgatggcagatcaaattccagaatggaaaggatattatatcaattacaagttgatgaagaagaaagttaaacagtatggccagcagctccagcagggggaaaaagatcgtcgtcgggttctgaaggatttctcgaagatgcttgatgatcagatagagaagatcgtcctgtttctgttggaacaacaaggactattggcaagcaggattgagaagttaggaaagcaaagggcaatactacaagagcagccagatatatctggcattgctgagttacgagaagcttatagggaagttggtatcaatctcatcaaacttctcaagttcgttgaccttaatgcaactggcattcggaaaatcttgaagaagtttgataagcgttttggctatagatttactgattactatgtgacaagtagatcgaatcacccttactctcagctgcaacaggtctttaagcatgtgggtgtaggagctgttgtaggagctttgtcacgtaaccttgctgaactccaagaacgtcaaggaagctacttatctatttatgatcagccatcttctgctcttaagctgaccgtttttggttttgatcccctgcaggaccccatcattgatatgataaattcttcagttgataagttgacaaggtcaactaattttcttcgctttttggggcaacatgccatgattgtggatgaggagtctcctagcactgcaggagaggaagaaatagaagatcagaaataccatttcatgtcccttatgctgaacctggtgaacacattcctttacatggtcaacacgtacatcattgtgccaactgcagatgactattcagtgagccttggggcagcttctactgtttgtggtgtggtcattggttcaatggctgttgcgcaaatattttcctctatttacttcagtgcatggtccaacaagtcatatttcaaaccgcttgttttcagtagcattgttttgttcttggggaatatatgctatgctatggcatatgatatgaagtctctaacggtccttattatcggccgtttactctgtgggatgggttctgcaagagctgtcaatcgccgatatattagtgattgtgtccctgcaaggatacgcatgcaagcttcggctggatttgttagcgcaagtgcacttggcatggcctgtgggccagcgctagctggtttacttcagtggaaattcaaggtctacatggttacattcaatcaatcgactctaccgggttgggtgatggcagttgcatggctattgtatttgatttggctatggttctcattcaaagaaccgaaccgtgctaccgaggtgaatgaagccccacaaaatcctgcttctggacaaactgttgatattggacgactagagaatggaattgcacagcctctgctcaaggattccgtggataaacaaaatgaagatgaagacgaagttgatgatattgaagaaactgcagatgattctcgcaaacctgcaacatcaattggctcagcataccgattgcttaccccgtcagtgaaggtccagttgttgatatacttcatgctcaaatacgcaatggagattttgctttcggagtcgagtgttatcaccaatcactatttcagttggaatacaagcgcagtggcaatatttctagcaatcctagggttgacagtccttcctgtaaacgctgttgttggaacatacatcagcaatatgtttgaggacaggcaactcctcatggtgtctcaaattacgttgctagtaggcattatcttcagcttcaaagtcacgagcacatactatgtcgtccagtatgttgtctcagcactggtcacatttgtttctgccgaagttcttgaaggcgtcaacctttccctcctatcgagcgtgatgtcgtcccgcctctcccgtggcacgtacaacggtggtctcctctcgacggaggctgggaccctggccagggtggtcgccgactgcaccatcaccgcggcggggtacctgggcgtggggaagctcctcaacgtcaccctgctaccgtcgctggtgatatgtgttgcgtccatcgcctgcaccttcctgacgtacaactcgcttttctgatggagcttcgcgacgtatttgtgtcgtcatgattcgttccaaatcaaggcagctgggagaccgccgttgccattgcccgaaggggctgttgtgttattatattatatatgtgcgtcgatttgattgctgtaaattgacaaaatgatggcagccactggccttgccctgcaaaattttgatcgcttatgtccgtgacgttgtcaatgctatgttgtgttgacgtgttggtccaaactgtaattatgctactctcgactgatctgatctccgctgcgatgcggttttgagagtggagtcgtacgagagtggatcggcgtttttgtccattgggcttgattggatttatgagataaatagtttgtcggctaa

SEQ ID NO: 202935 - DNA, 2567 bp, Zea Mays
ctccccttcccctgccactctccgcctctggcctagcgcccccgcccgctcgatccgcctagtaggtaacggcgaggctcaccgcgtccgcactcgcccgtgaatccgtgatttctcccaccttcctttcagcgccgctctcccaccttcctttcagcgccgcccgccgtccttttcgatcagtatttaaaaatcaagatggttaacttcgggaagaaattgatggcagatcaaattccagaatggaaaggatattatatcaattacaagttgatgaagaagaaagttaaacagtatggccagcagctccagcagggggaaaaagatcgtcgtcgggttctgaaggatttctcgaagatgcttgatgatcagatagagaagatcgtcctgtttctgttggaacaacaaggactattggcaagcaggattgagaagttaggaaagcaaagggcaatactacaagagcagccagatatatctggcattgctgagttacgagaagcttatagggaagttggtatcaatctcatcaaacttctcaagttcgttgaccttaatgcaactggcattcggaaaatcttgaagaagtttgataagcgttttggctatagatttactgattactatgtgacaagtagatcgaatcacccttactctcagctgcaacaggtctttaagcatgtgggtgtaggagctgttgtaggagctttgtcacgtaaccttgctgaactccaagaacgtcaaggaagctacttatctatttatgatcagccatcttctgctcttaaggaccccatcattgatatgataaattcttcagttgataagttgacaaggtcaactaattttcttcgctttttggggcaacatgccatgattgtggatgaggagtctcctagcactgcaggagaggaagaaatagaagatcagaaataccatttcatgtcccttatgctgaacctggtgaacacattcctttacatggtcaacacgtacatcattgtgccaactgcagatgactattcagtgagccttggggcagcttctactgtttgtgtagcattgttttgttcttggggaatatatgctatgctatggcatatgatatgaagtctctaacggtccttattatcggccgtttactctgtgggatgggttctgcaagagctgtcaatcgccgatatattagtgattgtgtccctgcaaggatacgcatgcaagcttcggctggatttgttagcgcaagtgcacttggcatggcctgtgggccagcgctagctggtttacttcagtggaaattcaaggtctacatggttacattcaatcaatcgactctaccgggttgggtgatggcagttgcatggctattgtatttgatttggctatggttctcattcaaagaaccgaaccgtgctaccgaggtgaatgaagccccacaaaatcctgcttctggacaaactgttgatattggacgactagagaatggaattgcacagcctctgctcaaggattccgtggataaacaaaatgaagatgaagacgaagttgatgatattgaagaaactgcagatgattctcgcaaacctgcaacatcaattggctcagcataccgattgcttaccccgtcagtgaaggtccagttgttgatatacttcatgctcaaatacgcaatggagattttgctttcggagtcgagtgttatcaccaatcactatttcagttggaatacaagcgcagtggcaatatttctagcaatcctagggttgacagtccttcctgtaaacgctgttgttggaacatacatcagcaatatgtttgaggacaggcaactcctcatggtgtctcaaattacgttgctagtaggcattatcttcagcttcaaagtcacgagcacatactatgtcgtccagtatgttgtctcagcactggtcacatttgtttctgccgaagttcttgaaggcgtcaacctttccctcctatcgagcgtgatgtcgtcccgcctctcccgtggcacgtacaacggtggtctcctctcgacggaggctgggaccctggccagggtggtcgccgactgcaccatcaccgcggcggggtacctgggcgtggggaagctcctcaacgtcaccctgctaccgtcgctggtgatatgtgttgcgtccatcgcctgcaccttcctgacgtacaactcgcttttctgatggagcttcgcgacgtatttgtgtcgtcatgattcgttccaaatcaaggcagctgggagaccgccgttgccattgcccgaaggggctgttgtgttattatattatatatgtgcgtcgatttgattgctgtaaattgacaaaatgatggcagccactggccttgccctgcaaaattttgatcgcttatgtccgtgacgttgtcaatgctatgttgtgttgacgtgttggtccaaactgtaattatgctactctcgactgatctgatctccgctgcgatgcggttttgagagtggagtcgtacgagagtggatcggcgtttttgtccattgggcttgattggatttatgagataaatagtttgtcggctaa

SEQ ID NO: 202936 - DNA, 2473 bp, Zea Mays
ctccccttcccctgccactctccgcctctggcctagcgcccccgcccgctcgatccgcctagtaggtaacggcgaggctcaccgcgtccgcactcgcccgtgaatccgtgatttctcccaccttcctttcagcgccgctctcccaccttcctttcagcgccgcccgccgtccttttcgatcagtatttaaaaatcaagatggttaacttcgggaagaaattgatggcagatcaaattccagaatggaaaggatattatatcaattacaagttgatgaagaagaaagttaaacagtatggccagcagctccagcagggggaaaaagatcgtcgtcgggttctgaaggatttctcgaagatgcttgatgatcagatagagaagatcgtcctgtttctgttggaacaacaaggactattggcaagcaggattgagaagttaggaaagcaaagggcaatactacaagagcagccagatatatctggcattgctgagttacgagaagcttatagggaagttggtatcaatctcatcaaacttctcaagttcgttgaccttaatgcaactggcattcggaaaatcttgaagaagtttgataagcgttttggctatagatttactgattactatgtgacaagtagatcgaatcacccttactctcagctgcaacaggtctttaagcatgtgggtgtaggagctgttgtaggagctttgtcacgtaaccttgctgaactccaagaacgtcaaggaagctacttatctatttatgatcagccatcttctgctcttaagctgaccgtttttggttttgatcccctgcaggaccccatcattgatatgataaattcttcagttgataagttgacaaggtcaactaattttcttcgctttttggggcaacatgccatgattgtggatgaggagtctcctagcactgcaggagaggaagaaatagaagatcagaaataccatttcatgtcccttatgctgaacctggtgaacacattcctttacatggtcaacacgtacatcattgtgccaactgcagatgactattcagatgggttctgcaagagctgtcaatcgccgatatattagtgattgtgtccctgcaaggatacgcatgcaagcttcggctggatttgttagcgcaagtgcacttggcatggcctgtgggccagcgctagctggtttacttcagtggaaattcaaggtctacatggttacattcaatcaatcgactctaccgggttgggtgatggcagttgcatggctattgtatttgatttggctatggttctcattcaaagaaccgaaccgtgctaccgaggtgaatgaagccccacaaaatcctgcttctggacaaactgttgatattggacgactagagaatggaattgcacagcctctgctcaaggattccgtggataaacaaaatgaagatgaagacgaagttgatgatattgaagaaactgcagatgattctcgcaaacctgcaacatcaattggctcagcataccgattgcttaccccgtcagtgaaggtccagttgttgatatacttcatgctcaaatacgcaatggagattttgctttcggagtcgagtgttatcaccaatcactatttcagttggaatacaagcgcagtggcaatatttctagcaatcctagggttgacagtccttcctgtaaacgctgttgttggaacatacatcagcaatatgtttgaggacaggcaactcctcatggtgtctcaaattacgttgctagtaggcattatcttcagcttcaaagtcacgagcacatactatgtcgtccagtatgttgtctcagcactggtcacatttgtttctgccgaagttcttgaaggcgtcaacctttccctcctatcgagcgtgatgtcgtcccgcctctcccgtggcacgtacaacggtggtctcctctcgacggaggctgggaccctggccagggtggtcgccgactgcaccatcaccgcggcggggtacctgggcgtggggaagctcctcaacgtcaccctgctaccgtcgctggtgatatgtgttgcgtccatcgcctgcaccttcctgacgtacaactcgcttttctgatggagcttcgcgacgtatttgtgtcgtcatgattcgttccaaatcaaggcagctgggagaccgccgttgccattgcccgaaggggctgttgtgttattatattatatatgtgcgtcgatttgattgctgtaaattgacaaaatgatggcagccactggccttgccctgcaaaattttgatcgcttatgtccgtgacgttgtcaatgctatgttgtgttgacgtgttggtccaaactgtaattatgctactctcgactgatctgatctccgctgcgatgcggttttgagagtggagtcgtacgagagtggatcggcgtttttgtccattgggcttgattggatttatgagataaatagtttgtcggctaa

SEQ ID NO: 202937 - DNA, 2659 bp, Zea Mays
ctccccttcccctgccactctccgcctctggcctagcgcccccgcccgctcgatccgcctagtaggtaacggcgaggctcaccgcgtccgcactcgcccgtgaatccgtgatttctcccaccttcctttcagcgccgctctcccaccttcctttcagcgccgcccgccgtccttttcgtatttaaaaatcaagatggttaacttcgggaagaaattgatggcagatcaaattccagaatggaaaggatattatatcaattacaagttgatgaagaagaaagttaaacagtatggccagcagctccagcagggggaaaaagatcgtcgtcgggttctgaaggatttctcgaagatgcttgatgatcagatagagaagatcgtcctgtttctgttggaacaacaaggactattggcaagcaggattgagaagttaggaaagcaaagggcaatactacaagagcagccagatatatctggcattgctgagttacgagaagcttatagggaagttggtatcaatctcatcaaacttctcaagttcgttgaccttaatgcaactggcattcggaaaatcttgaagaagtttgataagcgttttggctatagatttactgattactatgtgacaagtagatcgaatcacccttactctcagctgcaacaggtctttaagcatgtgggtgtaggagctgttgtaggagctttgtcacgtaaccttgctgaactccaagaacgtcaaggaagctacttatctatttatgatcagccatcttctgctcttaaggaccccatcattgatatgataaattcttcagttgataagttgacaaggtcaactaattttcttcgctttttggggcaacatgccatgattgtggatgaggagtctcctagcactgcaggagaggaagaaatagaagatcagaaataccatttcatgtcccttatgctgaacctggtgaacacattcctttacatggtcaacacgtacatcattgtgccaactgcagatgactattcagtgagccttggggcagcttctactgtttgtggtgtggtcattggttcaatggctgttgcgcaaatattttcctctatttacttcagtgcatggtccaacaagtcatatttcaaaccgcttgttttcagtagcattgttttgttcttggggaatatatgctatgctatggcatatgatatgaagtctctaacggtccttattatcggccgtttactctgtgggatgggttctgcaagagctgtcaatcgccgatatattagtgattgtgtccctgcaaggatacgcatgcaagcttcggctggatttgttagcgcaagtgcacttggcatggcctgtgggccagcgctagctggtttacttcagtggaaattcaaggtctacatggttacattcaatcaatcgactctaccgggttgggtgatggcagttgcatggctattgtatttgatttggctatggttctcattcaaagaaccgaaccgtgctaccgaggtgaatgaagccccacaaaatcctgcttctggacaaactgttgatattggacgactagagaatggaattgcacagcctctgctcaaggattccgtggataaacaaaatgaagatgaagacgaagttgatgatattgaagaaactgcagatgattctcgcaaacctgcaacatcaattggctcagcataccgattgcttaccccgtcagtgaaggtccagttgttgatatacttcatgctcaaatacgcaatggagattttgctttcggagtcgagtgttatcaccaatcactatttcagttggaatacaagcgcagtggcaatatttctagcaatcctagggttgacagtccttcctgtaaacgctgttgttggaacatacatcagcaatatgtttgaggacaggcaactcctcatggtgtctcaaattacgttgctagtaggcattatcttcagcttcaaagtcacgagcacatactatgtcgtccagtatgttgtctcagcactggtcacatttgtttctgccgaagttcttgaaggcgtcaacctttccctcctatcgagcgtgatgtcgtcccgcctctcccgtggcacgtacaacggtggtctcctctcgacggaggctgggaccctggccagggtggtcgccgactgcaccatcaccgcggcggggtacctgggcgtggggaagctcctcaacgtcaccctgctaccgtcgctggtgatatgtgttgcgtccatcgcctgcaccttcctgacgtacaactcgcttttctgatggagcttcgcgacgtatttgtgtcgtcatgattcgttccaaatcaaggcagctgggagaccgccgttgccattgcccgaaggggctgttgtgttattatattatatatgtgcgtcgatttgattgctgtaaattgacaaaatgatggcagccactggccttgccctgcaaaattttgatcgcttatgtccgtgacgttgtcaatgctatgttgtgttgacgtgttggtccaaactgtaattatgctactctcgactgatctgatctccgctgcgatgcggttttgagagtggagtcgtacgagagtggatcggcgtttttgtccattgggcttgattggatttatgagataaatagtttgtcggctaa

SEQ ID NO: 202938 - DNA, 1259 bp, Zea Mays
aggctaacctgattctgctccttaggccctagcaacaaatccgtatcccgagtccggcgacggcagtatccgagctcgcactcgcgcacccgtccatcgcatcgcatctgtcctcccatcccctcagcgccaccgcaccgcaatcacacgcgcgccacccgcgatgacgccggcggcggcgatctccggctccagcagccacgtcgtcgtctcctccgcccgcctcaggcagccgttcacgctccctccgcgcaccgcttgcccaatcgccgccgccgcctcgcccgtgacccgccgcggggtcgcggtcgccgccgtgtcgagccccgttgtgtccgccgccgcggggaaggatggttgtctatgttggagatgggaacaacattgtgcactcatggctgctattggctgctgtgcttccttttcactttgtatgtgcttgtcccaagggatttgagcctgacgcaaacacagtggagatcgccaggagtgctggaatcagtaagattgaaataacaaacagtcccagggaagcagttaagggagcagacattgtgtacacagatgtttgggccagtatgggacaaaaggaagaagctgattatagaaaacagaagttccagggattcacggtggatgaggccctgatggagattgctggcccacaggcctaccttatgcactgtttgcctgcagagagaggagtggaggtgactgacggcgccattgaggctcccaactcaatcgtgttcccccaggctgagaacagaatgcacgctcagaacgccatcatgcttcacgtgctcggtgcttaactctcctattgcacaccagtgacacgctcctcttagattattgggcattgctgtcttgctgaagcattgaggctgttttggctttagggcatatatgagagcttagttcagacgaactgtttagtaaggtgataacggttcttcagggtgggaatttgttgtgctgtaaaggtttggtaacctgaataaaaaataaacttatgtgctagtttcattcgcgaatcatgacagctttaacattgaaagacacgtttggccgagaccctggatcagttttgcctggctccatccttccttgcctgcactactgcacctgccttctctttttgccgcatcaggttggagttttggaagggtgtggttggagttcggtgtgtttggttggtagatagaggatgcatcgtatatcctggtggagcggattcatatttcataaaaaaaaaa

SEQ ID NO: 202939 - DNA, 1691 bp, Zea Mays
ttcgtttgcgtcggattgcacccggaatcgttctagctaatcaaagtttatataaattagagaagcaatccggttaggaatcgttccgacccatcaattcgacacaaacgacaaggccttagctggaacgatttcgagtataatccgacacaaaggaagtgaaattccccaatactccatatgcgatgccaacgagaccaaaagtgaaaaattccccactcatgtttgctatatatataaatagcctcctcagtcctcccctcccgtagtcccgtctcctccacctttcactttccagttcaagtcaaaccacgttcctcgcggtcgcggaggctcacgccaagctcgctaaccgctcccctcctccctcactccctcgtctctccctctccccccgaatcctcgacacccaaagcccaaaccctagcacgggcagcggagctgcgtcgggcgaatggacctgcagctgcatgtcttctacagggcgctcgggctctcgttcgtcggcggcctcagcaccgccatcggtgcactgtttgtcgttttgaatcctgcccctaaccttaaagtgctcgggcttctacagggttttgctgctggacttatgctcagcatctcctttctagacctggcacacaatgccctgaattctattggcttcttgaaggggaacctctgggggttcttttcttcggtttcattattaagtttatcccagagccagatttttcgccaccagctgatccaagcgagaaagaggctgatgatggtgtatcaggtaaagatatgatgagaaaacatcgccggcaagtgctattcagtggtattatcactgctgttggaattagcttgcataatcttccagagggaatggctgtatttcttggatctgtcaagggtcttcatgtgggcctgaacttggctgttgctattgccttacataacataccagagggggttgctgtagctcttccaatctattttgctaccaaaagcaaaaaaaaggcattttatacggcagcattctctggtttggctgaaccactaggagtggttgctgtagctttgttgtttccaagcagtttgaatcctgacattcttgaaggcctacttggatctgtgggtggtgtcatggctttcctcactttgcatgaaatgctgcctcttgcatttgactattgtggccagaagcaagctgtcaaagctgtctttgtgggcatggcctgcatgtctgcaagcttgtacttcttggaagtcagcttaccaaaggagataagcttgtagcatcgcgctgcaggtactgggaggccatagcctgtcagtagatcctgaattctaggaggaggaacagcacaataaaaccatgaacagtgactactggtgtgccgccattgatattgtccatcttaccgtgaaaggagggagaaactgcatttccccagaatgtattccccagattcctcgtgggaccatatgaaagaattgaaaaatgtactgtagtactctgtcgtccggcaatggaagcttcgaagtcgtcaactaaactatttctagcactctcgtcggttgacaatggaagattctatgtaaaaacccatcagatagatgttaacctttaatctttaatttcttaaaagtacattgaaataagatactttgctttcaaacaccccctatatttagtttgaacc

SEQ ID NO: 202940 - DNA, 2091 bp, Zea Mays
ggagtactggttaaacgggtccaaatctcggacccgcaaacggacctcacccacccgttcctccatctccgccccttgccggcgatggcaccggcgccggcagcggcctcggcggggcggaagtctcatgtcaccgttctcctcctctacgtagtgtgcggcttgatcctgctgcttctcctcgcctcctactcgccccgcctccagccccacgcccacggccgcagcctccaccgccgcctcaagctccacccaaagagctccttaccatccgacgcttcctccggtgggaacggggggcaacagaagacgcagcaccaaaaccaccatgcggcctccttcgacccgaccatcgccgagctggagcgtcggctggacgacaaggagtgggagcgcgagcactacagcctcctccacggcggcgagccggatgaccatatgaaggagtgggaggagttcctcaaggaggaggaggacttcatcaacgacgacgaccgattcaacatcgccgaccgtatccgcgcgctcttccccaagatcgacgtcgccccgcaggacggattcgtctccctcgacgagctcaccgcctggaacctccagcaggccagggctgaccagcaccaccgctccgccagggagatggagctctacaacaagaacggcgatgagatagtctcattcgaagccttcaatgctctgcgccaagaatcccatggagagggcaatatgcttgggttcgaatggtggaaggaggatcatttcaatgcgtcagatgcaaacgctgatggtttccttgataaaactgagttcaatgatttccttaatccaagtgattcggataatcccaaaatcatcaatttgctctgcaaacaagaaataagataggctagcgcagtggtgaggaaccttcccactgagccaaaggtcctaggttcaatgcagtctctctgcaaaaatacaagggcagagggataaagatggtgatggaaagttaaactttgaagaatactttactgggctacatgaccatatacatggttatgatgacgagaatgcagatatttcccaaattgggaacataacagttgcgaaggatcggtttttcaaacttgacaaagataatgatgggtttatttcggagcatgaactagagcctgttcttgataagctctatctttctgaacgctattattctagacagcaagccatccatgctatttcagaggcagacaaagatcatgatgggaggctgactttggaagagatggttgagaacccctatgcattttatggcagtgtttatctcagcagcagcgacaacgacgacgaagactacttccacgacgaatttcgctgagaccaatattgttactatcctgacacacgcaaggaacacagctgacgagcatcaaggtgcgcacagaggttcggaacgtctagcatactatgtgtgatgcccgggctgggctgctgacagaatgggagagcttagagttacggccatggagtgaggaactagtttttagccgcttggttcttcaagttgtttgtgttaaatggaacgacgacagcatcctagtaccggccaggcccagcagtgatggatgttacgcggcaagttgagccacctttatctaggctgagctgcattggtctccatcctgatgttcctgcagcaggggaaatgtagttcaggagaacaatgagtggaggagcgtcatctctgtggcgagcggcttcagaaatctaacgggaacgtgttgtttggtgtccgaaatgtatgtgtgtgtgtgtatgctatgaattcaattatttctggcagaatgtcgcagtctagcgagctggcccatcccattgagaaacattccatcggctgcatgagtgcgccatggacgggagatggatgtgccgaattattggagggaaagggttcactttattcgtgcctagtcatcagtgtcatcagtacggaggttacagcgtatccacgtggtctgccacgtcatgtgaatcccagccgtggcgcaggtacattctcgctgggtcttgaactggtaataaaagatatttggctctcgatttaaatttttc

SEQ ID NO: 202941 - DNA, 888 bp, Zea Mays
gtgggatttgggcccatcgcaggcagacaaagatcatgatgggaggctgactttggaagagatggttgagaacccctatgcattttatggcagtgtttatctcagcagcagcgacaacgacgacgaagactacttccacgacgaatttcgctgagaccaatattgttactatcctgacacacgcaaggaacacagctgacgagcatcaaggtgcgcacagaggttcggaacgtctagcatactatgtgtgatgcccgggctgggctgctgacagaatgggagagcttagagttacggccatggagtgaggaactagtttttagccgcttggttcttcaagttgtttgtgttaaatggaacgacgacagcatcctagtaccggccaggcccagcagtgatggatgttacgcggcaagttgagccacctttatctaggctgagctgcattggtctccatcctgatgttcctgcagcaggggaaatgtagttcaggagaacaatgagtggaggagcgtcatctctgtggcgagcggcttcagaaatctaacgggaacgtgttgtttggtgtccgaaatgtatgtgtgtgtgtgtatgctatgaattcaattatttctggcagaatgtcgcagtctagcgagctggcccatcccattgagaaacattccatcggctgcatgagtgcgccatggacgggagatggatgtgccgaattattggagggaaagggttcactttattcgtgcctagtcatcagtgtcatcagtacggaggttacagcgtatccacgtggtctgccacgtcatgtgaatcccagccgtggcgcaggtacattctcgctgggtcttgaactggtaataaaagatatttggctctcgatttaaatttttc

SEQ ID NO: 202942 - DNA, 2984 bp, Zea Mays
atgcccccgcttcccctccgcgctcgcactggccctgttcccctcgcccgcacaaaccgtcccatccgcgagccgtgcatgggacatctgcataccgcatccgccccatcccctccccgtccagcgtcccctcccttcgcccctgctccctccatagtcgtccaggacaccgctgctttcttcgacgagcagcatgcagccggcgcttccctgtcgaaattcgagcagcaactcagccgcgacggctcggtcgccgcgtcaacctcccgcgcccgatcccgtgagaagcgcagggacggcaagccgccggagcgcttcaggcgcaggcgggagccagagctccaaaaattatgggacgataatcaggttctgaaaagggtttctgaaaggaacactgggactgcttttgttctccacgatggccctccctatgctaatggtgatcttcacatgggccatgcgctcaataaaatcttcaaggattgtataaatcgctacaaggtattaactgccattcatatgactattgctgttgatgctgaagaaaaagcggcagcgctcggcgagcgccgcgacatcgccggtgcgctcggtggccaggagcatgacggcgccgtgcagcgcctcgagctccgcgcggatcgccttgtggaagtaaaggaatatcagcacgggcgtctcagtcgccgaggtccccgccggcgtcgggacggggaccgcagcatcaccgccacgagcgtcccctcgcttctgggcatgggcgtcggcgtcgccatcccactgcgccgacggctgtttattgaagagatagaattaggagttctaacttcctacttatggatagctgatgtcacatttcatagaattgtcccggtgaactataggaaccttgcttttgtacatgtcctgctcggtgctgttccattccctagcgatgttctccggctaaagacgcttggagtttgtggtgtggtgacacttaatgaatcatacgagaggcttgttcccacatccctatacgagattagttttgcacaggcactcgtttgtggtatgctggttctactccctggatatgagcccttgggcctccagttcgggcaacaagcatatggcaaagagaactgtgatgatgtgtagaggcaaaggatccttcagagttcatcactcatcgagccaaagattttgtgtcaagcatgaaggacattgaaacccggtttatgtgtatagttgaagcaggaaataaggtttctagaatgcttgaaaccaagaagatcttgcttgacatatgtgctaaaataccaggtcactgcattgctgatagtgaggagcagaaagttcatgttattgctgcttcacaacacaaccacggtgtcgtgtggtcgtcttatgcaagaaaggccagggccactgcgcgcttcaccagagagagcaaggctacaaccaagaggtgtgctggaattatacatctccaaaagctagctagaagaccttggtgggtggtgagcttggaggaggagctcatggctgcttcttcctgcatagcttgcaataatggcagtaccgatgagaaggaggagaagcggaagtgtgatctcgtcgggtacgaagcactgcctgagtggctcaaggacaacgagttcatccatggctactaccggtgcgagtggccgatgaaggagaccgtcctcagcatcttctccatccacaacgagaccctcaatgtttggtcgcatttgctagggttcctgctgttcctgtgcctggcaatctttacagcaatggtgatcccaaggaatggcagcagcaggagcagtaacagcgctgcataccagctgggagatctggtggagatggccaacatgacggtagcgctgaggcacgaggcacttgcagcgtgtttcctgctgccaccatctgctgctgctttgtctgaagatggtcagcagcagatcccaaccagctgtccacccaacacttcctcctcccatcatcatgccatccagatccagcactggtacggcggccaccgtggacgccggcaccgccgccgaccccatcacgcggtggccgctgttcgcgtacctggtcggcgcgatggtgtgcctgctgacgagcagcgtgtgtcacctgatcctgtgccactcggagcgcacggcgtacgtgacgctccggctcgactacgccggcatcgccgcgctgatcgtcacctctttctacccgctcgcctactactccttcctctgcaacccggcgctgcagcggctctacatgggctccatcacggcgctgggcgccgccgccgtgacggcgtcgctggtccccgcgttccaggcgcctgagctgcgcccgctccgcgccgcgctcttctcctgcatgggcgcgtcgggcgccgtgcccatcgcgcacaagctgctcctctacggcggcacggcgcccggcgccgtagcctcggcggggtacgaggcgctcatgggcgtgctctacggcctcggcgtcgccgtgtacgccgcgcgcgtccccgagcggtgggcgcccgggaggttcgacctagtcggacatagccaccagctgttccacctcttcgtcatcgccggcgcgtacgcgcactaccacgccggagtcgagtacctcaagtggagggacgtcgacaaatgctgactggactggttgctcacggcgtaagcaatgcttgtgctgcggccttgcttgagaagagatcttgtgaaactttcaaagaatggcaggtgggtccgaccgatatatacctggtcggtggcaaagttcatggagaggtttggtgagaggattatgatgtgtacctaattagtagtagcagtagtagtagacaatacatcgaggttactttttgtgcactgattgacatgaatgggtgtaaacaaattattattgtatctcatatttaagtattattacgtggctgaacaccacacgacaatgttcagcctcagacttcaagtcat

SEQ ID NO: 202943 - DNA, 281 bp, Zea Mays
cgaacaacaacctattagagggctctcttctgaagcagctagcaaacaagagtatcagtggtggtgtagctgttgttctagctgaaacgaacaagtaagagatggagatggacatagcaaagctagaagttggcttcatgggaacatctgtaatatgtaggagtgacgctcctctaattctagcagacttgaggaaggtttctgtttcgaaagcacgggccattattgtgttaacatctgataaaaatgcagaccaagttagtatttttgttctacacaca

SEQ ID NO: 202944 - DNA, 1516 bp, Zea Mays
gtggctaactctggcagtggaactgtcatgggcaatatcttcgaaacctacttatatgtttgctaaattgaaattaattaatagcaacaatttgatagctgggctgtcggcccaacctgacctaaattcctaagctaataagcccagtatgacaatcccagcccgtcccgcggcatcccaaaggtccaaatcattctccgaggagctgcggcgctgcggcgacggcggcagcgacggcgatgcggttgccatctgccgcctcggcgtcccgccttccctcttcccttttcttacaaccccgcgcaaggacaagatgcgtcccatcctcctccctcgcctgtcgggcatcttcttcatcagccgcgggcgctggtgacggcggctcgcggaagccgtggctcttcgtagggctgggtaaccccggaaaggtgtaccagggaactcgccacaacgttggattcgagatgatcgatgttatagcagaagctgagggtatatctctgagcagtatgcagttcaaggcaatggttggaaaaggccgcattggtgatgcatctattatgcttgccaagccacaaacctttatgaatgcaagcggtcgggcagctggtttcatatttcaagataccacttagtcaagtcgttgtgatgtatgatgatctggatttaccctttgcaaaactgcgtctgctgccaaagggtggccatggtgggcataatgggagaacatgatgagttagctgatttagcttcagtccgacagggccccgaagaattggatgagaagcatcgtcaaccatttgaaacagagccgtgattttccacgcctaagaattggcattggacgaccgcccgggaagatggatcctgccaatttcgttctccggccttttaacaagaaagagcagcaagagcttgattttgcgttgcataggggcttggaggcggtgcggataatggtgccggaaggattcaacaagagcgcgacttacgtgaacactgcacaatcatctgaaatgctgaataggtgatgggccaataaactgccatatgcgatttaaatcccataccaaagggatttaatcgaggaagcagtcgcagcttcgcttgatgcatcgtttgttcggtggccatcccccctctcctggcaagaaagttctgacagctgaattacttgttagatcatactgtatgatctgagcaacttagggggtgtttggtttgagaaatcattccatctaagatgagatggtgcatcacgaatcaattcctcaaatttggtggaatgacctcattcctcatgttattactaactaattaactataaagaatgaggtggtgattgatcaactcattccattatacaaactaaacaaaaaagtgaggaataagtgatggtggactagtttattcctcaaaacaaacatcctattaaatactgacaccattctacgcaccccacaccttaaaaatccggcacgctgcttagtgccttagtttcagcttccacgtactt

SEQ ID NO: 202945 - DNA, 1375 bp, Zea Mays
gtggctaactctggcagtggaactgtcatgggcaatatcttcgaaacctacttatatgtttgctaaattgaaattaattaatagcaacaatttgatagctgggctgtcggcccaacctgacctaaattcctaagctaataagcccagtatgacaatcccagcccgtcccgcggcatcccaaaggtccaaatcattctccgaggagctgcggcgctgcggcgacggcggcagcgacggcgatgcggttgccatctgccgcctcggcgtcccgccttccctcttcccttttcttacaaccccgcgcaaggacaagatgcgtcccatcctcctccctcgcctgtcgggcatcttcttcatcagccgcgggcgctggtgacggcggctcgcggaagccgtggctcttcgtagggctgggtaaccccggaaaggtgtaccagggaactcgccacaacgccgcattggtgatgcatctattatgcttgccaagccacaaacctttatgaatgcaagcggtcgggcagctggtttcatatttcaagataccacttagtcaagtcgttgtgatgtatgatgatctggatttaccctttgcaaaactgcgtctgctgccaaagggtggccatggtgggcataatgggatgagaagcatcgtcaaccatttgaaacagagccgtgattttccacgcctaagaattggcattggacgaccgcccgggaagatggatcctgccaatttcgttctccggccttttaacaagaaagagcagcaagagcttgattttgcgttgcataggggcttggaggcggtgcggataatggtgccggaaggattcaacaagagcgcgacttacgtgaacactgcacaatcatctgaaatgctgaataggtgatgggccaataaactgccatatgcgatttaaatcccataccaaagggatttaatcgaggaagcagtcgcagcttcgcttgatgcatcgtttgttcggtggccatcccccctctcctggcaagaaagttctgacagctgaattacttgttagatcatactgtatgatctgagcaacttagggggtgtttggtttgagaaatcattccatctaagatgagatggtgcatcacgaatcaattcctcaaatttggtggaatgacctcattcctcatgttattactaactaattaactataaagaatgaggtggtgattgatcaactcattccattatacaaactaaacaaaaaagtgaggaataagtgatggtggactagtttattcctcaaaacaaacatcctattaaatactgacaccattctacgcaccccacaccttaaaaatccggcacgctgcttagtgccttagtttcagcttccacgtactt

SEQ ID NO: 202946 - DNA, 2130 bp, Zea Mays
gacgtttttgccgcagcgcaggagagagagacgagacatcaccgcacggacagccacgtcgtgcctccgtgcacgcacacggtatacgacagcgccatcactccataaaaggatccggggcagcgccaccgccggatccgacggcctccgaggcggggccgaaccgccgaagtagccaagacaacacgagcagcgaaacgccatctattcccgactctgctgcacctgcacctccgggccgccgccgagatgggcgcggatggcgggctgaaccgggcggcggagaagcccagggatggagagggcggggaggcgagggtgttccggtgcacggactactcgctgccgcggacgacgctggcgctggcgctctggctgggcggtatccacttcaacgtccttctcgtccttgcgtcgctcttcctcctctccggccgcgccgctgccatacccgtttattgatgcagagtcgtggcgttccagctcttgttcatgttcgcgcccgtcaacgacagggacaaatggggccagagcgtcgccaggttcatatgcagacacgcaatgggctacttccctatcactctgcatgtggaggactacaagtccttggatcccagcagggcttacggtatgctcccgaaaacctgcttctccattcatggatgctgcagtcatcgtatccattatccaatccataagtgcccacgggagtcgagaaagtatcaacttcagttgctgagtgttaagggaagggaatcttttatttgcagagttggtgtggtgatagtgatggtagtgttgtgcatttgcagtgttcggttatgagccgcactcagtgctgccgataggtctgtcggctcttgctgatcttgttggctttctgcctctcactaagatcaaggtccttgcgagcagtgcggtaagtcagctaaatgccttgacgccaaatgccacaggattcagggactcccctcatgatggttaatttcgagttggggccaggtgttctacaccccgttcttgagacagatttggacatggcttggcttggtacctgcgacaaggaagaatttctactgctaccttggagctggttatagttgtatcgtagtccctggtggtgtacgggaaatgcttcatatgaacaatgattcagaggttgcttttcttaaatcaagaaaaggttttgtcaagatagctatacagtctggatgtcctttagtcccagttttctgctttgggcagagctatgcatacaagtggtggaggcctggtggtaaattgtttatcaagatcgctagagcagttaaatttactcctattatcttctggggtagatttgggtaacttcatggctcttagcattctgttcttttccttccagacttatgttctatactttttttgaaacattgttctctggtattagataatttttcatggtctactgacatttgaatgcagcacaccattccccttcccaaaacccatgcatgtggtcgtgggtaaacctattgaagtcaataagattccccatcctacaattgacgagattaatgaagtccatgaacagttcatcattgccatgcgggacctctttgagaagtacaaggcgaaagctggatatcctggccttcatctaagagtcctatgacattccacaaccagactcaaagttagaattcagcaataacatggctctattactcttccctcaactggggtgtcaaactgcacctcgcaggcactcgggcggtagttgttgcattatggtgatgataataaggctccagcaccgatgccaaaacatgcacgagttggtcacgagtcagagccttttgttgctggcttaacttttttctttaatgttgcaaagataagataatgtaattactggttatgtgatgttgcatatgatatgagaatatgaggattggtgatatataagctcctgtacatgcagctgtatcatcagtgtctgaatcaccaggaggttgctgatattgactgctgcctgtggacctgcagctgtgtcattgtctgaagaactttcagatatatcatatccccaagaagcccatttggtttattattttttgttcgtttcttctgggcttattgttatcgttt

SEQ ID NO: 202947 - DNA, 3780 bp, Zea Mays
catcaagatcgcaagtccagatcgaaatttctctcttcaccaaacacacgctctctctccccttcccatctccttcctcccgccccagatccgagcccggcgcccgagttcatggcgagcgacagcgacgtcgacgaggacgagctcctgcagattgcgctgcaggagcaggcggcgcgggacctcagccaccagcgcccgcccgccgccaacaagcccgttgtcaacctcgtccgcccacccgcccccaatgctcgcggcggcaacgccagggccgggggcgccgcagcgaaggcgcgccagcccagccgcggcggcgacgaggacgacgactcggaggtcgagctgctctccatctcctccggcgacgaggacgacaatccccgcgcccgcggcccgccgccgccccgcgggggcgggggtggacgcgccggagcgcggagggccgcgtcacgggacgatggggacttcgacgatgaggagcccagaagctggaagcgcgtcgacgaggcagagcttgctcgcagggttcgagaaatgcgtgaagcaaaggtggctcctaacattcaagaacttgatcagaaagcagcagctgctgctgcagctgctgctcgaaaggccctcacgagtgtacagactttaccaaaaggagttgaggttttagatcctttgggccttggtgtcattgataataaatccctgcggttgatcactgacgcttcagtaagttctccaatttcaagggagaagtctcaaggtttggaccccaatatgcgagacacgagcgctgctgacttagaggctggtgctctcaccttgaaaactgatctcaaagggagaacacagcagaaaaaacagttagtcaaggagaacttcgattgttttgtctcgtgcaaaactacaatagatgacattgagtcgaaattgagacagatagaggaagatcctgaaggtgcaggtactgctcacttgtattcagtgacacaaaaaattagcggtgtggcaaatcgtgcatttgagcctctatttgagaggcaggcccaagctgaaaagatcagatctgttcagggaatgcttcaaagattccgaacactatttaacctaccaagtgcaatccgtgggaacattagaaaaggagaatatgatcttgctgtcagagagtaccaaaaagcaaagtcaattgttcttccttctcatgtggggatactaaaacgtgtactcgaagaggtcgaaaaggtgatgcaagaattcaggggcatgctttataagtccatggaggatcctcatcttgatcttgctgagattgagaacattgttcgtctattgttggagttggaacctgaaacagatccagtgtggcattatttaaatattcagaatagcaggattcatggattgtttgaaaagtgtactcaagatcatgactcgagaatggaagttttgcaaaataaaattcgcgaaaaagtgctctctgattcgaagtggaggcagctgcaacaagattcaaataaatctctggaagttgattctaccattggtgattctcctcgagttgatcagttgtcaacaaactttatggctgaggaagctgatagtttaagggccacctacattcgtaggctaacttctgtactgatccagcatgttccagctttctggagattagctttatctgttttcagtggaaaatttgccaaggcagcttctggtaacgtagtttctgattttgatgtgaatgcaaagccgactgcaaataagaatgatgaaaaaggtggagaagtaaagtacacaaaccacactcttgatgaagttggtagtatggttcaggctactatatcggcttttgacactaaggttcagagtaccttccgtgattttgaggaatgcaacattctttgtccatacatgagtgacactataaaagaaatagctaaggcctgtcagactcttgaagggaaggattcgtctccaactgctgtaaaaatgttgcgcacacttcattttgaaatgacaaagctttacattctacggctttgttcatggatgcgggcaacaacaaaggagatatcaaaagatgagacttgggttactttatccacccttgagagaaacaagtcccagtatgcgatttcatgcttgcccctggagttccgtgacataacagtttcagctatggaccgaattgatactatgattcttaatctgatgagcgagactgcgaagtcatatgacatttctcaaccacttcaggaaatcaatgagtctgttagacttgcatttttgaattcctttctggactttgctggttatctggagaggtttggaggtgaactaaccgagaacagaccaaacaaagaaaacaattatgtctcaaatggatacataaatggtactagagaaacatttgttaacacagatggagatttgcacaaaaagctgctggttgttttgagtaacattgggtattgtaaagctgaactttcagaagaactttacagcaaatatagacacatttggtctccagtcaggaataatgaggagcgaagttctgacatgcgagacctgaggacttctttctctgcacttgaagagaaagtcctggaccaatatacttttgcaaagtcaaacttgatcagaagtgctgcacaaagttatcttttggattctgggatttattggggagcagcgccaatggtaaagggcattcgagatgcaactcttgacttactgcacatccttgtagcagtacatgcagaggtatactctggcgctcggcctctgttggagaagacaatgaaaattttggttgagggtttggtcgacatctttcttagtgtttttcatgagaataagaccaaagatattagattgttggatgcgaatggtttttgtcaactgatgcttgagcttgagtattttgagactgtactgcacacgtacttctcacctgaggcgcaacaggctatgaaatctttacaagagaatttgttggaaaaggcctgtgaaagtgttgcagaagccatggaaaatcctggacaccaacgtcgaccaacccgtggcagtgaagatacagcatcggatgacagacagccatcagtatcacctgatgatttgcttgtgcttgctcagcagtgcagtagtgatctgctgcaaggggagttggagaggactcgattgaacatagcctgtttcatggagtcgacccttcaaccaacagctgcgccagcaggcccaaagcctgccgcacattcttcttaccaagcacagcatgctcccgtccaaacgtcctcgcctagttttagaaggcagcagactggtacaagttcccctgtagtctccaggcggcgccggtgagcttagtgcatctttccatcattggcgtagcctcttcccggagtttccttccttttcccccctcacatgtgtgctttttttaatcacttgtaattgtcatcctgttgtcatgtgttacgaatttcgatccattcttttggtgttgtataagatgaaaaggaggagtacagtactggtgctgctgcacgggatcatggaattgtataatatcgacgagtcaaatattattgctgcttgaagataccaccacagctttatgtatatggaattctggagttgtcggtctgcgccaacttccttcctgcggtcgtcaccgcatgtttgtacattcgtcgcttggacagttttatgtatcccgagatttgttaatattgtatcagttggttcgtgattgttgatatgtctgcatgctttgtgctgtggagg

SEQ ID NO: 202948 - DNA, 3828 bp, Zea Mays
caagtccagatcgaaatttctctcttcaccaaacacacgctctctctccccttcccatctccttcctcccgccccagatccgagcccggcgcccgagttcatggcgagcgacagcgacgtcgacgaggacgagctcctgcagattgcgctgcaggagcaggcggcgcgggacctcagccaccagcgcccgcccgccgccaacaagcccgttgtcaacctcgtccgcccacccgcccccaatgctcgcggcggcaacgccagggccgggggcgccgcagcgaaggcgcgccagcccagccgcggcggcgacgaggacgacgactcggaggtcgagctgctctccatctcctccggcgacgaggacgacaatccccgcgcccgcggcccgccgccgccccgcgggggcgggggtggacgcgccggagcgcggagggccgcgtcacgggacgatggggacttcgacgatgaggagcccagaagctggaagcgcgtcgacgaggcagagcttgctcgcagggttcgagaaatgcgtgaagcaaaggtggctcctaacattcaagaacttgatcagaaagcagcagctgctgctgcagctgctgctcgaaaggccctcacgagtgtacagactttaccaaaaggagttgaggttttagatcctttgggccttggtgtcattgataataaatccctgcggttgatcactgacgcttcagtaagttctccaatttcaagggagaagtctcaaggtttggaccccaatatgcgagacaaagttatctattcatctccaaattttgatcccaaagttttcctttcgtgggtccacaaagacacgagcgctgctgacttagaggctggtgctctcaccttgaaaactgatctcaaagggagaacacagcagaaaaaacagttagtcaaggagaacttcgattgttttgtctcgtgcaaaactacaatagatgacattgagtcgaaattgagacagatagaggaagatcctgaaggtgcaggtactgctcacttgtattcagtgacacaaaaaattagcggtgtggcaaatcgtgcatttgagcctctatttgagaggcccaagctgaaaagatcagatctgttcagggaatgcttcaaagattccgaacactatttaacctaccaagtgcaatccgtgggaacattagaaaaggagaatatgatcttgctgtcagagagtaccaaaaagcaaagtcaattgttcttccttctcatgtggggatactaaaacgtgtactcgaagaggtcgaaaaggtgatgcaagaattcaggggcatgctttataagtccatggaggatcctcatcttgatcttgctgagattgagaacattgttcgtctattgttggagttggaacctgaaacagatccagtgtggcattatttaaatattcagaatagcaggattcatggattgtttgaaaagtgtactcaagatcatgactcgagaatggaagttttgcaaaataaaattcgcgaaaaagtgctctctgattcgaagtggaggcagctgcaacaagattcaaataaatctctggaagttgattctaccattggtgattctcctcgagttgatcagttgtcaacaaactttatggctgaggaagctgatagtttaagggccacctacattcgtaggctaacttctgtactgatccagcatgttccagctttctggagattagctttatctgttttcagtggaaaatttgccaaggcagcttctggtaacgtagtttctgattttgatgtgaatgcaaagccgactgcaaataagaatgatgaaaaaggtggagaagtaaagtacacaaaccacactcttgatgaagttggtagtatggttcaggctactatatcggcttttgacactaaggttcagagtaccttccgtgattttgaggaatgcaacattctttgtccatacatgagtgacactataaaagaaatagctaaggcctgtcagactcttgaagggaaggattcgtctccaactgctgtaaaaatgttgcgcacacttcattttgaaatgacaaagctttacattctacggctttgttcatggatgcgggcaacaacaaaggagatatcaaaagatgagacttgggttactttatccacccttgagagaaacaagtcccagtatgcgatttcatgcttgcccctggagttccgtgacataacagtttcagctatggaccgaattgatactatgattcttaatctgatgagcgagactgcgaagtcatatgacatttctcaaccacttcaggaaatcaatgagtctgttagacttgcatttttgaattcctttctggactttgctggttatctggagaggtttggaggtgaactaaccgagaacagaccaaacaaagaaaacaattatgtctcaaatggatacataaatggtactagagaaacatttgttaacacagatggagatttgcacaaaaagctgctggttgttttgagtaacattgggtattgtaaagctgaactttcagaagaactttacagcaaatatagacacatttggtctccagtcaggaataatgaggagcgaagttctgacatgcgagacctgaggacttctttctctgcacttgaagagaaagtcctggaccaatatacttttgcaaagtcaaacttgatcagaagtgctgcacaaagttatcttttggattctgggatttattggggagcagcgccaatggtaaagggcattcgagatgcaactcttgacttactgcacatccttgtagcagtacatgcagaggtatactctggcgctcggcctctgttggagaagacaatgaaaattttggttgagggtttggtcgacatctttcttagtgtttttcatgagaataagaccaaagatattagattgttggatgcgaatggtttttgtcaactgatgcttgagcttgagtattttgagactgtactgcacacgtacttctcacctgaggcgcaacaggctatgaaatctttacaagagaatttgttggaaaaggcctgtgaaagtgttgcagaagccatggaaaatcctggacaccaacgtcgaccaacccgtggcagtgaagatacagcatcggatgacagacagccatcagtatcacctgatgatttgcttgtgcttgctcagcagtgcagtagtgatctgctgcaaggggagttggagaggactcgattgaacatagcctgtttcatggagtcgacccttcaaccaacagctgcgccagcaggcccaaagcctgccgcacattcttcttaccaagcacagcatgctcccgtccaaacgtcctcgcctagttttagaaggcagcagactggtacaagttcccctgtagtctccaggcggcgccggtgagcttagtgcatctttccatcattggcgtagcctcttcccggagtttccttccttttcccccctcacatgtgtgctttttttaatcacttgtaattgtcatcctgttgtcatgtgttacgaatttcgatccattcttttggtgttgtataagatgaaaaggaggagtacagtactggtgctgctgcacgggatcatggaattgtataatatcgacgagtcaaatattattgctgcttgaagataccaccacagctttatgtatatggaattctggagttgtcggtctgcgccaacttccttcctgcggtcgtcaccgcatgtttgtacattcgtcgcttggacagttttatgtatcccgagatttgttaatattgtatcagttggttcgtgattgttgatatgtctgcatgctttgtgctgtggagg

SEQ ID NO: 202949 - DNA, 4563 bp, Zea Mays
tcttcaccaaacacacgctctctctccccttcccatctccttcctcccgccccagatccgagcccggcgcccgagttcatggcgagcgacagcgacgtcgacgaggacgagctcctgcagattgcgctgcaggagcaggcggcgcgggacctcagccaccagcgcccgcccgccgccaacaagcccgttgtcaacctcgtccgcccacccgcccccaatgctcgcggcggcaacgccagggccgggggcgccgcagcgaaggcgcgccagcccagccgcggcggcgacgaggacgacgactcggaggtcgagctgctctccatctcctccggcgacgaggacgacaatccccgcgcccgcggcccgccgccgccccgcgggggcgggggtggacgcgccggagcgcggagggccgcgtcacgggacgatggggacttcgacgatgaggagcccagaagctggaagcgcgtcgacgaggcagagcttgctcgcagggttcgagaaatgcgtgaagcaaaggtggctcctaacattcaagaacttgatcagaaagcagcagctgctgctgcagctgctgctcgaaaggccctcacgagtgtacagactttaccaaaaggagttgaggttttagatcctttgggccttggtgtcattgataataaatccctgcggttgatcactgacgcttcagtaagttctccaatttcaagggagaagtctcaaggtttggaccccaatatgcgagacacgagcgctgctgacttagaggctggtgctctcaccttgaaaactgatctcaaagggagaacacagcagaaaaaacagttagtcaaggagaacttcgattgttttgtctcgtgcaaaactacaatagatgacattgagtcgaaattgagacagatagaggaagatcctgaaggtgcaggtactgctcacttgtattcagtgacacaaaaaattagcggtgtggcaaatcgtgcatttgagcctctatttgagaggcaggcccaagctgaaaagatcagatctgttcagggaatgcttcaaagattccgaacactatttaacctaccaagtgcaatccgtgggaacattagaaaaggagaatatgatcttgctgtcagagagtaccaaaaagcaaagtcaattgttcttccttctcatgtggggatactaaaacgtgtactcgaagaggtcgaaaaggtgatgcaagaattcaggggcatgctttataagtccatggaggatcctcatcttgatcttgctgagattgagaacattgttcgtctattgttggagttggaacctgaaacagatccagtgtggcattatttaaatattcagaatagcaggattcatggattgtttgaaaagtgtactcaagatcatgactcgagaatggaagttttgcaaaataaaattcgcgaaaaagtgctctctgattcgaagtggaggcagctgcaacaagattcaaataaatctctggaagttgattctaccattggtgattctcctcgagttgatcagttgtcaacaaactttatggctgaggaagctgatagtttaagggccacctacattcgtaggctaacttctgtactgatccagcatgttccagctttctggagattagctttatctgttttcagtggaaaatttgccaaggcagcttctggtaacgtagtttctgattttgatgtgaatgcaaagccgactgcaaataagaatgatgaaaaaggtggagaagtaaagtacacaaaccacactcttgatgaagttggtagtatggttcaggctactatatcggcttttgacactaaggttcagagtaccttccgtgattttgaggaatgcaacattctttgtccatacatgagtgacactataaaagaaatagctaaggcctgtcagactcttgaagggaaggattcgtctccaactgctgtaaaaatgttgcgcacacttcattttgaaatgacaaagctttacattctacggctttgttcatggatgcgggcaacaacaaaggagatatcaaaagatgagacttgggttactttatccacccttgagagaaacaagtcccagtatgcgatttcatgcttgcccctggagttccgtgacataacagtttcagctatggaccgaattgatacgtaagactgctctatttctatgtagtattgcatctttttgcagtttcttatgctgcattatttccaaagccctgtgaaagttgttttgttgcattgttgctttgcaattggccgtcttttttaatatctactccctatattccaaattgcaagatgttttgacttctcgaaattcgtagctttgactatgcacttagatatacaccacgtcaagagtaatcagtaatgtatctaaaaaaccaaaaatgccttttaatttgtaagctggaacagaaggagtgtttgctaatagataactatttcttttgttgcacttaagcagtattcctttttggcagtaagtatagttgttagtgtcaggattcagaaaggaatttgtcatactgtgttttataattttattgctacatcagtcttgctttaattgttattgtaatgattacacgtaagcttttgctattaataaccttttaggtttctggttatcctgtcttacctagaaatgaatccttttatctgagcaatgccatcaatatcaaatcgtctaatcgttcctagtcgccatggcaccaatcagtctgacttatcatgattagttgtgattaatcaccactgatcgtgactaattgtagtgcatagctgatcgctatggcaccgatcagcctaattaatcgcgatcattgcatctgagtttcaaggtttgtgtctctcttgtctcttgctctgcaaaatctgaaatttttcttgagcacaaccttctaaagtgacgacacaccagtctccaggctctatgttcagtatattctgagttctctccccccttctccccacgctgcaaaatttggggatggcaagtactttcctgccttcattttaggaaatcaatgagtctgttagacttgcatttttgaattcctttctggactttgctggttatctggagaggtttggaggtgaactaaccgagaacagaccaaacaaagaaaacaattatgtctcaaatggatacataaatggtactagagaaacatttgttaacacagatggagatttgcacaaaaagctgctggttgttttgagtaacattgggtattgtaaagctgaactttcagaagaactttacagcaaatatagacacatttggtctccagtcaggaataatgaggagcgaagttctgacatgcgagacctgaggacttctttctctgcacttgaagagaaagtcctggaccaatatacttttgcaaagtcaaacttgatcagaagtgctgcacaaagttatcttttggattctgggatttattggggagcagcgccaatggtaaagggcattcgagatgcaactcttgacttactgcacatccttgtagcagtacatgcagaggtatactctggcgctcggcctctgttggagaagacaatgaaaattttggttgagggtttggtcgacatctttcttagtgtttttcatgagaataagaccaaagatattagattgttggatgcgaatggtttttgtcaactgatgcttgagcttgagtattttgagactgtactgcacacgtacttctcacctgaggcgcaacaggctatgaaatctttacaagagaatttgttggaaaaggcctgtgaaagtgttgcagaagccatggaaaatcctggacaccaacgtcgaccaacccgtggcagtgaagatacagcatcggatgacagacagccatcagtatcacctgatgatttgcttgtgcttgctcagcagtgcagtagtgatctgctgcaaggggagttggagaggactcgattgaacatagcctgtttcatggagtcgacccttcaaccaacagctgcgccagcaggcccaaagcctgccgcacattcttcttaccaagcacagcatgctcccgtccaaacgtcctcgcctagttttagaaggcagcagactggtacaagttcccctgtagtctccaggcggcgccggtgagcttagtgcatctttccatcattggcgtagcctcttcccggagtttccttccttttcccccctcacatgtgtgctttttttaatcacttgtaattgtcatcctgttgtcatgtgttacgaatttcgatccattcttttggtgttgtataagatgaaaaggaggagtacagtactggtgctgctgcacgggatcatggaattgtataatatcgacgagtcaaatattattgctgcttgaagataccaccacagctttatgtatatggaattctggagttgtcggtctgcgccaacttccttcctgcggtcgtcaccgcatgtttgtacattcgtcgcttggacagttttatgtatcccgagatttgttaatattgtatcagttggttcgtgattgttgatatgtctgcatgctttgtgctgtggagg

SEQ ID NO: 202950 - DNA, 2295 bp, Zea Mays
attcgataaaaaaaaggaaatctgcgcgccgcgcgatcccggggccacgcccacgcgcaactccattactccgctcgcagccagatctgagtcctcactctgtctcttcctcagtcccggcatcagcgctcaaaccctaacacgccacgcgatcccgatgcgcaggggtctgggcagcgaggcatcgttgcgccggcggcgcgggccggcgcggctttgggtggcagtggcggcgctggtggtcggcaccgtgtgcctcttctcctcctcttcggtcggcctgttgggcgcctcttacagggtccagattcaaatggttggagagcatcttctgcaccacgcacctactggcctcccccaccaactgaatctgagagcaatggctacttgcgcgtccggtgcaatggtggcttgaaccaacaacgtagtgcaatatgtaatgctgttgttgctgcacggatcatgaatgctacactggtgctgccagaattagacacaaattcattctggcatgatgaaagtggctttgtaggtatttatgatgttccccacttcatcaagacactgaaatatgacgtccgaattgttatgagcattcctgaaatcactacaaatggaaagaccaagaagctcaaaggccagcagcttcggccaccaagagatgcaccggtatcttggtatgcaactgatgctttggagacgatgaagaagtatggagctatatatttaagtccattttcacaccgtttggcagaagatattgataatccagagctccagagattgagatgcagagtgaattaccatgcactacgattcaagccaaatatcatgaaaacaagcagtgagatagtgaacaagctccgctcagaaggccatttcatgtcaattcatcttcgatttgagttggatatgcttgcatttgcagggtgctttgacatattcaaacctcaagagcaaaaaattctgtggaagtacagggaagaacattttgcagaaaaggaacttatccccatgaaaatcaggctcaaaggaaagtgccctttaactccagaagaggtaggttttattctacgtgccatgggatttgacaatagaacacgcatttaccttgcctctggcgagctctttggagggaaacgtttcatgaagccattcaagaccatgtttccacgcttagagaaccacagcacagttggacctggaaagctggaagagaatacccaagggctagcaggatcagcagttgactacatggtttgcctcctgtctgacattttcatgcccacatatgatggcccaagcaactttgcaaacaacctcatgggccaccgtatgtactacggtttccggaccacaatcacgccgaacagaaaggctcttgccccgatactcatcgacaggatggaaggccgccacattggctttgagagaatcaggagggtgatgtccaacacccattttggtgccccccacaagcgcgtccatccagagtctttctacacgaactcatggcctgagtgcttctgccagacggatgccaagaaccatgcagaccggtgtccccctgataacataaatgacgttctggaaagccagttccagagcgaagaagaaatggaagaagcaagagcctctaatcagactgacccatccagccaaatagaagagctgacgatttaactgatcaactagggattactgctcggaagcattttgaacacttggaatggtcatcagagaaatccagatacaactatattcaaggaatgtattaattgatggctcaaactggagcggttgacatgctgaggtgtggtatctggtggtattcagggagagcattgaaccagattttgaataggtctggtcatatatggttttgaggagaaaacaatatgtatgtcaatagttttcctcattgaagagtgaagttgtgcgggttgtgtaggtggcagtgacaaaagtgagaaacctttgcgcaatatggtaccatccggtgtataaaggccccggttaggctggtgccagtgcaccctttgtctttcgtccctggcatgtcagctattgactccactcttgtccttactgttttagtgcacaactgcacaactcgcagcgggatatagcttcggcatatagtcacattaacttttctatttcagaattaagtaatttacgtgaatttattttaatgctcagaaaccacataacatgatatttttattaaagtaaaaattacaaagggtatgataattaaaataaaactatatgctaattaaaaaataacataaa

SEQ ID NO: 202951 - DNA, 2243 bp, Zea Mays
ccacgcccacgcgcaactccattactccgctcgcagccagatctgagtcctcactctgtctcttcctcagtcccggcatcagcgctcaaaccctaacacgccacgcgatcccgatgcgcaggggtctgggcagcgaggcatcgttgcgccggcggcgcgggccggcgcggctttgggtggcagtggcggcgctggtggtcggcaccgtgtgcctcttctcctcctcttcggtcggcctgttgggcgcctcttacagggtccagattcaaatggttggagagcatcttctgcaccacgcacctactggcctcccccaccaactgaatctgagagcaatggctacttgcgcgtccggtgcaatggtggcttgaaccaacaacatatgtaatgctgttgttgctgcacggatcatgaatgctacactggtgctgccagaattagacacaaattcattctggcatgatgaaagtggctttgtaggtatttatgatgttccccacttcatcaagacactgaaatatgacgtccgaattgttatgagcattcctgaaatcactacaaatggaaagaccaagaagctcaaaggccagcagcttcggccaccaagagatgcaccggtatcttggtatgcaactgatgctttggagacgatgaagaagtatggagctatatatttaagtccattttcacaccgtttggcagaagatattgataatccagagctccagagattgagatgcagagtgaattaccatgcactacgattcaagccaaatatcatgaaaacaagcagtgagatagtgaacaagctccgctcagaaggccatttcatgtcaattcatcttcgatttgagttggatatgcttgcatttgcagggtgctttgacatattcaaacctcaagagcaaaaaattctgtggaagtacagggaagaacattttgcagaaaaggaacttatccccatgaaaatcaggctcaaaggaaagtgccctttaactccagaagaggtaggttttattctacgtgccatgggatttgacaatagaacacgcatttaccttgcctctggcgagctctttggagggaaacgtttcatgaagccattcaagaccatgtttccacgcttagagaaccacagcacagttggacctggaaagctggaagagaatacccaagggctagcaggatcagcagttgactacatggtttgcctcctgtctgacattttcatgcccacatatgatggcccaagcaactttgcaaacaacctcatgggccaccgtatgtactacggtttccggaccacaatcacgccgaacagaaaggctcttgccccgatactcatcgacaggatggaaggccgccacattggctttgagagaatcaggagggtgatgtccaacacccattttggtgccccccacaagcgcgtccatccagagtctttctacacgaactcatggcctgagtgcttctgccagacggatgccaagaaccatgcagaccggtgtccccctgataacataaatgacgttctggaaagccagttccagagcgaagaagaaatggaagaagcaagagcctctaatcagactgacccatccagccaaatagaagagctgacgatttaactgatcaactagggattactgctcggaagcattttgaacacttggaatggtcatcagagaaatccagatacaactatattcaaggaatgtattaattgatggctcaaactggagcggttgacatgctgaggtgtggtatctggtggtattcagggagagcattgaaccagattttgaataggtctggtcatatatggttttgaggagaaaacaatatgtatgtcaatagttttcctcattgaagagtgaagttgtgcgggttgtgtaggtggcagtgacaaaagtgagaaacctttgcgcaatatggtaccatccggtgtataaaggccccggttaggctggtgccagtgcaccctttgtctttcgtccctggcatgtcagctattgactccactcttgtccttactgttttagtgcacaactgcacaactcgcagcgggatatagcttcggcatatagtcacattaacttttctatttcagaattaagtaatttacgtgaatttattttaatgctcagaaaccacataacatgatatttttattaaagtaaaaattacaaagggtatgataattaaaataaaactatatgctaattaaaaaataacataaa

SEQ ID NO: 202952 - DNA, 2035 bp, Zea Mays
cgcctcgcccgcgcctgctttctggatgttgatgtaaataagttgtggagaactgcagattcaaatggttggagagcatcttctgcaccacgcacctactggcctcccccaccaactgaatctgagagcaatggctacttgcgcgtccggtgcaatggtggcttgaaccaacaacgtagtgcaatatgtaatgctgttgttgctgcacggatcatgaatgctacactggtgctgccagaattagacacaaattcattctggcatgatgaaaggtatttatgatgttccccacttcatcaagacactgaaatatgacgtccgaattgttatgagcattcctgaaatcactacaaatggaaagaccaagaagctcaaaggccagcagcttcggccaccaagagatgcaccggtatcttggtatgcaactgatgctttggagacgatgaagaagtatggagctatatatttaagtccattttcacaccgtttggcagaagatattgataatccagagctccagagattgagatgcagagtgaattaccatgcactacgattcaagccaaatatcatgaaaacaagcagtgagatagtgaacaagctccgctcagaaggccatttcatgtcaattcatcttcgatttgagttggatatgcttgcatttgcagggtgctttgacatattcaaacctcaagagcaaaaaattctgtggaagtacagggaagaacattttgcagaaaaggaacttatccccatgaaaatcaggctcaaaggaaagtgccctttaactccagaagaggtaggttttattctacgtgccatgggatttgacaatagaacacgcatttaccttgcctctggcgagctctttggagggaaacgtttcatgaagccattcaagaccatgtttccacgcttagagaaccacagcacagttggacctggaaagctggaagagaatacccaagggctagcaggatcagcagttgactacatggtttgcctcctgtctgacattttcatgcccacatatgatggcccaagcaactttgcaaacaacctcatgggccaccgtatgtactacggtttccggaccacaatcacgccgaacagaaaggctcttgccccgatactcatcgacaggatggaaggccgccacattggctttgagagaatcaggagggtgatgtccaacacccattttggtgccccccacaagcgcgtccatccagagtctttctacacgaactcatggcctgagtgcttctgccagacggatgccaagaaccatgcagaccggtgtccccctgataacataaatgacgttctggaaagccagttccagagcgaagaagaaatggaagaagcaagagcctctaatcagactgacccatccagccaaatagaagagctgacgatttaactgatcaactagggattactgctcggaagcattttgaacacttggaatggtcatcagagaaatccagatacaactatattcaaggaatgtattaattgatggctcaaactggagcggttgacatgctgaggtgtggtatctggtggtattcagggagagcattgaaccagattttgaataggtctggtcatatatggttttgaggagaaaacaatatgtatgtcaatagttttcctcattgaagagtgaagttgtgcgggttgtgtaggtggcagtgacaaaagtgagaaacctttgcgcaatatggtaccatccggtgtataaaggccccggttaggctggtgccagtgcaccctttgtctttcgtccctggcatgtcagctattgactccactcttgtccttactgttttagtgcacaactgcacaactcgcagcgggatatagcttcggcatatagtcacattaacttttctatttcagaattaagtaatttacgtgaatttattttaatgctcagaaaccacataacatgatatttttattaaagtaaaaattacaaagggtatgataattaaaataaaactatatgctaattaaaaaataacataaa

SEQ ID NO: 202953 - DNA, 1757 bp, Zea Mays
ctaatattcaactagccttgtttacccgactgatgtttgaagttgatactgtcttctagtggtaggcttatgtacttgtcaatcaagattgatcctctttctgctgttgaatttggctctgtatatcatgaaatgttcatgtcagttttcttagcatggttgatagtttgtttgtatgactccagtgttttcctgtatccctgcacatatttgaagtttctttaaatcatgaagaaaggctatcagcatgttttttcccaccaaagcttataccttttattttaatttagaactgttctcatggaaataccttggtccaggtctatgcattaatgatatcattaaatacattgtgtttctgtaattattctaccgccataactcataggagatgctaaattgtcactgttaatgtccatgctacatactaacagaacctgaggactatctttacatgctatatactaatggaacctgaaaactatgtttgcaccctgtacgaaaggagacaatggcagaccagttagggtcttacactattagatcccatggaatgatattggcaaggttgcacatacatgatgactgacttgagatatcctatgaagggcaatacagtgccattttgggctgttccactgattggaattatactgccttgggccatctttgttgggatttacttcaaaaagaagaatttttatgatttgcaccatggcatactggggattctatactcagtgctgataactgcagtgattactgatgcaattaaggatggtgttggacggcctcgtccagattttttctggcgctgtttccctaatggaaatgatgtttatgataacattactactggtgttatatgcaatggagtgaagagcgtaatcaaggaaggccacaagagctttcccagtggacacagttcatggtcttttgctggtctaggcttccttgcatggtacttagctgggaaactcacagcctttgaccgcaaagggcatattgcgaagctatgcattgtgttcctgcctctccttactgccgcacttgtggctgtttctcgagtggacgactactggcatcattggcaagatgtatttgcagggggtcttataggtcttacagttgcttcgttttgctacctacagtttttcccatatcctttcgatggcgatgctttgtggcctcacgcatacgcggtccggttagccgaggaggggaacagcagaaatgcgaactcatacagcgtgagaccaaccgaaatcgaaacagtcgatattcctgggcacggtgggatcatcaccctaagagatactctaaacgatgtggagtctggcagtgccaggagattgtgagatgggtctgcaggtgtggagattgatgtctcagataccatgggagttgcttgcatatgtgtacaggtagatctattgtagagctgttgactgctgccaccgtgataggggagggttgtttagacgggcctggcagtaaatttacttggtagggtgctgtttcttctgagaacctttggcttttgtttgtatatatgctcttatcaaagtgttgagttcagagttgtggttaaagtttgtttgctgacactctttgtaaccagtttggtcgctgcattcagcaactatgatctgatcagatgttgcccagtctactgttgttcttatattaagcgtgaaattcatttgtcaccatgatttactcttttattaagcacgaaattcatttgccaccataat

SEQ ID NO: 202954 - DNA, 1343 bp, Zea Mays
gggaaaccctccccccaacagaaaggagattcgaggagacaatggcagaccagttagggtcttacactattagatcccatggaatgatattggcaaggttgcacatgtatgactggataatacttctcctccttgctgtcatagacgggctgttgaatataattgaaccatttcaccgttttgttgggaaagacatgatgactgacttgagatatcctatgaagggcaatacagtgccattttgggctgttccactgattggaattatactgccttgggccatctttgttgggatttacttcaaaaagaagaatttttatgatttgcaccatggcatactggtgattactgatgcaattaaggatggtgttggacggcctcgtccagattttttctggcgctgtttccctaatggaaatgatgtttatgataacattactactggtgttatatgcaatggagtgaagagcgtaatcaaggaaggccacaagagctttcccagtggacacagttcatggtcttttgctggtctaggcttccttgcatggtacttagctgggaaactcacagcctttgaccgcaaagggcatattgcgaagctatgcattgtgttcctgcctctccttactgccgcacttgtggctgtttctcgagtggacgactactggcatcattggcaagatgtatttgcagggggtcttataggtcttacagttgcttcgttttgctacctacagtttttcccatatcctttcgatggcgatgctttgtggcctcacgcatacgcggtccggttagccgaggaggggaacagcagaaatgcgaactcatacagcgtgagaccaaccgaaatcgaaacagtcgatattcctgggcacggtgggatcatcaccctaagagatactctaaacgatgtggagtctggcagtgccaggagattgtgagatgggtctgcaggtgtggagattgatgtctcagataccatgggagttgcttgcatatgtgtacaggtagatctattgtagagctgttgactgctgccaccgtgataggggagggttgtttagacgggcctggcagtaaatttacttggtagggtgctgtttcttctgagaacctttggcttttgtttgtatatatgctcttatcaaagtgttgagttcagagttgtggttaaagtttgtttgctgacactctttgtaaccagtttggtcgctgcattcagcaactatgatctgatcagatgttgcccagtctactgttgttcttatattaagcgtgaaattcatttgtcaccatgatttactcttttattaagcacgaaattcatttgccaccataat

SEQ ID NO: 202955 - DNA, 1316 bp, Zea Mays
attaagatggacacatataacatactttattattttgttaaggaagaattacttcaaacttacctgctgttcacatgctactcctagatatcatgctgaaggcatcatgtagctgtgattttgtaaaggctgaaacacgtgaatgtgtaaatgaatttaatatgaagcaacactatcaataatggcatgtgtgacattggtgaagaatttattatcagttagtgctgatgatgaggttcctataaaaagtgtaactatccgcaaaattcctcgtgttctagaagaaatgcccctctatgacatcctaaacgaatttcagaaaggtcacagccacatggctgtagtcataaggaaaaacaatccaagttaccaaccagctgaacaagctgctaatgatggtggaacttttgaggtgtccattgctattgatgataagaacaacgaaaaggtcgtgaaaaaccttccgccaccactgcaaagatggaagagctaccctaacactcagaacacatcaaatagaggaaataggcctaaaaaatggtccaaagatcaagcagacgttctgcaggtccataaagagcccttgcccacactgagcgaagatgaagaggctgttggtatcataaccatggaggatgtcatagaggagctcctgcaggaggagatatacgacgagacagacgtacatgaggaacaatgacgctggccttgcgccctccctccagctgttagaaagtgcgcttttatgcaaaacttatgtatagataggcagatacactgagagatattttagccgtagcccgtagccgttcattgtagtactataggtggctggctgtctcgagtattggtaaagactgttcggagtgcgtcgttcgttctcgtccagaacagctgggttctgggcatccggggaagaaacggaggcgttgacgcgtgtgtgtaggttcagaagaaaccccaataagataattgcgttgttatatgatgccgctcgcattattaggacgaatctgttgacatatagtcttataaattaaaaacaatgttttgaaaacatagtagagttgaaatttaaaataggagatgggatggaagctgctgaagatagacttagtgccaacttttaccgagatcgtggcacgcagtctggtgtttgttgtatgtagtttggaggtgattgagacatatatggtgtgtttggtttgtagagtcactctatgcttaatgaggtgatgcattataagtttatttaattaatttttgtgtaatcaacccattctttatgtatatactaattattagtttatgagaaa

SEQ ID NO: 202956 - DNA, 1390 bp, Zea Mays
attaaatggtgcctaattggaggaattaaattgcatggactcgtggctggcaaaggtggagaattaacccatgatgaaactaccataatagcaggagctcttgaactgactgaaaagaaagctaaagatgctatgacacccttgtgtcaaacatttgcaattgatataaatgcaaaacttgacaggaatctaatgcaagaggtacttgagaaagggcatagcagagttcctgtgtattatgaaaagaaaacgaatattattggattgatattggtgaagaatttattatcagttagtgctgatgatgaggttcctataaaaagtgtaactatccgcaaaattcctcgtgttctagaagaaatgcccctctatgacatcctaaacgaatttcagaaaggtcacagccacatggctgtagtcataaggaaaaacaatccaagttaccaaccagctgaacaagctgctaatgatggtggaacttttgaggtgtccattgctattgatgataagaacaacgaaaaggtcgtgaaaaaccttccgccaccactgcaaagatggaagagctaccctaacactcagaacacatcaaatagaggaaataggcctaaaaaatggtccaaagatcaagcagacgttctgcaggtccataaagagcccttgcccacactgagcgaagatgaagaggctgttggtatcataaccatggaggatgtcatagaggagctcctgcaggaggagatatacgacgagacagacgtacatgaggaacaatgacgctggccttgcgccctccctccagctgttagaaagtgcgcttttatgcaaaacttatgtatagataggcagatacactgagagatattttagccgtagcccgtagccgttcattgtagtactataggtggctggctgtctcgagtattggtaaagactgttcggagtgcgtcgttcgttctcgtccagaacagctgggttctgggcatccggggaagaaacggaggcgttgacgcgtgtgtgtaggttcagaagaaaccccaataagataattgcgttgttatatgatgccgctcgcattattaggacgaatctgttgacatatagtcttataaattaaaaacaatgttttgaaaacatagtagagttgaaatttaaaataggagatgggatggaagctgctgaagatagacttagtgccaacttttaccgagatcgtggcacgcagtctggtgtttgttgtatgtagtttggaggtgattgagacatatatggtgtgtttggtttgtagagtcactctatgcttaatgaggtgatgcattataagtttatttaattaatttttgtgtaatcaacccattctttatgtatatactaattattagtttatgagaaa

SEQ ID NO: 202957 - DNA, 2125 bp, Zea Mays
gcccacatgtcagcagctcgtgggtggccacccgtcctgtagcatggccaccgctggccacgcctcactgcgtagttgacacacgcacgcccgcgcccacgctcctaaataaagaaggcaactgcggaatcgctcgcgacgcaggaggtggggtgagttcgcgggtcgagcggaggagaagcttctggtggtggtggctctcgtcgtcaagcaggaggggagagaggagccggcggcggaggtgaatggcggtggagtaccactgctgctcggcggcctttttcgagcacatcgtcatcatcatcgtgctcgtgctcttcgcgggcctcatgtcgggcctcaccctgggcctcatgtcccttagcctcgtcgatctcgaggtcctcgccaagtccggcaccgagcaggatcgcaagcacgcagctaagattttacctgttgtgaagaaccagcaccttctgctatgcactcttctaatctgcaatgcggctgcaatggaggctttgcccatattccttgatagcttggtgacagcttggggtgctattttaatatcagtgacactgattctgctttttgatcttaccacagtccatctgctcacattatgggctggctattggtgcctcagttgctccattagtccgtgtgcttgtttgggtctgctttcctattgcctatcctataagcaagctattggactatgtgctgggtcatggtcagacagctctcttccgtagagctgaactaaaaacacttgtcactctgcacgggaatgaggctggcaaaggtggagaattaacccatgatgaaactaccataatagcaggagctcttgaactgactgaaaagaaagctaaagatgctatgacacccttgtgtcaaacatttgcaattgatataaatgcaaaacttgacaggaatctaatgcaagaggtacttgagaaagggcatagcagagttcctgtgtattatgaaaagaaaacgaatattattggattgatattggtgaagaatttattatcagttagtgctgatgatgaggttcctataaaaagtgtaactatccgcaaaattcctcgtgttctagaagaaatgcccctctatgacatcctaaacgaatttcagaaaggtcacagccacatggctgtagtcataaggaaaaacaatccaagttaccaaccagctgaacaagctgctaatgatggtggaacttttgaggtgtccattgctattgatgataagaacaacgaaaaggtcgtgaaaaaccttccgccaccactgcaaagatggaagagctaccctaacactcagaacacatcaaatagaggaaataggcctaaaaaatggtccaaagatcaagcagacgttctgcaggtccataaagagcccttgcccacactgagcgaagatgaagaggctgttggtatcataaccatggaggatgtcatagaggagctcctgcaggaggagatatacgacgagacagacgtacatgaggaacaatgacgctggccttgcgccctccctccagctgttagaaagtgcgcttttatgcaaaacttatgtatagataggcagatacactgagagatattttagccgtagcccgtagccgttcattgtagtactataggtggctggctgtctcgagtattggtaaagactgttcggagtgcgtcgttcgttctcgtccagaacagctgggttctgggcatccggggaagaaacggaggcgttgacgcgtgtgtgtaggttcagaagaaaccccaataagataattgcgttgttatatgatgccgctcgcattattaggacgaatctgttgacatatagtcttataaattaaaaacaatgttttgaaaacatagtagagttgaaatttaaaataggagatgggatggaagctgctgaagatagacttagtgccaacttttaccgagatcgtggcacgcagtctggtgtttgttgtatgtagtttggaggtgattgagacatatatggtgtgtttggtttgtagagtcactctatgcttaatgaggtgatgcattataagtttatttaattaatttttgtgtaatcaacccattctttatgtatatactaattattagtttatgagaaa

SEQ ID NO: 202958 - DNA, 1392 bp, Zea Mays
accccggcggtcgcccggcgccgctgcaggccgcagttgtaggtacagggacaaatccccggttctttctccaccctccgaccggccggcggccgctgcaagtttcaccgcagttggcaactggcaaccccgctctgacctaggaggatgtcgggtttcggcgatgggtacgtggggacggcgcaggacgcggtgaagatccggcggctggagaagcagcgcgaggcggagcgccgcaagatcgaggagctcaagaacaagtccgcggacgggcagcccggcctcctccagttcggctccagcacctccgagattcttgagactgcatttaagaaggaaacagttggtctcgtcaccagggagcagtatgtcgagaagagggttaacattcgaaccaagattgaggaggaagagaaagagaaacttcaaaagctgcaacaagaagaagaagaattgcaaatgcagaaaaggaaaaagaggagagtgaagagtgatccacgcttatctttctgtgatgacattgagaatggaagtgacgaagatgattttgagaatcaagaaaccaagaaaaatggccctgccaaacttgggaaggatccaactgtggagacaagttttctacctgatagagtgatccttcagagaaagggaggcagaggaacaagcagaacgagaacgactgaagaagcagtggtcgcatgagcaggaattgattaaaaatgaacctctttcaattacttacagttactgggatgggactgggcacagaagagcaatccaggtccgtaaaggtgacaccattggagaatttctaagggctgttcaacagcagcttgcccctgaattccgtgaagtacggacaacttcagttgagaatctactttatgtgaaggaagatcttatcatccctcatcaacacagcttttatgaattaattatcaacaaagcaaggggcaagagtggaccacttttccattttgacgttcatgaggatgttcgtaccattgccgacgcaacaaaagaaaaggatgagtcccacgcggggaaagttgtagagaggcattggtatgagaaaaataagcatatattcccagcctcaagatgggagatctatgacccaacgaagaagtgggaacgctacacaatccatggggattagcatggaacatcatacatagagagttaaattattttgtactttggatgtccgaaattaccagcactcaagaatatgagaatggcacaagtgacgatttgaatagcataaattattactgttgtttgcaaacatgtcctgcatagagtactaggtaaagcctctttctcacactccaaatatgttgctttaactattaaaggggcaagagtactacctctacaactattaagagc

SEQ ID NO: 202959 - DNA, 1374 bp, Zea Mays
accccggcggtcgcccggcgccgctgcaggccgcagttgtaggtacagggacaaatccccggttctttctccaccctccgaccggccggcggccgctgcaagtttcaccgcagttggcaactggcaaccccgctctgacctaggaggatgtcgggtttcggcgatgggtacgtggggacggcgcaggacgcggtgaagatccggcggctggagaagcagcgcgaggcggagcgccgcaagatcgaggagctcaagaacaagtccgcggacgggcagcccggcctcctccagttcggctccagcacctccgagattcttgagactgcatttaagaaggaaacagttggtctcgtcaccagggagcagtatgtcgagaagagggttaacattcgaaccaagattgaggaggaagagaaagagaaacttcaaaagctgcaacaagaaagaattgcaaatgcagaaaaggaaaaagaggagagtgaagagtgatccacgcttatctttctgtgatgacattgagaatggaagtgacgaagatgattttgagaatcaagaaaccaagaaaaatggccctgccaaacttgggaaggatccaactgtggagacaagttttctacctgatagagaaagggaggcagaggaacaagcagaacgagaacgactgaagaagcagtggtcgcatgagcaggaattgattaaaaatgaacctctttcaattacttacagttactgggatgggactgggcacagaagagcaatccaggtccgtaaaggtgacaccattggagaatttctaagggctgttcaacagcagcttgcccctgaattccgtgaagtacggacaacttcagttgagaatctactttatgtgaaggaagatcttatcatccctcatcaacacagcttttatgaattaattatcaacaaagcaaggggcaagagtggaccacttttccattttgacgttcatgaggatgttcgtaccattgccgacgcaacaaaagaaaaggatgagtcccacgcggggaaagttgtagagaggcattggtatgagaaaaataagcatatattcccagcctcaagatgggagatctatgacccaacgaagaagtgggaacgctacacaatccatggggattagcatggaacatcatacatagagagttaaattattttgtactttggatgtccgaaattaccagcactcaagaatatgagaatggcacaagtgacgatttgaatagcataaattattactgttgtttgcaaacatgtcctgcatagagtactaggtaaagcctctttctcacactccaaatatgttgctttaactattaaaggggcaagagtactacctctacaactattaagagc

SEQ ID NO: 202960 - DNA, 3304 bp, Zea Mays
cacctacacccctcgccagaggaccgtccccttgatgtcggacggccaacggattcacctcccacgccctccacgagcctgataaatcgtcggcgcaaattttttcggccgttcgttgcctcatcaacgtccaggcgttcagcgaagcatcctattcttttctgttctttctgcgacgcccacgaaggttccagactgtagaagcccccaaccccgcttggagctccatttgccccaccacggtgccagcaactccaccccctgcccccccgccggcagatcccccaccccgccaggagctctgcccaggcctaccacggtgccagcaactccaccaccccctccctcgccattggcggttcccccaccccgctaggagcaccgcccaggcggatgacttcaccttcgaagcccctgccacgcagccagtgtcaagattacccccacctacacccctcgccagaggaccgtccccttgatgtcggacggccaacggattcacctcccacgccctccacgagcctgataaatcaagaatttactagaatttctacacgcccatgaatgattttattgttgctactgaatgatgtaatagattgagtatactgttgtgtttgcagggatgctaaaggtcgcggcaagtggctctactgccactccactctgaggcggtgccagcgttgatgaccacctctcggcctactacttcttctccagcatgggtctagtccaagtcgcgatacggggtttggacattttgggctaggttgttcagcatgggtctagtgaatgaaggcatcgacatggaggagggaaacctggagataggcatagcaattcttttgcatgattattagttttattttattaatctatgctagatctcaaatacacgcaatccaatcttgaagatctggttaaaaaaagtggaaccaaaggtatttgttgagttctttggcattgccatatagtagatttgaccgggaagcttgcaggtctactatatgtcctggttttcgtatctgcatgtcttcatgttcaaaatggtgattcggtttatatgagagtattgtcttagtgctagtgtggataacatcaagatggtgtaccatgtacggtgatgactttgctgaacttagtactttcaaatgtgtgacaaggaaggaaagtagcaagctgaaaaggaagaaccaagataaaatgtttgatgcatatatcctgcatgggtctgcaatacaatctacaacacactagattatatgtgaaggtcagatttttatcatctcagatttgttggtttcaatattttctagagtccctatgggtttccaacttcactaacgatggaattgattaaaatcctttctgagaaatgaatagccaataaagttctcatgggaagagggtaagcaatggccaatgttcagggattggatacatagttgcatttacatgtcaatgtcatcttcacatagtagatagaattgtacacattttttcagtaatattggcactgtagacatggtctgtatttaacgtttttgctgacttcttagtgatttgctgaaataatgacgcataactatgcttatatcgagaaggggagaaaggatcaaccgtcatcgtctccgtcggcaacatcggccctgttgacagcccgcgctctgtgtgccctcctccccacgtgtttgatggcctctgttttctcttctccctcgcactgcagagcttagtggcgtggtccaacaacttactacataatggcgatcagcaccggcaaagcttaagtgtgaagtgagacataacatgcaacatctgattagaattttcatatttagatatactcacgaatcactaagacagattatatgcttgtggtccctttttcagaaacataaatgttccctgtaaggaatgtccacagcatagcacaatataaattgttgaaggaaaaatactaggcaaaacatcccccacatagttaatacctcataaatcttctgattttaggttgccatcccttgcattttaaaacaactgcttcacctcatcagaaataatatatgatgatcaatgatgacccaatttgatattagcaacacaactcaccctaattaccggaacaaacaagccatgatctgttttagtaaaagtatatgcgttgcaacttatatttatatttggatgataaacaacttagaaatagtatcaagattatatatatcatcatatcttgtatttgttcctgtaaaaaagaagcatcaatattatgttatatcaatacctttatatatatataatatctcttctttttatataggcatctttagtagaattgtataaaaaacgcgcgcagggcgcgcgttaagacactagtgcatatactatgcaataagccgagaactgtatctcagttgtgcgatggcaaaaaggggcatgcgcgggtgctgattgaggacggagaagagggaggagcgtaggcaggatggagtttcgactctagcagactagcacatgcatcttgaaatccattgttttcgttttcttctcacatacatgacaccgacagaattggccactgaaccaacaatatttaatggaccaacaatctaatctagcagactagcttatggtcctcccatactttcatatctatactactccctccgttctcaaatatttgtcaccggttaattcatttttgaactaaaacacgataaataaaaaagaacggagagagtactctattaagaatctagtgtgggcacatagtgttatcacgacttcattccggcgctgtgccctgtgggccccacacccagcacccgtgcatcgctttctcaattactgttgtatgaaacccccaacgccggtagctcgctactgtgtctgctcagcacccgacaccgcctgcgcagctaccacaccacacttgaacccacgccctctgcttcagcaatttaggaataaccactagaccacaagtatcttagtgtttagaaataaacaataattatatttgaataaatatctcaatacctatttatatgatatataccaactgtagcaaagcacggaaaactggctagtatatatctaggattctaggtcctaccaatggttatttaagttttcatttagtttgtctcctaacttaggagatacaattccacttaatataggatcacttgtggggtttctaacgagttgagggcatgtacgacccacatacaacaaggtgccgtttggttcacgaaatgtaacgtaaatggtaatggtaatgattcgcactcgaataccg

SEQ ID NO: 202961 - DNA, 3143 bp, Zea Mays
ctcgccagaggaccgtccccttgatgtcggacggccaacggattcacctcccacgccctccacgagcctgataaatcgtcggcgcaaattttttcggccgttcgttgcctcatcaacgtccaggcgttcagcgaagcatcctattcttttctgttctttctgcgacgcccacgaaggttccagactgtagaagcccccaaccccgcttggagctccatttgccccaccacggtgccagcaactccaccccctgcccccccgccggcagatcccccaccccgccaggagctctgcccaggcctaccacggtgccagcaactccaccaccccctccctcgccattggcggttcccccaccccgctaggagcaccgcccaggcggatgacttcaccttcgaagcccctgccacgcagccagtgtcaagattacccccacctacacccctcgccagaggaccgtccccttgatgtcggacggccaacggattcacctcccacgccctccacgagcctgataaatcaagaatttactagaatttctacacgcccatgaatgattttattgttgctactgaatgatgtaatagattgagtatactgttgtgtttgcagggatgctaaaggtcgcggcaagtggctctactgccactccactctgaggcggtgccagcgttgatgaccacctctcggcctactacttcttctccagcatgggtctagtccaagtcgcgatacggggtttggacattttgggctaggttgttcagcatgggtctagtgaatgaaggcatcgacatggaggagggaaacctggagataggcatagcaattcttttgcatgattattagttttattttattaatctatgctagatctcaaatacacgcaatccaatcttgaagatctggttaaaaaagtatgctgcttgtaccataaactgtgtgcgacgcaaatttcagtaagtgcaatttgttgatgtattgtgatggtagaccgaccttccttctgcagagtggaaccaaaggtatttgttgagttctttggcattgccatatagtagatttgaccgggaagcttgcaggtctactatatgtcctggttttcgtatctgcatgtcttcatgttcaaaatggtgattcggtttatatgagagtattgtcttagtgctagtgtggataacatcaagatggtgtaccatgtacggtgatgactttgctgaacttagtactttcaaatgtgtgacaaggaaggaaagtagcaagctgaaaaggaagaaccaagataaaatgtttgatgcatatatcctgcatgggtctgcaatacaatctacaacacactagattatatgtgaagaaggggagaaaggatcaaccgtcatcgtctccgtcggcaacatcggccctgttgacagcccgcgctctgtgtgccctcctccccacgtgtttgatggcctctgttttctcttctccctcgcactgcagagcttagtggcgtggtccaacaacttactacataatggcgatcagcaccggcaaagcttaagtgtgaagtgagacataacatgcaacatctgattagaattttcatatttagatatactcacgaatcactaagacagattatatgcttgtggtccctttttcagaaacataaatgttccctgtaaggtaagcttagttgtttaatttcttaaattcaggtatcctttctatgtatgaataataaactaacaattactccataataactgcaggaatgtccacagcatagcacaatataaattgttgaaggaaaaatactaggcaaaacatcccccacatagttaatacctcataaatcttctgattttaggttgccatcccttgcattttaaaacaactgcttcacctcatcagaaataatatatgatgatcaatgatgacccaatttgatattagcaacacaactcaccctaattaccggaacaaacaagccatgatctgttttagtaaaagtatatgcgttgcaacttatatttatatttggatgataaacaacttagaaatagtatcaagattatatatatcatcatatcttgtatttgttcctgtaaaaaagaagcatcaatattatgttatatcaatacctttatatatatataatatctcttctttttatataggcatctttagtagaattgtataaaaaacgcgcgcagggcgcgcgttaagacactagtgcatatactatgcaataagccgagaactgtatctcagttgtgcgatggcaaaaaggggcatgcgcgggtgctgattgaggacggagaagagggaggagcgtaggcaggatggagtttcgactctagcagactagcacatgcatcttgaaatccattgttttcgttttcttctcacatacatgacaccgacagaattggccactgaaccaacaatatttaatggaccaacaatctaatctagcagactagcttatggtcctcccatactttcatatctatactactccctccgttctcaaatatttgtcaccggttaattcatttttgaactaaaacacgataaataaaaaagaacggagagagtactctattaagaatctagtgtgggcacatagtgttatcacgacttcattccggcgctgtgccctgtgggccccacacccagcacccgtgcatcgctttctcaattactgttgtatgaaacccccaacgccggtagctcgctactgtgtctgctcagcacccgacaccgcctgcgcagctaccacaccacacttgaacccacgccctctgcttcagcaatttaggaataaccactagaccacaagtatcttagtgtttagaaataaacaataattatatttgaataaatatctcaatacctatttatatgatatataccaactgtagcaaagcacggaaaactggctagtatatatctaggattctaggtcctaccaatggttatttaagttttcatttagtttgtctcctaacttaggagatacaattccacttaatataggatcacttgtggggtttctaacgagttgagggcatgtacgacccacatacaacaaggtgccgtttggttcacgaaatgtaacgtaaatggtaatggtaatgattcgcactcgaataccg

SEQ ID NO: 202962 - DNA, 3061 bp, Zea Mays
caccagtccaccgcgccacaggctccaccctcccctctcggcccggctcgatggggtccggcgtgtcgtcgagcatggcgctggcgctggcgggcttctgcttcagcgtcctcttcatcgtcttcgtctgcacgcgcctcgcctgcgcgctcgtccgccggcgccggcgccaggcccgcgcccgcctcgcggccgccccgccgctcccgcactacgcccacggctacgccgaccccgaccctttcccgtcgttccgcgccgcccgccaccaccaccacgccccgggcctcgatcccgccgccttccccacccgcgcctacgccgccgcacaagcctccgactccgacgacggctcccagtgcgtcatctgtctggcggaatacgaagagggagacgagctccgcgtgctgcctccctgcagccacaccttccacacgggctgtatcagcctgtggctggcgcagaactcgacgtgcccggtctgtagagtctcgctgctcgtgcctgatactagtactacccctgaaagcgaacactctgcaccccatcctcctcctcctcctcatcatcatcatcatctgtccagcatagtgataataagcccaccaagctcccccgaaccgtcgagatcggacccgtgccgatgcctgttcgccagcggtggtgggcactcgtcaagggcggcagaggctcctcctcctcctcctcctcccagacacgagcccgaccaggtcgtatctggtccaccaccggcagcagatggggctagcggctacagctcgccgttgcctgaagttattcaccccgctcctgctcctgaaaccaacgggcagacagtacggaagcaggcgggcagcagatctactaccccgctaggcccctgcaaatagcggccgctcactctgtgtgggtgggtggggtgaacaggtggtgcgtggtaaaagcgaagtagagagaaacaagcgacttgaagaggcctgggttcgttcgtgtacatacgatcgagaaatcgtttcaggtcattcattcatccattcattcatccatgggcacatactgtggtattacggagtattacggtgtacgtgtagtgtgccgcaggagagacgacgcgacggcagcagtgcgttttccatatgcgacgggacgggagcattcgaggagatgatggcaatggcatggttttgtgtactgtacggtaacatttgtcgctgggaattaataataaaaaacccgtggctggctgatgcagcagcagctgtcttattatccagccacgcatgtgaaaatttcttctcgggcagcagcagcgtgatcagtcgccaccttgtcagcttgtatccctctgctgtaggctgtagtaccatgtggtctgaatccaatgcgacgacgacgacgacgccgcccagtcggtctctgatgaacctgagattacctacctgatcttgctactgccagggcgcgcgatcaacattccatttgacactggtaactgttggcggtggtgcacagtgctgactgacggacctgcctgtcatccagggtcagggtacatggagatgaggatcttggatggatgggggagaggggcctgcatctgcatcagagccagagggaggcgggcgaggaggggggaacaagcaaagcatgcggtgctgggctgccctgcccacgcagcgtcgtacgctcgtgtcggtcgccggcccagtcgaatggaatgaatgatgactctctcacccgtcccagatctagccgcgtcagcgcgcacggaaccgctccctttttttttcccccacacctccctcccttgctctcccgtgcgtgcactgacacacacaagttggttggtgagcggaattaagccagctcgtgacgcaatccaatccgaacacgctcttttgcctgggaaggataagcgcgtcgtgtttagtttacagtggtctcgtttggaagttcttcactctctatagactcgatagctgattctctactaatgtaatttcaagtgattctctagtaaagtgattctctagtaaaagtaaatttaattgataaaaaccgtttgataaataagatgtgaagtgcttgaacagttagtggggagtaggttgagacttgagagcggtggaaagctgatttttttggctctcactttctagtataaaatagaaactagattaactctactttcatcatagagtaatttagatttttaccggtttgactctggaggagtaattctgggagcggagctgtgagctctgcaaaacggctcctgtgtgcccaaatgatccagtccacagactcaggctcaggctctaggacgagtgatgagctctgcagccagtgacccctgtcggcggcggtagcttaaattggccaccatgtcgccacgatccatcggactcctctgtgcctggccaagttcaaggacggcgtcgtggtggacgacgtgctcaagggcatgaccgacctcgccgccgggatggacacggtcaagtctttcgagtggggccaggacgtgctgaaccaggagatgctgacgcagggcttcacgcacgtcttctcgctcaccttcgcctccgccgccgacctcgccgcctacatggcccacgacagccacaccgccttcgccgccaccttcatggccgccatcgacaaggtgctcgtcgtcgacttccccgtcgtcgtcgccaagcctccgccgccggcatgacccgctggccgctctcgcatccgccggccactgtacgcctccccttctcaggtcgcgcagcagatccacgtgtgcctgcggcggcggtgctggtagtagtactagtactgtctattgcctgttatttatgttctatctatctatctatctatctatctacgtcacgtacgtacctactattattgtttggttatcttcggaataaattttcggtcacttttatggtagcgtatatctagcggctagctgcttgcaatacaccctttccgatgtttatgatggattgtcagattcctaatcgacttttagttttcttgttactggctcctggttaaacaacagcag

SEQ ID NO: 202963 - DNA, 1137 bp, Zea Mays
aacaactggagcctgctaccgcttgccggcgcgggtggtgggctagctctcgccatcgccactaggtgcgtcatctgtctggcggaatacgaagagggagacgagctccgcgtgctgcctccctgcagccacaccttccacacgggctgtatcagcctgtggctggcgcagaactcgacgtgcccggtctgtagagtctcgctgctcgtgcctgatactagtactacccctgaaagcgaacactctgcaccccatcctcctcctcctcctcatcatcatcatcatctgtccagcatagtgataataagcccaccaagctcccccgaaccgtcgagatcggacccgtgccgatgcctgttcgccagcggtggtgggcactcgtcaagggcggcagaggctcctcctcctcctcctcctcccagacacgagcccgaccaggtcgtatctggtccaccaccggcagcagatggggctagcggctacagctcgccgttgcctgaagttattcaccccgctcctgctcctgaaaccaacgggcagacagtacggaagcaggcgggcagcagatctactaccccgctaggcccctgcaaatagcggccgctcactctgtgtgggtgggtggggtgaacaggtggtgcgtggtaaaagcgaagtagagagaaacaagcgacttgaagaggcctgggttcgttcgtgtacatacgatcgagaaatcgtttcaggtcattcattcatccattcattcatccatgggcacatactgtggtattacggagtattacggtgtacgtgtagtgtgccgcaggagagacgacgcgacggcagcagtgcgttttccatatgcgacgggacgggagcattcgaggagatgatggcaatggcatggttttgtgtactgtacggtaacatttgtcgctgggaattaataataaaaaacccgtggctggctgatgcagcagcagctgtcttattatccagccacgcatgtgaaaatttcttctcgggcagcagcagcgtgatcagtcgccaccttgtcagcttgtatccctctgctgtaggctgtagtaccatgtggtctgaatccaatgcgacgacgacgacgacgccgcccagtcggtctctgatgaacctgag

SEQ ID NO: 202964 - DNA, 916 bp, Zea Mays
atgagctgcaactatggactttggcaggtgccaataacatttgaactctatttgaccctggctaaaggaggagaatttcttaggttgtgtgcgctggaaagcgaggaagaggtaactgatgtcgagcaggcagaaaattggttttccttaacttcagctcagcgcatatgtgacatgtttcttgcactagataaggatacaaacagtacactgagcaaacaagaactcaaggaatatgcagatggcacattgactgagattttcattgaaagagtttttgatgagcatgtccgccggagcaaagttggaggtggaaacagtcgcgagatggacttcgaaagctttcttgattttgttttggctctagaaaacaaagatacccctgaaggcttgacatatttatttagatgccttgatcttaatggaagggggttccttacaactgcagacatccacactctatttagagatgtacaccagaaatggattgagggcgggaactacgagctttgcatcgaagatgtgagggatgaaatctgggacatggtgaagcccgcagatcctctcaggatctcgctatcagatcttctttcttgcaagcaaggcgggactatcgccagcatgcttgtagatgtgcgtggcttctgggcccatgacaacagggagaaccttctccaggaagaggaagagcaagtggaagagacatgagttctgttctccagctgccaagtaactgtatccagatccagtgcatcaaaaccgcaacatcctcgggaactgcatgcaccgcggtgaagttcaagattgctctttgccgttctgctctatgtgagcaacgtgaagcactccatgaggttacatgtttttcatttacttatgtctaatcttcgttttcagccctattatccagttttac

SEQ ID NO: 202965 - DNA, 3614 bp, Zea Mays
gggactgcaacatgatcaaagaggaaaaagtggaagccgccatcatctccatcaggtcgttctcgcttccgtcggtccatccaaggccatgctatcgacacctccgcagtcttcccatcctccagtacattttttcaactgcccgcgcggtagggaaggcaaagggtgggcatgtcgtcctctcctctgcaccacgtcatccacgacgatggtggaggagactgcttcagtcgccattcgttagtctccgttgctcctccacacgcttggtcgtcgtctctacggttggcccaggtatgaatacccttttcccatcaaatcttccccagatctgtgtgttattcgtgttagggtttgcatccgctcctccacatcgtgcgctctcactccatagcttcacattaggaatggaggtcgtcaattcaggtcgagtaggagcactctacggctccgcattgctactggtggtccaataatcacaccttcatgatttagtggatttccctcatccatatctccactaacattagaatattccttatcccatcgtcatgaggtcttcctacttttggtctctaaattgtgtatgccttttggagtaatttgctttgtttcgatgcctacatgttagctttgaataaagctaatttccctgcagcttttgaaaaagagttgctgaaaaaaaatcaggtgatccattatacactcatctttgttgtattattacactactattttgcttccaccatgaaattttaatatcttattggagtttgaataaaattttatatttgaatgtctttattttagctatctcacatgtggtggtcctgtaaattgtccattttttttaaaataaaaacaaaatggaaccctaaattaggatggttagcttccttctatgtatacccttttcactttttctttttcttttggaaaaagtaactaagtgttcgagctgcttgctttgtactgatgtcagtttccattaggcaatcacaacaattccacaaggaagcaggtcataagctggagtctaccttgctcctctttttatttgttttctttgcacccatgtccttcctctctgttttcaaaattcttttgttagaagagccatttaacagatgcaatattgtttatttgcggaatgtcaagtgatgggaaatactaagattataacattgtagatattatcatttggtaggttaccatagcccattacctatcttgaaaggattgaatactcaataatcacggcgaaacaggcggtgtcgatatactcaatttttatattctcataaacaagataaactttatcctccctgtatagcttaacatgatgtccctccatacgtacttatgtatcaatgcattgttggtttactattgttcacattcttaatcagcttataggttacgaatctcatttgttttcccttgcattttcccatgtttactgttgttcacattcttgaacaatttatagatcacgaatctcatttgttttctgttgcattttcgcatgttgaacaactaatttgaatcgtcaacaactcatttgaacaacctacgacttacgttgggaacatgtatgtttttcccaacaagcaatatgttatctatttattttccacactcatgacaaccacatatatcattttacttgctattttcggcatggtcacctgctattttctaatcggagcaaggtgaatcgcacattctgtaagttctattcgaaagaggtattttctatacaataaacaccatgaccacaccctgtgtatccacttatgtatctaagcaaattacatatatgtatatatgtacttcgaataagtgctcaattacataggattgataacgatgttatacatgaataaatatatgcatagagatcctacaatataaatgcacatgtatacacatatgttattgagtactcggatggtatttgatcttttcaaaaacaaaaacgggtgaaggttgttgtgctttaatagtctagatgtgcttttaaccctctttttatacaattgtggcattgctgatctaagtttgttacttcatccttatggcttagattctaattatccaacaatatcaatttatatgatctgaattccatactgatgtttgccataaataaactacttacattccaaaatataggttgtttttagttttttttagaaatgtatatcgtgtataataaaggattaacatgtatcaagatgcatatagcagccaacagacttctacatctgatactgaagaacatagatccaaatgtaatgctaaagaagaaatcacaaaggaccaaacaactagcactaggcaactcaaagcaaaagataatatgccttcgtttgaatctcctccaaaaagagtctttcatgtgatttgaacgctgcgccaacagaaacttggcttctaaatggagctggttgttgaaatgagaggacaaatgaggaatggactgaagtggttgcaacgtaggaaatcaggttgctttatgttacacatgttgtttggtggcaaaaatcagtggtccatcagtgcttcctatggccttcgtttcaaggaccgattcttcttcagtggatgctgacagctagacatcccgaaagtcatctggagagtatagctcggcacatgtagcctcctggagtcgttgacaactcagtgccatctgaatcataggacaactgaagcaaagcgagatagtaatggaagaagaattgaaaagatcaggctgcttgccatcatatatatatacatgggaggaggaggaatagcttcccttgctgtgaggacttgcggctcgacatcattctcactttcttcccacaatctcatggggtggatgatcgccatagccttctctccgacttccaggttctgtactcctaccaaggggcaacgtgaggtgtccacaggggcgaggccgtgcctccgtcccgccgcccccgacaatgatccccaccggcactttgtacgaaagcacaatattaggacttttttatgatcttttatcttttttatttgaaggcacaataggatccaaagaggtaggttcctttttgtcactgatttcatatacttgaataacatgtgttcggtttgaaagagcacataattgcattcctatttttagtccttacatgattactacatagttgtttaccggtttgaggtctgcagatctcaagctcgctcgcactgcagataccttgtagtttatttttttactgcattgcgactaggccttccaatttgacaaacacaattaagtagcttagttgtcactgacagttgatagtatcgttgtttcagattattacttcaatgcaaataaattatttctaatatatttttgagctcttagaatgcacatgattcaacctatactgcagcaaaattttggtactggtaccacaactttctgagagttaagtcattgtttctagcatttggcatgcaacctattgacttagttgacaagttgaagtctgtatagagaaattaatgataaaccactatgcaatataagacagatatcctatttcatcatttattggcatccttataaatcttgtgatgcttacccg

SEQ ID NO: 202966 - DNA, 3650 bp, Zea Mays
gggactgcaacatgatcaaagaggaaaaagtggaagccgccatcatctccatcaggtcgttctcgcttccgtcggtccatccaaggccatgctatcgacacctccgcagtcttcccatcctccagtacattttttcaactgcccgcgcggtagggaaggcaaagggtgggcatgtcgtcctctcctctgcaccacgtcatccacgacgatggtggaggagactgcttcagtcgccattcgttagtctccgttgctcctccacacgcttggtcgtcgtctctacggttggcccagctttgaataaagctaatttccctgcagcttttgaaaaagagttgctgaaaaaaaatcaggtgatccattatacactcatctttgttgtattattacactactattttgcttccaccatgaaattttaatatcttattggagtttgaataaaattttatatttgaatgtctttattttagctatctcacatgtggtggtcctgtaaattgtccattttttttaaaataaaaacaaaatggaaccctaaattaggatggttagcttccttctatgtatacccttttcactttttctttttcttttggaaaaagtaactaagtgttcgagctgcttgctttgtactgatgtcagtttccattaggcaatcacaacaattccacaaggaagcaggtcataagctggagtctaccttgctcctctttttatttgttttctttgcacccatgtccttcctctctgttttcaaaattcttttgttagaagagccatttaacagatgcaatattgtttatttgcggaatgtcaagtgatgggaaatactaagattataacattgtagatattatcatttggtaggttaccatagcccattacctatcttgaaaggattgaatactcaataatcacggcgaaacaggcggtgtcgatatactcaatttttatattctcataaacaagataaactttatcctccctgtatagcttaacatgatgtccctccatacgtacttatgtatcaatgcattgttggtttactattgttcacattcttaatcagcttataggttacgaatctcatttgttttcccttgcattttcccatgtttactgttgttcacattcttgaacaatttatagatcacgaatctcatttgttttctgttgcattttcgcatgttgaacaactaatttgaatcgtcaacaactcatttgaacaacctacgacttacgttgggaacatgtatgtttttcccaacaagcaatatgttatctatttattttccacactcatgacaaccacatatatcattttacttgctattttcggcatggtcacctgctattttctaatcggagcaaggtgaatcgcacattctgtaagttctattcgaaagaggtattttctatacaataaacaccatgaccacaccctgtgtatccacttatgtatctaagcaaattacatatatgtatatatgtacttcgaataagtgctcaattacataggattgataacgatgttatacatgaataaatatatgcatagagatcctacaatataaatgcacatgtatacacatatgttattgagtactcggatggtatttgatcttttcaaaaacaaaaacgggtgaaggttgttgtgctttaatagtctagatgtgcttttaaccctctttttatacaattgtggcattgctgatctaagtttgttacttcatccttatggcttagattctaattatccaacaatatcaatttatatgatctgaattccatactgatgtttgccataaataaactacttacattccaaaatataggttgtttttagttttttttagaaatgtatatcgtgtataataaaggattaacatgtatcaagatgcatatagcagccaacagacttctacatctgatactgaagaacatagatccaaatgtaatgctaaagaagaaatcacaaaggaccaaacaactagcactaggcaactcaaagcaaaagataatatgccttcgtttgaatctcctccaaaaagagtctttcatgtgatttgaacgctgcgccaacagaaacttggcttctaaatggagctggttgttgaaatgagaggacaaatgaggaatggactgaagtggttgcaacgtaggaaatcaggttgctttatgttacacatgttgtttggtggcaaaaatcagtggtccatcagtgcttcctatggccttcgtttcaaggaccgattcttcttcagtggatgctgacagctagacatcccgaaagtcatctggagagtatagctcggcacatgtagcctcctggagtcgttgacaactcagtgccatctgaatcataggacaactgaagcaaagcgagatagtaatggaagaagaattgaaaagatcaggctgcttgccatcatatatatatacatgggaggaggaggaatagtaagtacatcactccgcttttctgttttttggtgctctgctggatgaacaagaactgagctggaacaggagaagctggctacgtgagagcactggctgcctcgtccgaatccctcgtctgttgtttttttagtcgtatacacagacagaaacagactagacttgcttgaggttacactaggcacaacagccatggtggcggcccgccatgagcaagttgcttctagtgaggctggtggatgacgcggcgcgcggcgcccctggcgtagtgcgtcggcctatccgcgtgcctctactgctgggcgcgcgacgacaacgacggcgtggcggcggcccggggggagctgaagctcagcgccctgagcatctcgaggcttcccttgctgtgaggacttgcggctcgacatcattctcactttcttcccacaatctcatggggtggatgatcgccatagccttctctccgacttccaggttctgtactcctaccaaggggcaacgtgaggtgtccacaggggcgaggccgtgcctccgtcccgccgcccccgacaatgatccccaccggcactttgtacgaaagcacaatattaggacttttttatgatcttttatcttttttatttgaaggcacaataggatccaaagaggtaggttcctttttgtcactgatttcatatacttgaataacatgtgttcggtttgaaagagcacataattgcattcctatttttagtccttacatgattactacatagttgtttaccggtttgaggtctgcagatctcaagctcgctcgcactgcagataccttgtagtttatttttttactgcattgcgactaggccttccaatttgacaaacacaattaagtagcttagttgtcactgacagttgatagtatcgttgtttcagattattacttcaatgcaaataaattatttctaatatatttttgagctcttagaatgcacatgattcaacctatactgcagcaaaattttggtactggtaccacaactttctgagagttaagtcattgtttctagcatttggcatgcaacctattgacttagttgacaagttgaagtctgtatagagaaattaatgataaaccactatgcaatataagacagatatcctatttcatcatttattggcatccttataaatcttgtgatgcttacccg

SEQ ID NO: 202967 - DNA, 3277 bp, Zea Mays
gggactgcaacatgatcaaagaggaaaaagtggaagccgccatcatctccatcaggtcgttctcgcttccgtcggtccatccaaggccatgctatcgacacctccgcagtcttcccatcctccagtacattttttcaactgcccgcgcggtagggaaggcaaagggtgggcatgtcgtcctctcctctgcaccacgtcatccacgacgatggtggaggagactgcttcagtcgccattcgttagtctccgttgctcctccacacgcttggtcgtcgtctctacggttggcccagctttgaataaagctaatttccctgcagcttttgaaaaagagttgctgaaaaaaaatcaggtgatccattatacactcatctttgttgtattattacactactattttgcttccaccatgaaattttaatatcttattggagtttgaataaaattttatatttgaatgtctttattttagctatctcacatgtggtggtcctgtaaattgtccattttttttaaaataaaaacaaaatggaaccctaaattaggatggttagcttccttctatgtatacccttttcactttttctttttcttttggaaaaagtaactaagtgttcgagctgcttgctttgtactgatgtcagtttccattaggcaatcacaacaattccacaaggaagcaggtcataagctggagtctaccttgctcctctttttatttgttttctttgcacccatgtccttcctctctgttttcaaaattcttttgttagaagagccatttaacagatgcaatattgtttatttgcggaatgtcaagtgatgggaaatactaagattataacattgtagatattatcatttggtaggttaccatagcccattacctatcttgaaaggattgaatactcaataatcacggcgaaacaggcggtgtcgatatactcaatttttatattctcataaacaagataaactttatcctccctgtatagcttaacatgatgtccctccatacgtacttatgtatcaatgcattgttggtttactattgttcacattcttaatcagcttataggttacgaatctcatttgttttcccttgcattttcccatgtttactgttgttcacattcttgaacaatttatagatcacgaatctcatttgttttctgttgcattttcgcatgttgaacaactaatttgaatcgtcaacaactcatttgaacaacctacgacttacgttgggaacatgtatgtttttcccaacaagcaatatgttatctatttattttccacactcatgacaaccacatatatcattttacttgctattttcggcatggtcacctgctattttctaatcggagcaaggtgaatcgcacattctgtaagttctattcgaaagaggtattttctatacaataaacaccatgaccacaccctgtgtatccacttatgtatctaagcaaattacatatatgtatatatgtacttcgaataagtgctcaattacataggattgataacgatgttatacatgaataaatatatgcatagagatcctacaatataaatgcacatgtatacacatatgttattgagtactcggatggtatttgatcttttcaaaaacaaaaacgggtgaaggttgttgtgctttaatagtctagatgtgcttttaaccctctttttatacaattgtggcattgctgatctaagtttgttacttcatccttatggcttagattctaattatccaacaatatcaatttatatgatctgaattccatactgatgtttgccataaataaactacttacattccaaaatataggttgtttttagttttttttagaaatgtatatcgtgtataataaaggattaacatgtatcaagatgcatatagcagccaacagacttctacatctgatactgaagaacatagatccaaatgtaatgctaaagaagaaatcacaaaggaccaaacaactagcactaggcaactcaaagcaaaagataatatgccttcgtttgaatctcctccaaaaagagtctttcatgtgatttgaacgctgcgccaacagaaacttggcttctaaatggagctggttgttgaaatgagaggacaaatgaggaatggactgaagtggttgcaacgtaggaaatcaggttgctttatgttacacatgttgtttggtggcaaaaatcagtggtccatcagtgcttcctatggccttcgtttcaaggaccgattcttcttcagtggatgctgacagctagacatcccgaaagtcatctggagagtatagctcggcacatgtagcctcctggagtcgttgacaactcagtgccatctgaatcataggacaactgaagcaaagcgagatagtaatggaagaagaattgaaaagatcaggctgcttgccatcatatatatatacatgggaggaggaggaatagcttcccttgctgtgaggacttgcggctcgacatcattctcactttcttcccacaatctcatggggtggatgatcgccatagccttctctccgacttccaggttctgtactcctaccaaggggcaacgtgaggtgtccacaggggcgaggccgtgcctccgtcccgccgcccccgacaatgatccccaccggcactttgtacgaaagcacaatattaggacttttttatgatcttttatcttttttatttgaaggcacaataggatccaaagaggtaggttcctttttgtcactgatttcatatacttgaataacatgtgttcggtttgaaagagcacataattgcattcctatttttagtccttacatgattactacatagttgtttaccggtttgaggtctgcagatctcaagctcgctcgcactgcagataccttgtagtttatttttttactgcattgcgactaggccttccaatttgacaaacacaattaagtagcttagttgtcactgacagttgatagtatcgttgtttcagattattacttcaatgcaaataaattatttctaatatatttttgagctcttagaatgcacatgattcaacctatactgcagcaaaattttggtactggtaccacaactttctgagagttaagtcattgtttctagcatttggcatgcaacctattgacttagttgacaagttgaagtctgtatagagaaattaatgataaaccactatgcaatataagacagatatcctatttcatcatttattggcatccttataaatcttgtgatgcttacccg

SEQ ID NO: 202968 - DNA, 3353 bp, Zea Mays
gggactgcaacatgatcaaagaggaaaaagtggaagccgccatcatctccatcaggtcgttctcgcttccgtcggtccatccaaggccatgctatcgacacctccgcagtcttcccatcctccagtacattttttcaactgcccgcgcggtagggaaggcaaagggtgggcatgtcgtcctctcctctgcaccacgtcatccacgacgatggtggaggagactgcttcagtcgccattcgttagtctccgttgctcctccacacgcttggtcgtcgtctctacggttggcccagcttttgaaaaagagttgctgaaaaaaaatcaggtgatccattatacactcatctttgttgtattattacactactattttgcttccaccatgaaattttaatatcttattggagtttgaataaaattttatatttgaatgtctttattttagctatctcacatgtggtggtcctgtaaattgtccattttttttaaaataaaaacaaaatggaaccctaaattaggatggttagcttccttctatgtatacccttttcactttttctttttcttttggaaaaagtaactaagtgttcgagctgcttgctttgtactgatgtcagtttccattaggcaatcacaacaattccacaaggaagcaggtcataagctggagtctaccttgctcctctttttatttgttttctttgcacccatgtccttcctctctgttttcaaaattcttttgttagaagagccatttaacagatgcaatattgtttatttgcggaatgtcaagtgatgggaaatactaagattataacattgtagatattatcatttggtaggttaccatagcccattacctatcttgaaaggattgaatactcaataatcacggcgaaacaggcggtgtcgatatactcaatttttatattctcataaacaagataaactttatcctccctgtatagcttaacatgatgtccctccatacgtacttatgtatcaatgcattgttggtttactattgttcacattcttaatcagcttataggttacgaatctcatttgttttcccttgcattttcccatgtttactgttgttcacattcttgaacaatttatagatcacgaatctcatttgttttctgttgcattttcgcatgttgaacaactaatttgaatcgtcaacaactcatttgaacaacctacgacttacgttgggaacatgtatgtttttcccaacaagcaatatgttatctatttattttccacactcatgacaaccacatatatcattttacttgctattttcggcatggtcacctgctattttctaatcggagcaaggtgaatcgcacattctgtaagttctattcgaaagaggtattttctatacaataaacaccatgaccacaccctgtgtatccacttatgtatctaagcaaattacatatatgtatatatgtacttcgaataagtgctcaattacataggattgataacgatgttatacatgaataaatatatgcatagagatcctacaatataaatgcacatgtatacacatatgttattgagtactcggatggtatttgatcttttcaaaaacaaaaacgggtgaaggttgttgtgctttaatagtctagatgtgcttttaaccctctttttatacaattgtggcattgctgatctaagtttgttacttcatccttatggcttagattctaattatccaacaatatcaatttatatgatctgaattccatactgatgtttgccataaataaactacttacattccaaaatataggttgtttttagttttttttagaaatgtatatcgtgtataataaaggattaacatgtatcaagatgcatatagcagccaacagacttctacatctgatactgaagaacatagatccaaatgtaatgctaaagaagaaatcacaaaggtacagttcctccaccttattccaaaaactaatgaccagaaaggtagaaatgcatcaacaaaatgagcacataaaaaagcccactacatttttccttctgcaggaccaaacaactagcactaggcaactcaaagcaaaagataatatgccttcgtttgaatctcctccaaaaagagtctttcatgtgatttgaacgctgcgccaacagaaacttggcttctaaatggagctggttgttgaaatgagaggacaaatgaggaatggactgaagtggttgcaacgtaggaaatcaggttgctttatgttacacatgttgtttggtggcaaaaatcagtggtccatcagtgcttcctatggccttcgtttcaaggaccgattcttcttcagtggatgctgacagctagacatcccgaaagtcatctggagagtatagctcggcacatgtagcctcctggagtcgttgacaactcagtgccatctgaatcataggacaactgaagcaaagcgagatagtaatggaagaagaattgaaaagatcaggctgcttgccatcatatatatatacatgggaggaggaggaatagcttcccttgctgtgaggacttgcggctcgacatcattctcactttcttcccacaatctcatggggtggatgatcgccatagccttctctccgacttccaggttctgtactcctaccaaggggcaacgtgaggtgtccacaggggcgaggccgtgcctccgtcccgccgcccccgacaatgatccccaccggcactttgtacgaaagcacaatattaggacttttttatgatcttttatcttttttatttgaaggcacaataggatccaaagaggtaggttcctttttgtcactgatttcatatacttgaataacatgtgttcggtttgaaagagcacataattgcattcctatttttagtccttacatgattactacatagttgtttaccggtttgaggtctgcagatctcaagctcgctcgcactgcagataccttgtagtttatttttttactgcattgcgactaggccttccaatttgacaaacacaattaagtagcttagttgtcactgacagttgatagtatcgttgtttcagattattacttcaatgcaaataaattatttctaatatatttttgagctcttagaatgcacatgattcaacctatactgcagcaaaattttggtactggtaccacaactttctgagagttaagtcattgtttctagcatttggcatgcaacctattgacttagttgacaagttgaagtctgtatagagaaattaatgataaaccactatgcaatataagacagatatcctatttcatcatttattggcatccttataaatcttgtgatgcttacccg

SEQ ID NO: 202969 - DNA, 3678 bp, Zea Mays
gggactgcaacatgatcaaagaggaaaaagtggaagccgccatcatctccatcaggtcgttctcgcttccgtcggtccatccaaggccatgctatcgacacctccgcagtcttcccatcctccagtacattttttcaactgcccgcgcggtagggaaggcaaagggtgggcatgtcgtcctctcctctgcaccacgtcatccacgacgatggtggaggagactgcttcagtcgccattcgttagtctccgttgctcctccacacgcttggtcgtcgtctctacggttggcccaggaatggaggtcgtcaattcaggtcgagtaggagcactctacggctccgcattgctactggtggtccaataatcacaccttcatgatttagtggatttccctcatccatatctccactaacattagaatattccttatcccatcgtcatgaggtcttcctacttttggtctctaaattgtgtatgccttttggagtaatttgctttgtttcgatgcctacatgttagctttgaataaagctaatttccctgcagcttttgaaaaagagttgctgaaaaaaaatcaggtgatccattatacactcatctttgttgtattattacactactattttgcttccaccatgaaattttaatatcttattggagtttgaataaaattttatatttgaatgtctttattttagctatctcacatgtggtggtcctgtaaattgtccattttttttaaaataaaaacaaaatggaaccctaaattaggatggttagcttccttctatgtatacccttttcactttttctttttcttttggaaaaagtaactaagtgttcgagctgcttgctttgtactgatgtcagtttccattaggcaatcacaacaattccacaaggaagcaggtcataagctggagtctaccttgctcctctttttatttgttttctttgcacccatgtccttcctctctgttttcaaaattcttttgttagaagagccatttaacagatgcaatattgtttatttgcggaatgtcaagtgatgggaaatactaagattataacattgtagatattatcatttggtaggttaccatagcccattacctatcttgaaaggattgaatactcaataatcacggcgaaacaggcggtgtcgatatactcaatttttatattctcataaacaagataaactttatcctccctgtatagcttaacatgatgtccctccatacgtacttatgtatcaatgcattgttggtttactattgttcacattcttaatcagcttataggttacgaatctcatttgttttcccttgcattttcccatgtttactgttgttcacattcttgaacaatttatagatcacgaatctcatttgttttctgttgcattttcgcatgttgaacaactaatttgaatcgtcaacaactcatttgaacaacctacgacttacgttgggaacatgtatgtttttcccaacaagcaatatgttatctatttattttccacactcatgacaaccacatatatcattttacttgctattttcggcatggtcacctgctattttctaatcggagcaaggtgaatcgcacattctgtaagttctattcgaaagaggtattttctatacaataaacaccatgaccacaccctgtgtatccacttatgtatctaagcaaattacatatatgtatatatgtacttcgaataagtgctcaattacataggattgataacgatgttatacatgaataaatatatgcatagagatcctacaatataaatgcacatgtatacacatatgttattgagtactcggatggtatttgatcttttcaaaaacaaaaacgggtgaaggttgttgtgctttaatagtctagatgtgcttttaaccctctttttatacaattgtggcattgctgatctaagtttgttacttcatccttatggcttagattctaattatccaacaatatcaatttatatgatctgaattccatactgatgtttgccataaataaactacttacattccaaaatataggttgtttttagttttttttagaaatgtatatcgtgtataataaaggattaacatgtatcaagatgcatatagcagccaacagacttctacatctgatactgaagaacatagatccaaatgtaatgctaaagaagaaatcacaaaggtacagttcctccaccttattccaaaaactaatgaccagaaaggtagaaatgcatcaacaaaatgagcacataaaaaagcccactacatttttccttctgcaggaccaaacaactagcactaggcaactcaaagcaaaagataatatgccttcgtttgaatctcctccaaaaagagtctttcatgtgatttgaacgctgcgccaacagaaacttggcttctaaatggagctggttgttgaaatgagaggacaaatgaggaatggactgaagtggttgcaacgtaggaaatcaggttgctttatgttacacatgttgtttggtggcaaaaatcagtggtccatcagtgcttcctatggccttcgtttcaaggaccgattcttcttcagtggatgctgacagctagacatcccgaaagtcatctggagagtatagctcggcacatgtagcctcctggagtcgttgacaactcagtgccatctgaatcataggacaactgaagcaaagcgagatagtaatggaagaagaattgaaaagatcaggctgcttgccatcatatatatatacatgggaggaggaggaataatatgatatgctgatgaggaatattccctcgtgatgacatttctagatttgttttagttctaaatacaaaaggcttcccttgctgtgaggacttgcggctcgacatcattctcactttcttcccacaatctcatggggtggatgatcgccatagccttctctccgacttccaggttctgtactcctaccaaggggcaacgtgaggtgtccacaggggcgaggccgtgcctccgtcccgccgcccccgacaatgatccccaccggcactttgtacgaaagcacaatattaggacttttttatgatcttttatcttttttatttgaaggcacaataggatccaaagaggtaggttcctttttgtcactgatttcatatacttgaataacatgtgttcggtttgaaagagcacataattgcattcctatttttagtccttacatgattactacatagttgtttaccggtttgaggtctgcagatctcaagctcgctcgcactgcagataccttgtagtttatttttttactgcattgcgactaggccttccaatttgacaaacacaattaagtagcttagttgtcactgacagttgatagtatcgttgtttcagattattacttcaatgcaaataaattatttctaatatatttttgagctcttagaatgcacatgattcaacctatactgcagcaaaattttggtactggtaccacaactttctgagagttaagtcattgtttctagcatttggcatgcaacctattgacttagttgacaagttgaagtctgtatagagaaattaatgataaaccactatgcaatataagacagatatcctatttcatcatttattggcatccttataaatcttgtgatgcttacccg

SEQ ID NO: 202970 - DNA, 3987 bp, Zea Mays
gggactgcaacatgatcaaagaggaaaaagtggaagccgccatcatctccatcaggtcgttctcgcttccgtcggtccatccaaggccatgctatcgacacctccgcagtcttcccatcctccagtacattttttcaactgcccgcgcggtagggaaggcaaagggtgggcatgtcgtcctctcctctgcaccacgtcatccacgacgatggtggaggagactgcttcagtcgccattcgttagtctccgttgctcctccacacgcttggtcgtcgtctctacggttggcccaggaatggaggtcgtcaattcaggtcgagtaggagcactctacggctccgcattgctactggtggtccaataatcacaccttcatgatttagtggatttccctcatccatatctccactaacattagaatattccttatcccatcgtcatgaggtcttcctacttttggtctctaaattgtgtatgccttttggagtaatttgctttgtttcgatgcctacatgttagctttgaataaagctaatttccctgcagcttttgaaaaagagttgctgaaaaaaaatcaggtgatccattatacactcatctttgttgtattattacactactattttgcttccaccatgaaattttaatatcttattggagtttgaataaaattttatatttgaatgtctttattttagctatctcacatgtggtggtcctgtaaattgtccattttttttaaaataaaaacaaaatggaaccctaaattaggatggttagcttccttctatgtatacccttttcactttttctttttcttttggaaaaagtaactaagtgttcgagctgcttgctttgtactgatgtcagtttccattaggcaatcacaacaattccacaaggaagcaggtcataagctggagtctaccttgctcctctttttatttgttttctttgcacccatgtccttcctctctgttttcaaaattcttttgttagaagagccatttaacagatgcaatattgtttatttgcggaatgtcaagtgatgggaaatactaagattataacattgtagatattatcatttggtaggttaccatagcccattacctatcttgaaaggattgaatactcaataatcacggcgaaacaggcggtgtcgatatactcaatttttatattctcataaacaagataaactttatcctccctgtatagcttaacatgatgtccctccatacgtacttatgtatcaatgcattgttggtttactattgttcacattcttaatcagcttataggttacgaatctcatttgttttcccttgcattttcccatgtttactgttgttcacattcttgaacaatttatagatcacgaatctcatttgttttctgttgcattttcgcatgttgaacaactaatttgaatcgtcaacaactcatttgaacaacctacgacttacgttgggaacatgtatgtttttcccaacaagcaatatgttatctatttattttccacactcatgacaaccacatatatcattttacttgctattttcggcatggtcacctgctattttctaatcggagcaaggtgaatcgcacattctgtaagttctattcgaaagaggtattttctatacaataaacaccatgaccacaccctgtgtatccacttatgtatctaagcaaattacatatatgtatatatgtacttcgaataagtgctcaattacataggattgataacgatgttatacatgaataaatatatgcatagagatcctacaatataaatgcacatgtatacacatatgttattgagtactcggatggtatttgatcttttcaaaaacaaaaacgggtgaaggttgttgtgctttaatagtctagatgtgcttttaaccctctttttatacaattgtggcattgctgatctaagtttgttacttcatccttatggcttagattctaattatccaacaatatcaatttatatgatctgaattccatactgatgtttgccataaataaactacttacattccaaaatataggttgtttttagttttttttagaaatgtatatcgtgtataataaaggattaacatgtatcaagatgcatatagcagccaacagacttctacatctgatactgaagaacatagatccaaatgtaatgctaaagaagaaatcacaaaggaccaaacaactagcactaggcaactcaaagcaaaagataatatgccttcgtttgaatctcctccaaaaagagtctttcatgtgatttgaacgctgcgccaacagaaacttggcttctaaatggagctggttgttgaaatgagaggacaaatgaggaatggactgaagtggttgcaacgtaggaaatcaggttgctttatgttacacatgttgtttggtggcaaaaatcagtggtccatcagtgcttcctatggccttcgtttcaaggaccgattcttcttcagtggatgctgacagctagacatcccgaaagtcatctggagagtatagctcggcacatgtagcctcctggagtcgttgacaactcagtgccatctgaatcataggacaactgaagcaaagcgagatagtaatggaagaagaattgaaaagatcaggctgcttgccatcatatatatatacatgggaggaggaggaatagtaagtacatcactccgcttttctgttttttggtgctctgctggatgaacaagaactgagctggaacaggagaagctggctacgtgagagcactggctgcctcgtccgaatccctcgtctgttgtttttttagtcgtatacacagacagaaacagactagacttgcttgaggttacactaggcacaacagccatggtggcggcccgccatgagcaagttgcttctagtgaggctggtggatgacgcggcgcgcggcgcccctggcgtagtgcgtcggcctatccgcgtgcctctactgctgggcgcgcgacgacaacgacggcgtggcggcggcccggggggagctgaagctcagcgccctgagcatctcgagccgatgcctacatgcctccggtgtgagcccgatgacgagtctgggcagtagtgtagtcattcaaccttgcgttttgtaggtcttccctcaagtggagaaggagagaaaagtgcttcccttgctgtgaggacttgcggctcgacatcattctcactttcttcccacaatctcatggggtggatgatcgccatagccttctctccgacttccaggttctgtactcctaccaaggggcaacgtgaggtgtccacaggggcgaggccgtgcctccgtcccgccgcccccgacaatgatccccaccggcactttgtacgaaagcacaatattaggacttttttatgatcttttatcttttttatttgaaggcacaataggatccaaagaggtaggttcctttttgtcactgatttcatatacttgaataacatgtgttcggtttgaaagagcacataattgcattcctatttttagtccttacatgattactacatagttgtttaccggtttgaggtctgcagatctcaagctcgctcgcactgcagataccttgtagtttatttttttactgcattgcgactaggccttccaatttgacaaacacaattaagtagcttagttgtcactgacagttgatagtatcgttgtttcagattattacttcaatgcaaataaattatttctaatatatttttgagctcttagaatgcacatgattcaacctatactgcagcaaaattttggtactggtaccacaactttctgagagttaagtcattgtttctagcatttggcatgcaacctattgacttagttgacaagttgaagtctgtatagagaaattaatgataaaccactatgcaatataagacagatatcctatttcatcatttattggcatccttataaatcttgtgatgcttacccg

SEQ ID NO: 202971 - DNA, 4739 bp, Zea Mays
gggactgcaacatgatcaaagaggaaaaagtggaagccgccatcatctccatcaggtcgttctcgcttccgtcggtccatccaaggccatgctatcgacacctccgcagtcttcccatcctccagtacattttttcaactgcccgcgcggtagggaaggcaaagggtgggcatgtcgtcctctcctctgcaccacgtcatccacgacgatggtggaggagactgcttcagtcgccattcgttagtctccgttgctcctccacacgcttggtcgtcgtctctacggttggcccagctttgaataaagctaatttccctgcagcttttgaaaaagagttgctgaaaaaaaatcaggtgatccattatacactcatctttgttgtattattacactactattttgcttccaccatgaaattttaatatcttattggagtttgaataaaattttatatttgaatgtctttattttagctatctcacatgtggtggtcctgtaaattgtccattttttttaaaataaaaacaaaatggaaccctaaattaggatggttagcttccttctatgtatacccttttcactttttctttttcttttggaaaaagtaactaagtgttcgagctgcttgctttgtactgatgtcagtttccattaggcaatcacaacaattccacaaggaagcaggtcataagctggagtctaccttgctcctctttttatttgttttctttgcacccatgtccttcctctctgttttcaaaattcttttgttagaagagccatttaacagatgcaatattgtttatttgcggaatgtcaagtgatgggaaatactaagattataacattgtagatattatcatttggtaggttaccatagcccattacctatcttgaaaggattgaatactcaataatcacggcgaaacaggcggtgtcgatatactcaatttttatattctcataaacaagataaactttatcctccctgtatagcttaacatgatgtccctccatacgtacttatgtatcaatgcattgttggtttactattgttcacattcttaatcagcttataggttacgaatctcatttgttttcccttgcattttcccatgtttactgttgttcacattcttgaacaatttatagatcacgaatctcatttgttttctgttgcattttcgcatgttgaacaactaatttgaatcgtcaacaactcatttgaacaacctacgacttacgttgggaacatgtatgtttttcccaacaagcaatatgttatctatttattttccacactcatgacaaccacatatatcattttacttgctattttcggcatggtcacctgctattttctaatcggagcaaggtgaatcgcacattctgtaagttctattcgaaagaggtattttctatacaataaacaccatgaccacaccctgtgtatccacttatgtatctaagcaaattacatatatgtatatatgtacttcgaataagtgctcaattacataggattgataacgatgttatacatgaataaatatatgcatagagatcctacaatataaatgcacatgtatacacatatgttattgagtactcggatggtatttgatcttttcaaaaacaaaaacgggtgaaggttgttgtgctttaatagtctagatgtgcttttaaccctctttttatacaattgtggcattgctgatctaagtttgttacttcatccttatggcttagattctaattatccaacaatatcaatttatatgatctgaattccatactgatgtttgccataaataaactacttacattccaaaatataggttgtttttagttttttttagaaatgtatatcgtgtataataaaggattaacatgtatcaagatgcatatagcagccaacagacttctacatctgatactgaagaacatagatccaaatgtaatgctaaagaagaaatcacaaaggaccaaacaactagcactaggcaactcaaagcaaaagataatatgccttcgtttgaatctcctccaaaaagagtctttcatgtgatttgaacgctgcgccaacagaaacttggcttctaaatggagctggttgttgaaatgagaggacaaatgaggaatggactgaagtggttgcaacgtaggaaatcaggttgctttatgttacacatgttgtttggtggcaaaaatcagtggtccatcagtgcttcctatggccttcgtttcaaggaccgattcttcttcagtggatgctgacagctagacatcccgaaagtcatctggagagtatagctcggcacatgtagcctcctggagtcgttgacaactcagtgccatctgaatcataggacaactgaagcaaagcgagatagtaatggaagaagaattgaaaagatcaggctgcttgccatcatatatatatacatgggaggaggaggaatagtaagtacatcactccgcttttctgttttttggtgctctgctggatgaacaagaactgagctggaacaggagaagctggctacgtgagagcactggctgcctcgtccgaatccctcgtctgttgtttttttagtcgtatacacagacagaaacagactagacttgcttgaggttacactaggcacaacagccatggtggcggcccgccatgagcaagttgcttctagtgaggctggtggatgacgcggcgcgcggcgcccctggcgtagtgcgtcggcctatccgcgtgcctctactgctgggcgcgcgacgacaacgacggcgtggcggcggcccggggggagctgaagctcagcgccctgagcatctcgaggttgtttcgttaatgatatatagttgaaattcctcgggatatcatagcattatgtttgctaggtatcggtggttttagttttgtatatccatgtatattagagtgatgtatcaagcatcttataaatgaattatgtctacaatcggccaacttttattttgattgaggtaaattccatggaagcatcttgggtctgctgcttgatctttatagttcacactttggatggttctggagccataatagaccagattcaatggatggatttttttggctaaaggctattgtcgtcctgagtcctgacggtgctgttcctttttatagttcacatagatgtgaattttaaatgttcaattataattttatacgctatagtaatttttttctacaatctggtcatttaagctcagcttttccttcggggtgaattctgagtgaagttccaaaaataataaaaattctttctcatccctgctctgaccatttagacacacattatgatcactactgagtactgagactgacatttctagatatgatatgctgatgaggaatattccctcgtgatgacatttctagatttgttttagttctaaatacaaaaggtgagcaagagtatggattttgacatataattttttttttaaaatttcaatcatgttgggatatgctagaattaggcataccttcttattaactggctaactttactgtaaaagtgcaattagatacttatgtataccaaacattctagaagagttttatggtggtacgacccagtcgttatcatcctgcccgattgattgagccatgtactgatttttttatctttatgcatattatcagattgttaggtgccacacaagatcggcctaggtctgttatatgcaatgtctatggtgcctacatgccttttgtatttgctaaaaacagtaaaatcaatatttacaatttaaatagttgtgctcttgttctcagccgatgcctacatgcctccggtgtgagcccgatgacgagtctgggcagtagtgtagtcattcaaccttgcgttttgtaggtcttccctcaagtggagaaggagagaaaagtgcttcccttgctgtgaggacttgcggctcgacatcattctcactttcttcccacaatctcatggggtggatgatcgccatagccttctctccgacttccaggttctgtactcctaccaaggggcaacgtgaggtgtccacaggggcgaggccgtgcctccgtcccgccgcccccgacaatgatccccaccggcactttgtacgaaagcacaatattaggacttttttatgatcttttatcttttttatttgaaggcacaataggatccaaagaggtaggttcctttttgtcactgatttcatatacttgaataacatgtgttcggtttgaaagagcacataattgcattcctatttttagtccttacatgattactacatagttgtttaccggtttgaggtctgcagatctcaagctcgctcgcactgcagataccttgtagtttatttttttactgcattgcgactaggccttccaatttgacaaacacaattaagtagcttagttgtcactgacagttgatagtatcgttgtttcagattattacttcaatgcaaataaattatttctaatatatttttgagctcttagaatgcacatgattcaacctatactgcagcaaaattttggtactggtaccacaactttctgagagttaagtcattgtttctagcatttggcatgcaacctattgacttagttgacaagttgaagtctgtatagagaaattaatgataaaccactatgcaatataagacagatatcctatttcatcatttattggcatccttataaatcttgtgatgcttacccg

SEQ ID NO: 202972 - DNA, 1223 bp, Zea Mays
atccatcagtgtggactgtcgaaccgggggatgggttgggacgttgggtcctggtccacgtgaccacgtctagcagtagcagactagcaggctctcgaaactcacgttcccgtgtcgctcaactggcacaggactggacccgtcccgtacggcatcgcaccccgcagccgcaggccgcatcttcctcgcgtgctctgccctctgtgcctgcccatccgttgatcccatcggcttccccttcctcttccccgatccccttcctcccccgatcccatccaattccacttccacaccgcgggcctcgccgccgacgccgacgccgccggccatgtccaagtacggcaccattcccacctcctcctccgcgggcggagggcccgtgcccctcggcggcgcctccccgctcgatttcatctcccgcgccaaggctcggggcgcctcggcgctggcgacgcgccggccctggcgcgagctcgtggacgtccacgccgtcggcctgcccccgagcctcggcgacgcgtacctccgcgtgcgcgccaacctcgcccacttcgccatgaactatgccatcgtcgtcctcgtcgtcgtcttcctctccctcctctggcaccccgtctccctcatcgtattcctcgtctgcatgcttgcctggctcgtcctctacttcctccgcgacgagcccctcgtcctcttcggccgcgtcgtcgccgacggctacgtcctcgccgtgctcgccgtcgtcacgctcgtcctgctcctcctcaccgacgccaccgccaacatcctctcctcgctgctcatcggcctcgtgctcgtcctcgtccacgccgcgctgcacaaggcggaggacaacgccgccgacgaggctgaccgctggtacgcgccggtgtcacagcagccgtcgcactgagtctgcagatatttctgtgttatggtaattgccggaggaaatgcatctgttcaacccttgcctaaatttatgttgagggcgaaagtagtctgactgttaacatgatatttatctacagacttttctaactgtgccatacatgtcttctttgttgaatactgacaacccaggaatgaaatgtcaataatctcattcctgcatccagagatttcacttatcgagtttcattgacctgctcataatactattatgtaatggatcacgtgagctgtgtttgtgtttgatcgatcgcttatcaaagattctgctgctt

SEQ ID NO: 202973 - DNA, 326 bp, Zea Mays
atgcagattcaccgggatgcaaatggatctacattattgaagggatttaggaaaccatcaccgaacaacaacctattagagggctctcttctgaagcaactagcaaataagagtatcagtggtggtgtagctgctgttctagctgaaagggacaaggaagagatggagatggacatagcaaagctagaagttggctccatggaaacatctgtaatatgtaggagtgacggtcctctaattctagcatacttgaggaagcctcgacaaacctgaagtttgaacgtatgacagatgacatcttggttacttttgtggatggacatctt

SEQ ID NO: 202974 - DNA, 1365 bp, Zea Mays
agtgacggttttattaagaaatcgctattaaaaatagcacagacggttgataactgaatccacatgtaaaaatatattgtcctgtagattttaagcttttttttactagtgatgagctctgccacacttgaaaccatccaaattctccaccgcatccacctcgatcctcttgttggcagcaccagcagcgtcctcgtattgagttcatagcagcgaagccatcatcataatgatttcagccactgttcttgtatgtacatgtagaatccgtatgttctgtcctcgcccccctgtggatcaagcacaggcccggcaatcgcagcggcggcgaacatggcggcagtgacgctaggaacagaaaccgacgggtccatactctgcccatcctcgttgaactccgtggtaggaatcaagccgacggtgggactcacgagccgggccggcgtcatccccgtctctccgcggcaggacacagtcgggccgatctgccgcacagtggctgacgccgtccacgtgctcgatgcgatcgtgggctacgacgaacctgacgcggtggctacgggagcagcggccaaatacatccctgacggtggatacgcgcagttcctcaagatggatgggttgcggggcaagcgaattggcgtcccagctgggttcttcggcttcccagatggatccgtcaggcagatggtgtaccagcagcacctcgacacgctcaggcgacatggagcggtggtgacagaggacctttcgattgcgaacctggatgtgatacagaacgccactgtgagtggggagctggcagctctagcagcagagttcaagatcgccctgaacgcatatctgtcgtccgatctgtcacgctcccccgtggcctccctggctgaactaatagtgttcaacaatgcgcacccggatgaggagatgctcaaacagttcgggcaactcatcttcttggtggcccagaacaccaccggcatcggcgcggcagagacggcggcgatccagcagctggacgatctgacggcgggtggcgtggagaaggtgatgcggcagcaccagctggatgccatcgtggcgccagactcgagctcggccacggtcctcgccatcggtggcctccctgggatcgccgttccggctggctacgatgagctgggagcaccctttggtatcaccttcggcgggctcaagggctatgagtcaaggctgattgagatcgcgtatgcgtttgagcaggctactaaggcaaggaagcctcccatgttcaagaactagagaacatatatacatatatatatactattcaccatctaaggtgatgaattcaacagtgcataagcatatcacgtggctcttttctcc

SEQ ID NO: 202975 - DNA, 2800 bp, Zea Mays
gtttttggcttgttctcccactaacgcttggcgactcacgagtcgagggtttctctcctgcgcggcggctacctctctccacggcggcggcgggcgatcctgcagatcccgcggctccctccgcgattcgagtcagactcagatgggggaaggcacagagagcggcggcggggcgaccacagcgccgcctctgaggtatataaggtgctacaagtgcgggttctgcgacgtggtccggtccaagaagtgcttgctccgcgcccacgtgcttgagcaccacaaggatgaggtggatgctttggggggttactgggaaggtggagatgctggtccgcgcaaagagatcagccgtgcgtgcgaacagtgcgggatgagcttcaagaagcaggcgcatctgaagcaacatatgcagagccattcgctcgagatacagatgtgtgaagcattggatctcaaagaactccaaaatgcgagaaggccttgaacggactagtaccaggatggggagaccctcctgagaagctccatcaagagttccttcattcacgctattcttcaggttgtgtgttctgagctattctgagctgcttgctgctttttttgttattatgttcctgtcacatgacatatgctaaaggtctagtctgagattgcgatgccacttttttcaacaagttgggcgtctgctgttctagtcatatttgataattgatgaatttacactgcaatgctgtttgagtatatctagctgtcaccgtttgatggccctcattattgacaggatagatttagcaggcatagagagacacaattcctgttctgcatagtttatgtgctcgactttagttatgtgttcactgaaatgattggatcatgatcttccttagttgaattatacatttcatgcaaaaatcaaattaattttcatttgaaggtgagttatgcggatacggtgtgctgctatttgcccctgtatttggggactggtgtacgacatttgatttgctggtttttgtaggcaatttgttgacatatgaatgcgtgaagcattggatcccaaagaactccaaaatgcgataaggccttgaatggactagtatcaggattgggagaccatcctgagaagctccatcaagcatgccttgttcacgcgtttcttaaggtttgctcatttcgttccagccttctcattctaagatttttccttttatgttattatttacttgcacttttataattgtattttctattattttcacaccacttaaagctcatgttgtagcatgcctggttgcactttgtggtactgtttgcatctctattactttatttgtatcaaacctttttttaggtactatatagtgatacatgtctttccaaaactactgcagaggcccttttcctgcactgttgatggttgcccctttagctatagcaggaaggatcatttgaacagacatttacttactcatgaagggaaactatttgtgtgccctgtcgaaggatgtggccgtaagttcaatatcaagggtaatatgcagagacatgttcaggaaatccacaaagatgtctctccttgtgaaagcaagaaagaattcatctgtccaaaggttaactgtgggaaggctttcaaatatgcttctaagttaaagaagcacgaagaatcacatgtccagctggaatacacagaagttatgtgctgtgagccaggctgcatgaagttcttttcaaacatggaatgcctgaaggcgcataaccaatcttgccatcaatatgttcagtgtgatatctgtggtacgaaacagctaaagaagaatttccagcgccatcatcggatgcatgaaggttcctgcgtcactgagagggttaaatgccacatcgaggactgcaaatgttcgttctcgaagaaatccaatttggacaagcatgttaaggcggtacatgagcagcgtcgtccttttgtgtgccaattctctgggtgtggcaagaggttttcttacaagcacgtaagggacaatcatgagaagtcaagcgctcatgtgcacactgagggtgattttgtcgaggctgatgagcagcggccacgttcagtaggtgggtgcaagaggaaacccgtatctgttgagagtttgatgcgtaagagggtagccgctcctgacgatgggcctgctcatgctgatgcaactgaatatttgagatggcttctgtcggtttgattggacgttcaagtgcactttgtgtagttggaaacatcagcgatttacttggcatgtataggaagatgaatgtctctagtatgttatgtaaatgtttatgtacggtatcagaaatacagatcattggacctcaattataaaggcaatatgctgtattggcaagatcttgaatgtaagagcggttgctcatgatcattagatctatgtgtcttcagcacagcttggcaacatgttttggtatgttcgcagttgcagtgtctttgcctttttttgcctcctgctggttgcaggtgaaaattggattcatgattcttgaatgctcttatgtaacaacaaaaatatctgttcagttctcattgtgcagaaccacagcactcttcattccgatttgcagatgcacgtgaccaaaaaagataatttgcagatgcaccatgaacccgtggcaccagatgcccgtcagcagctggcacccgtccagctcgcgccggagagcctccaggcggaccagctccgccgccccgcggatcgattggactagcgacgaggccgagatgcgcacggacgtcatcggcggcggcgatggc

SEQ ID NO: 202976 - DNA, 2853 bp, Zea Mays
gttgtttttggcttgttctcccactaacgcttggcgactcacgagtcgagggtttctctcctgcgcggcggctacctctctccacggcggcggcgggcgatcctgcagatcccgcggctccctccgcgattcgagtcagactcagatgggggaaggcacagagagcggcggcggggcgaccacagcgccgcctctgaggtatataaggtgctacaagtgcgggttctgcgacgtggtccggtccaagaagtgcttgctccgcgcccacgtgcttgagcaccacaaggatgaggtggatgctttggggggttactgggaaggtggagatgctggtccgcgcaaagagatcagccgtgcgtgcgaacagtgcgggatgagcttcaagaagcaggcgcatctgaagcaacatatgcagagccattcgctcgaggtactgatctggctgcttatgttgggttttttggtatattgctcagtgaatgctcaggctactagtgctcgcctggtttgttactatccgcttaatgtttattgtgtgagaaaaggccgaaagcgagatacatgctggtttgactcttttggtgtggttgctacaaccctgttataataacaattggttcgatggatgactctgtatacctcatggtctttctttagtccattgtatgttattattaattatgctgacttttgcagtctgtttgttcagatacagatgtgtgaagcattggatctcaaagaactccaaaatgcgagaaggccttgaacggactagtaccaggatggggagaccctcctgagaagctccatcaagagttccttcattcacgctattcttcaggttgtgtgttctgagctattctgagctgcttgctgctttttttgttattatgttcctgtcacatgacatatgctaaaggtctagtctgagattgcgatgccacttttttcaacaagttgggcgtctgctgttctagtcatatttgataattgatgaatttacactgcaatgctgtttgagtatatctagctgtcaccgtttgatggccctcattattgacaggatagatttagcaggcatagagagacacaattcctgttctgcatagtttatgtgctcgactttagttatgtgttcactgaaatgattggatcatgatcttccttagttgaattatacatttcatgcaaaaatcaaattaattttcatttgaaggtgagttatgcggatacggtgtgctgctatttgcccctgtatttggggactggtgtacgacatttgatttgctggtttttgtaggcaatttgttgacatatgaatgcgtgaagcattggatcccaaagaactccaaaatgcgataaggccttgaatggactagtatcaggattgggagaccatcctgagaagctccatcaagcatgccttgttcacgcgtttcttaagaggcccttttcctgcactgttgatggttgcccctttagctatagcaggaaggatcatttgaacagacatttacttactcatgaagggaaactatttgtgtgccctgtcgaaggatgtggccgtaagttcaatatcaagggtaatatgcagagacatgttcaggaaatccacaaagatgtctctccttgtgaaagcaagaaagaattcatctgtccaaaggttaactgtgggaaggctttcaaatatgcttctaagttaaagaagcacgaagaatcacatgtccagctggaatacacagaagttatgtgctgtgagccaggctgcatgaagttcttttcaaacatggaatgcctgaaggcgcataaccaatcttgccatcaatatgttcagtgtgatatctgtggtacgaaacagctaaagaagaatttccagcgccatcatcggatgcatgaaggttcctgcgtcactgagagggttaaatgccacatcgaggactgcaaatgttcgttctcgaagaaatccaatttggacaagcatgttaaggcggtacatgagcagcgtcgtccttttgtgtgccaattctctgggtgtggcaagaggttttcttacaagcacgtaagggacaatcatgagaagtcaagcgctcatgtgcacactgagggtgattttgtcgaggctgatgagcagcggccacgttcagtaggtgggtgcaagaggaaacccgtatctgttgagagtttgatgcgtaagagggtagccgctcctgacgatgggcctgctcatgctgatgcaactgaatatttgagatggcttctgtcggtttgattggacgttcaagtgcactttgtgtagttggaaacatcagcgatttacttggcatgtataggaagatgaatgtctctagtatgttatgtaaatgtttatgtacggtatcagaaatacagatcattggacctcaattataaaggcaatatgctgtattggcaagatcttgaatgtaagagcggttgctcatgatcattagatctatgtgtcttcagcacagcttggcaacatgttttggtatgttcgcagttgcagtgtctttgcctttttttgcctcctgctggttgcaggtgaaaattggattcatgattcttgaatgctcttatgtaacaacaaaaatatctgttcagttctcattgtgcagaaccacagcactcttcattccgatttgcagatgcacgtgaccaaaaaagataatttgcagatgcaccatgaacccgtggcaccagatgcccgtcagcagctggcacccgtccagctcgcgccggagagcctccaggcggaccagctccgccgccccgcggatcgattggactagcgacgaggccgagatgcgcacggacgtcatcggcggcggcgatggc

SEQ ID NO: 202977 - DNA, 2319 bp, Zea Mays
tgatgaggagttttttgcatctaacattgttacttgtgttggtcagatcattggaattgttgttgctgatactcatgataatgcaaaaactgctgccaacaaagtacatatcgagtattgtgagctcccagcaattttatctatagaggaagctgtcaagattggaagctttcatccaaataccaagaaatgccttgtgaaaggcgatgtagaacaatgttttctgtctggtgcatgcgatagaattgtatcaggacaagttcatgtcggaggctccgcagaagcatcagaagtatgttgcaagtgttcttggtcttccacaatcaaaagtcgtttgcaagactaagcgtattggtggtggatttggtggaaaagaaaccagatcagcaatatttgctgctgcagcatctgtaccctctttctgtctgagaaggccagtaaagcttgttttggacagggacgttgacatgatatcaactggacagaggcacagtttccttgggaaatataaggtgggatttaccaatgaagggaagatactggccctagacctggaaatttataacaacggtggccattcacttgatctatcccttgcagtactggaacgtgctatgtttcattcagaaaatgtctatgacatagaaaacatcagaatcaatgggcaagtatgctttacaaacttcccaagtaatactgctttccgaggttttggtggtccacaaggcttgttgattgcagagaattggattcaccatatagctacagaactccaacgaagtcctgaagagataaaagaacttaattttcacaatgatggagttgtgctacattatggccagttgctccagaattgtacaataagttcagtttgggatgaactaaaagcatcttgtaattttgtggaagctcgcaaagccataaataattttaacagtaataaccgctggaggaagcgaggaattgccatgattccgacaaaatttggcatatccttcactgcaaaattcatgaatcaggctggcgctcttgtgcaagtttacactgatggcactgtcctggtaacacatggcggggtcgagatgggacagggtttgcacacaaaggtagcccaagttgctgcctcgtcattcaatatccctcttagctctgtatttatatcagagacaagtactgataaggttcctaatgcatcaccaacagcagcctctgctagttcagatctgtatggagctgcagttttggatgcttgtcaacaaatcaaggttcgaatggaacccattgctagcaaaggaacccacaactcgtttgcagagttggctcaagcatgctacatggaacgtgtggatctctctgctcatgggttttatgctacacctaatattgggtttgactggacgattggcaagggaactccattcaattatttcacgtatggagctgcatttgcagaagttgagatcgacaccctaactggggatttttacacaaggacagctgatattgttatggatctcggattttcaattaatccagcaattgacattggccagattgaaggagcttttatccaaggattgggctgggcagccatagaagagctaaaatggggggatgataaccataagtggattcgacctggacacctcttcacctgcggtcctggttcttacaaaataccctctgtaaatgatatacctctgaatttcaaggtttctctattaaagggtgttccaaatccaaaggctattcattcttccaaagccgtgggagagccaccatttttcctaggttccgccgtcttatttgcgataaaggatgcgatctctgcggcaagggctgaggaggggcacttggactggtttccactcgacaacccggcgacaccggaaagaataagaatggcatgtgtggattccattacaaagaaatttgccggtatagattatcggtccaagcttagtgtatagcggctgctgggctggtcacgggagaataaattggaaacagaagcccgcatttgtaaagtttcatgccctttgtgctaaaaagaatgggagggacggtttagtgttacttgtgggaaactttaaccctaacaaaggattgggtgatgtattaatagactgagttagttgggtctgacatacacatggatgagaagataattatacggtaaaccctaaggccctgttcggtttttagggattggagccccggattgattcctagccggattacttctctaatttatatagattttgatgagctggaacaaatcttggtttattcctgtacaaccgaacaggccctaaacgg

SEQ ID NO: 202978 - DNA, 1130 bp, Zea Mays
ttgtgcttgaattacttagatcctgcagagattccatggggtaactttggggctgaatatgttgttgaatcttctggtgtctttacaacgactgataaagcatcagcacacttaaagggtggtgctaagaaagtggtgatatctgcaccatcagcagatgctcccatgtttgtagttggagttaatgagaatagctatgattcgaagatgaatgttgtttctaatgcaagttgcaccaccaactgccttgctccacttgccaaggttgtacatgaggaatttggcatcgtggagggccttatgacaactgttcatgccacaacagccacccagaagaccgttgatggtccttcaatgaaggattggagaggaggacgtggtgctggccaaaacataattcctagctccactggtgcagcaaaggctgttggaaaagttctgcctgagctgaatggaaagctcactggcatggccttccgagttccaacaccaaatgtctctgttgtggacttgacatgccggattgagaaaaacgcctcctatgatgatgtgaaagcagccatcaaggcggcatcagagggtgcactcaaaggtattcttggctacacagacgaggacgttgtttccaatgattttgttggtgattctaggtcaagcatctttgatgccaaggctggtatcggactgagctcttctttcatgaagcttgtgtcttggtatgacaacgagtggggctacagcaaccgggttctggatctgatcgcccacatggctctcgtcagtgccgccgccaagctctgatgtccgtactcgtttctccagtagtagcttagaaaaaaagactgcaattttgacggccattttctgttagctgttgtttggaataagatcaaatgctggaacacttcgaactcgcgcgagactggactcagatccatggcctgtattttagttgtagaagtgggcaaatttgcaccgtagtaccctggcatggttatatgcggaattgttgattgatgagtcgttgtacggtttgtcgacttgatgatatgttgatgtgggagcccctgaatgaggcggtattaatggaaatataggatggcaatggcaatccgtcgacttgcacccta

SEQ ID NO: 202979 - DNA, 1570 bp, Zea Mays
ccgatcgaaaagttgcagcggcagtgttgaggccaaggccaccgacccacctctctcatagcactagcagcaatggaggtggagatcctcgagtcctgcatggtgaaacccagcgacgacatagggacgccgccgccgcccatgcacgtgtgctgccctgtccaaggcgctcgtccgcttctaccccctcgccggccggctcgcgcaggacggcgccggccgcccgcagatccactgcaccggagaaggcgcgctcctcgtcaccgcgcgcgccgacgctaccctccaggacatccccggcgggttcgccccgtcggatgagctgcggcagatgcttgtcccctcggctgccgacggcgaagaccgcgccggcatcttggccatgttccaggtgacgtccttcaagtgcggcggggtgtgcgtgggcgcggcgatccaccacacggcggcggacggcctagcggcgctcgacttcgtcaacacgtgggccgccatcgcgagcaagggcgtcgacgaggccgcgccggcgccgcgcccgtggctggaccgcacgctgctccgcgcgcgctcccctcccgacgtgcgcttcgaccacagcgagtactccccgcggggcggcggcggtccaaagacggcgagggtcccgttcgactccgccatcctacccatgtccaagacccaggtggacgcgctcagggccggcaagaaggtgtccacgttcaaggccgtggtcgcccacgtgtggcggtgcgcgtgcatagcgcgcgggctcgcgggagacgaggacacccgtctgtacatgaccgccgacgcgcgctcccgcgtccgcccgccgctcccggaaggctacctcggcaacgccatcttccgcgcgtcagcggtggccacggcgggcgacgtcgtctccgagcagctcgacgccgttgcgggtagggtgtccggcgccaccgcccggctggacgacgagtacgtccgatcgctggtggactacctggagcaggtggtgggcgatgtggcggggctccgcaagggggagtgggtgatgccggagaccgacctgtgggtgataagctggcaggggctgcccatctacgacgccgacttcggctggggacggccggcgttcatgggccgcgcgtgcctccagttcagcggcctcgtgtacctcgtcccgggcccggacggcgacggccgcctcgacgtcgtcgtggccatggagcccaagagcctggccagattcaaggagctgttgtacgagctcaaaggtgcaggtgttccgtgcacggcagactgagctgctgcattccgtgcaggttccttggcttgctaccggctggcaaaacgaaaacctgtttgacaaattgttccttgcattgcctatctacttcgacctttactgcagtactcctagttttctactcgttgtttgtgatcgcaatctggtgagtactgtactctatatgcatttacatggctatctatattcggagctaaattcatcgccggtcctgtaactcggcactagatgttacttttttcttttccaaaagggaagtgatttcttactatt

SEQ ID NO: 202980 - DNA, 3078 bp, Zea Mays
aagaccgcgcggcgcgacccacgagggtggtcatccccatttctcctcgaacccccaggtcccccacacaacgcagatacggacactctcctactccgccctccccctgcgccccgcgcagcgcacgcccagcccagtccagccggaggagaccagatcaaagcgccaccgccacgccgtactctagctaatcccgccgccgcgccggggtcgcgaggaggaggatgaagcccaagagcctcccgttcatcgccttcgagcacaagcgggatgcatacggctttgctgtgcggccgcaacacctgcaacgttacaaggagtacgctggcatctacaaggaagaagaggaggagagatctgacaggtggaagaattttctggagaggcagcctgaatcatccggacaagatgctggtggtaatgctaaggatgatggttccgaatcactgcatgagaagacggtagttggaccacgaaagattgaaatatggacgccaattagaccgtccctgagcaacatcgagcagatgatgagcttgcgcatcgagaagaagcaatcctctgctagcaagcagcaagcaaaggatgtaatccatcctgtgaaagttgaggagggcaagttgtcagaggattcagacgacgagttctatgatgtagataaggttgatccgagccaagaagtgcagccgagcgatactgggaatgctgatgttggaagcaggagtcaagaagaaaattacatttcaaaggaagagttggagtgtctagtccatggtggactaccgatggctttgaggggagagctatggcaagcttttgttggtactggagctcgtagggtagaagggtattatgataatctggcagcagagggtgaattagataacaaacgttcagattctcgaacctcggaaggtgttcacgagaagtggattggacaaatagagaaggatttgcccagaacttttcctggtcatcctgctttagatgaggatggaagaaatgctttgagacgcttgcttatagcttatgcgaaacacaacccatcagttggttactgccaggacattggttgggattatggatgactattttgatggctacttttctgaagaaatgattgagtcacaggtggaccagcttgttttagaggagttagttcgagagaagttccctaaattagcaaatcacctggattaccttggacttcaagttgcatgggttactgggccatggttcttatccatcttcacgaatgtgcttccttgggaaagtgttctccgtgtatgggatgtgcttttgtttgatggaaacagagtaatgctgttccggacagctcttgcgctactggagttctatggccctgctcttgtgactacaaaagatgctggtgatgcagttacccttttgcagtctttagctggttccacttttgacagcagccagcttgtcttgacagctcgcatgggataccaatccgtaaatgaaacaatattgcaagaactgagtaataaacaccgcccacctgttatatctgcaatggaagaaagagcaaagggtctaggtgtttggacggataccaatggtcttgcatcaaaactgtataacttcaaacgtgaccctgaaccgctggtttctttaagtgattcaacagaccagttgagtgatgtgggagatggggataccaatcaagaaagtgatctgggaaacatggatgacgagtatggtggtgtaatagtgaattctgagattgattctttgcctgatccaaaggaccaggttgcctggctgaagttggagctgtgccgactcatagaggagagaagatcagctgttctcagagctgatgaactagaaacagcacttatggaaatggttaagcaagataacaggcgccaattaagtgcaaaggttgagcagtttgaacaagaaatatctgaactaagacaggccctgtcagacaagcaggagcaggagcaagcaatgtttcaggtcctgatgcgtgttgaacaagaactaaaaattgcagaggaagctcgcatctcagctgagcaggatgctgctgctcagagatacgcagcaaatgttctacaggaaaagtacgaggaagctatggcttcacttgcccaaatggagaacagagctgtaatggcagaaacaatgttggaggctacactgcagtaccaatctagccagcagaaagcaatgtccccttgcccttctccaagaccatcgatgctcgacgcatcccctagtcagtcaagccagaattcatcgcaggagttccagccaagaaggaaaaacttgcttggcccattttccctgagttggcgtgataagaacaaggaaaaaccgaacaacgctgatgactccaccaacacaaagtctacaaataatgatgaaatggtagaaacctccaacacaaatgatgagaagcatagagaaacactagatctaaatagtgagcagagagcagaatcacccaaagcagatgtcaagatgagagcagagacacctgagaaagacaacgacctgccaggggtccaactagtcactgacgatttgaatgggcaccacgaacagatgcaagaaataaaattggattgataagcattaagcacaatgctcccagcccaaatatcttcgccaccacgtaagtaatatcagagtatttatgatctgatcacacggtgccagttggtgacagcactgagggtggctaagttttgaaatgatactggtccccccctcctctcccctttccctttgtggttccccgaattctttttgccaccacatctaggttacatgtcatttctctccattttttataattttgaggagaaaatgagcaagttatatatggttgcccatccgttgctgcctcccaatgtaaatgcattggaagaactgtgagaaaaaagatgagaattgtgggcaattatgacacccttattcttgtaaattatcatatcatttagagtttatgcgtgctttcaattgaagaaatccgtgctggcgttaataacaccactgaaccctgatatagacgttggtgaaaacggatagggtatgtct

SEQ ID NO: 202981 - DNA, 3024 bp, Zea Mays
ccccacacaacgcagatacggacactctcctactccgccctccccctgcgccccgcgcagcgcacgcccagcccagtccagccggaggagaccagatcaaagcgccaccgccacgccgtactctagctaatcccgccgccgcgccggggtcgcgaggaggaggatgaagcccaagagcctcccgttcatcgccttcgagcacaagcgggatgcatacggctttgctgtgcggccgcaacacctgcaacgttacaaggagtacgctggcatctacaaggaagaagaggaggagagatctgacaggtggaagaattttctggagaggcagcctgaatcatccggacaagatgctggtggtaatgctaaggatgatggttccgaatcactgcatgagaagacggtagttggaccacgaaagattgaaatatggacgccaattagaccgtccctgagcaacatcgagcagatgatgagcttgcgcatcgagaagaagcaatcctctgctagcaagcagcaagcaaaggatgtaatccatcctgtgaaagttgaggagggcaagttgtcagaggattcagacgacgagttctatgatgtagataaggttgatccgagccaagaagtgcagccgagcgatactgggaatgctgatgttggaagcaggagtcaagaagaaaattacatttcaaaggaagagttggagtgtctagtccatggtggactaccgatggctttgaggggagagctatggcaagcttttgttggtactggagctcgtagggtagaagggtattatgataatctggcagcagagggtgaattagataacaaacgttcagattctcgaacctcggaaggtgttcacgagaagtggattggacaaatagagaaggatttgcccagaacttttcctggtcatcctgctttagatgaggatggaagaaatgctttgagacgcttgcttatagcttatgcgaaacacaacccatcagttggttactgccaggcaatgaacttttttgctggtctcttgcttctattgatgccggaggagaatgcgttttggacattggttgggattatggatgactattttgatggctacttttctgaagaaatgattgagtcacagcaaatcacctggattaccttggacttcaagttgcatgggttactgggccatggttcttatccatcttcacgaatgtgcttccttgggaaagtgttctccgtgtatgggatgtgcttttgtttgatggaaacagagtaatgctgttccggacagctcttgcgctactggagttctatggccctgctcttgtgactacaaaagatgctggtgatgcagttacccttttgcagtctttagctggttccacttttgacagcagccagcttgtcttgacagctcgcatgggataccaatccgtaaatgaaacaatattgcaagaactgagtaataaacaccgcccacctgttatatctgcaatggaagaaagagcaaagggtctaggtgtttggacggataccaatggtcttgcatcaaaactgtataacttcaaacgtgaccctgaaccgctggtttctttaagtgattcaacagaccagttgagtgatgtgggagatggggataccaatcaagaaagtgatctgggaaacatggatgacgagtatggtggtgtaatagtgaattctgagattgattctttgcctgatccaaaggaccaggttgcctggctgaagttggagctgtgccgactcatagaggagagaagatcagctgttctcagagctgatgaactagaaacagcacttatggaaatggttaagcaagataacaggcgccaattaagtgcaaaggttgagcagtttgaacaagaaatatctgaactaagacaggccctgtcagacaagcaggagcaggagcaagcaatgtttcaggtcctgatgcgtgttgaacaagaactaaaaattgcagaggaagctcgcatctcagctgagcaggatgctgctgctcagagatacgcagcaaatgttctacaggaaaagtacgaggaagctatggcttcacttgcccaaatggagaacagagctgtaatggcagaaacaatgttggaggctacactgcagtaccaatctagccagcagaaagcaatgtccccttgcccttctccaagaccatcgatgctcgacgcatcccctagtcagtcaagccagaattcatcgcaggagttccagccaagaaggaaaaacttgcttggcccattttccctgagttggcgtgataagaacaaggaaaaaccgaacaacgctgatgactccaccaacacaaagtctacaaataatgatgaaatggtagaaacctccaacacaaatgatgagaagcatagagaaacactagatctaaatagtgagcagagagcagaatcacccaaagcagatgtcaagatgagagcagagacacctgagaaagacaacgacctgccaggggtccaactagtcactgacgatttgaatgggcaccacgaacagatgcaagaaataaaattggattgataagcattaagcacaatgctcccagcccaaatatcttcgccaccacgtaagtaatatcagagtatttatgatctgatcacacggtgccagttggtgacagcactgagggtggctaagttttgaaatgatactggtccccccctcctctcccctttccctttgtggttccccgaattctttttgccaccacatctaggttacatgtcatttctctccattttttataattttgaggagaaaatgagcaagttatatatggttgcccatccgttgctgcctcccaatgtaaatgcattggaagaactgtgagaaaaaagatgagaattgtgggcaattatgacacccttattcttgtaaattatcatatcatttagagtttatgcgtgctttcaattgaagaaatccgtgctggcgttaataacaccactgaaccctgatatagacgttggtgaaaacggatagggtatgtct

SEQ ID NO: 202982 - DNA, 927 bp, Zea Mays
ggagttgcaggaaaagttcccgagcagcagcttggtgaagcgacagaatagaccctaacctcggagggacacggattgcaaaacaagggcggtattccgttactgtccgacacggcgacacctcagccctcaggtagccccgtagccgcctagcagggccgtgctcgagaaaattaggagaccaacagcacgaagggggaaaaaaggagagcagaaatccccaatccctcctcacttcgacccttgctcggaatctccccgcagcgtccggctgaatccattcgattcactcatggtaggcttcgtcttcttctgctgattcgctggatcgtctccaccgacgcggctgcgcccacacctgccgtcacagccatggagccgcgcatcggcaacaggttccgcgtcggccgcaagctggggagcggctcctttggggagatctacctcggcaccaacgtgcagaccaacgaggaggtcgcaattaaactggaaaatgttaagacgaagcatcctcaattgctttatgagtcaaaattatacagaatacttcaaggaggaactgggattccaaatgttaagtggtttggcgttgagggtgattacaatgttttggttatggacttactgggaccgagtcttgaagatctttttagcttttgcaacaggaagttgtccctcaaaactgttttgatgcttgctgatcaaatgatcaatcgagttgagttttttcattccaagtcattcttgcatagagatatcaagcctgacaattttctcatgggtctcgggaaaagagcaaaccaggtttatgttatcgattttggacttgcaaagaagtacagagatacatcaacacaccagcacattccatacaggtaagcatgctgtgtgtgtgaaatttgaatgaaattgctgtgcgacgtcttg

SEQ ID NO: 202983 - DNA, 2351 bp, Zea Mays
ggaaattgatggaaccccgtttctatgcgttatccaaagagctgcatagcagcgcttctcccagccacgtcttcatcacacacggtcgcggcgcgaagcaatggcgaccacggcgccgctgctctcgccccagcgcgcttgccctacccatctccggcgccgcctctcgcccctacatctcgtattccccctcgacgcgtcagcgaggcggctgcgccttcgccgggcgccgccaccttgttcggccaagttcggcaagttcgacgcctccgacgccccggcggaggccgaggaggcggggggcgcgacggatggtgggctggcgcagcccgtggaggaggacgacagttgcttgccatcggatttggagggcgcgattcggcagtcagggaaggcgagcgcagatttcgtaaactccggaggcatgcgagctatcgcagaactgctgatccctcagttggaattcctcaacgaggaaggagcacaggctgaactctgggcgttgtcaaagattttcctggacacacttgtacaagagacaggacagaaagttactgccattttccctgacgctggagcagctgcccttctcaagcatcaatggaaagatgcacaattcaagtgtgccagtttaggtgaccggaagccagttggtcctgaagatgaggtcgcagttatgattatccctgatcatcagatgctggaagctgttgaacgcatcacatctcaactctctgatgatcctgtatggaacttatgcctgatcagattgcaaatttctgcagatcctgtgtaaaaaatatatggaaaaaaagaaatttcattaatgttccaagcagattttgtagaataaagtttacatgaacaagagtattaggataaagggcatatgtgcagtgtggtaaatccagttccaggccataaatcaaccatatatttccatgttgtatattgtgcaaattggctaactaagttccatatccacccaagtagattcatcctagatcaatattcgttggcctagccctggtccagctgaattcctagatctgtccctgcatgcatgtgcttatttttttgaaatgaaccaggcaaagcatgcatgtgcttatgaaggatctaaaagtctgctccagcagattagtctattccacctacatgtataaccatttcatgaaagaactcatgtgaatcttcatgcctaaaactaaccatccatatctacaataatttaacattgaatttgaccagcaaccatctttgtatttgtatatatatttcatttaatgctatcctcaagtagtgtctaccttttaatgaagataagacctcttgtcatgtggaacccacggcttgttagtggagatgttggagtaggctttaatgtacggaatctgcggagaaatttcttaagcacttttaccactgtttactcgatgaggccattgccaactggtgcagtctttagatgctttccagggcagtggaaagtgttttatgatgatccaaataggccaaatcggtatttgcttgcccgagaactcacaagtaggcccgatgcaactgatattgagagaatatttggtggtgccgatgagcaatctgaagaggcaccatcgttgatgaacaatgtcatgggcgtgttcagttccgtgagtcggtttatgagggtcatctccaagtgagagtcgaagcaaacattgttcacacttgaagccatcaacaaccatcatgatgcttgagttatacaagaagattattttagtgcatccatgttgttttcagtctgtaattactccatggtactgctattcggaacagtatagtttggcgttccggcacatgccaccaaatgtgtgcacataccataccgtggattcctggagtcatctgctgatcctacaccgtgaggtcaattatgtaagtgtgacttagaaaaaaaatgtagatagatcctcattctggaaaaagccgggtatttgattgtaattcaatactgtgcttgatatatcacaatcagctcgcattttgtaattcaatactggacgaatataaattcaatcctttgttttacatgtgtgttgtgtcagtcaatcagaacatttttctactctacagtgagtcagaatatctatcctctaaagtgacacacttatcctcagtatatatagttatatacaccgaatactgctgaaataaccatttttttaaggaagagaaacatttgaatgaagtgacctaaatacagtacattcagaatcttgggccgatgcgatcagtgctcccggttttccacaggagaggcggaggcgctgtgagagcctgccaagcccagcgacggctgcaggaac

SEQ ID NO: 202984 - DNA, 1265 bp, Zea Mays
gtcgcttctgtaattcggctcaatcgtatatgctgtaataatgcagaactgctgatccctcagttggaattcctcaacgaggaaggagcacaggctgaactctgggcgttgtcaaagattttcctggacacacttgtacaagagacaggacagaaagttactgccattttccctgacgctggagcagctgcccttctcaagcatcaatggaaagatgcacaattcaagtgtgccagataagacctcttgtcatgtggaacccacggcttgttagtggagatgttggagtaggctttaatgtacggaatctgcggagaaatttcttaagcacttttaccactgtttactcgatgaggccattgccaactggtgcagtctttagatgctttccagggcagtggaaagtgttttatgatgatccaaataggccaaatcggtatttgcttgcccgagaactcacaagtaggcccgatgcaactgatattgagagaatatttggtggtgccgatgagcaatctgaagaggcaccatcgttgatgaacaatgtcatgggcgtgttcagttccgtgagtcggtttatgagggtcatctccaagtgagagtcgaagcaaacattgttcacacttgaagccatcaacaaccatcatgatgcttgagttatacaagaagattattttagtgcatccatgttgttttcagtctgtaattactccatggtactgctattcggaacagtatagtttggcgttccggcacatgccaccaaatgtgtgcacataccataccgtggattcctggagtcatctgctgatcctacaccgtgaggtcaattatgtaagtgtgacttagaaaaaaaatgtagatagatcctcattctggaaaaagccgggtatttgattgtaattcaatactgtgcttgatatatcacaatcagctcgcattttgtaattcaatactggacgaatataaattcaatcctttgttttacatgtgtgttgtgtcagtcaatcagaacatttttctactctacagtgagtcagaatatctatcctctaaagtgacacacttatcctcagtatatatagttatatacaccgaatactgctgaaataaccatttttttaaggaagagaaacatttgaatgaagtgacctaaatacagtacattcagaatcttgggccgatgcgatcagtgctcccggttttccacaggagaggcggaggcgctgtgagagcctgccaagcccagcgacggctgcaggaac

SEQ ID NO: 202985 - DNA, 3017 bp, Zea Mays
cagcaaaaacattcaacaagaaatatatttgtgagttgtgaccactgaccacacgtccacaccccaccagcggccaccttcgtcatcgccatgtctccaccgctccacgtctcgaccctttcctgcttccttccttcctccttccttcccgtcagactcgccaaaggcagcaggctttccaagcagccgaatttgaaagcagcaaaagaaagcaggcggagcagtggagcacgggctgcacatccgaagcaggcggagcaaagcaaagcaggcaagcagccgtggagcagtggaggtggagcacggccgtgcggccgccggccagccaacgcccaacgggtcaaccggacaagcacgcgcgcacagcaggaaggcagaggcagccaccagccaggcaagaccgcagcccgcaggaagcagaagccagagacggaggtgggcaggcggccgcggacggacaggcggtcggccggccgggcgagccgcgagcggacgtcttgtgctgcagcggctgtgttgcggcggctgtgctgtgcgggctgcgtgggctgggcggctgaatacctagatttcacttttttactgggccgagttgaggtatggcgcgggccatacttggccataacgggccctccgcccctgctcatcagaacggtgcagaatcattatcagaaacatttggagaaccatacccaacaaaataagcaccagcatttcatcctttgtctcggcattccaataataataatgtggaaacgtaatccctttgggggtaaagcacatagtggactggatgggcgcactattgttgttagaagtctgaagatctcagtacgaaatgtcattgcacaaggaggcttctcttgtgtatatctggcatgtgacacagtacatccatcaaagatgtatgcattgaagcacattatttgcaatgactcagaatcacttgatcttgtcatgaaggagatccaggttatgaacctccttaaagggcatcctaatgtggtcacacttgttgcccatgatgttgttgacatgggccgtacaaaggaggcacttcttgtaatggagttttgtgagaagtccttggtgagtgcaatggagagcagaggtagtggttactatgaggagaagaaggtgcttttaattttcagagatgtctgcaatgctgtctttgccatgcatggacaatcactgccaattgcacatagggatctgaaagctgaaaatgttcttcttggatcggatggtgcatggaaaatatgtgattttggaagcacatcaactaatcataaatgctttaacaaaccagaagagatgggcattgaggaagatgtcatcaggaagcatacaaccccagactacagggccccagagatgtgggatctctacagaagagaagttatcagtgaaaaagttgacatttgggctttggggtgccttctatatagaatatgctacttcaagtctgcatttgacggagaatccaagttgcaggtactcaatggcaattatcatatccctgagcaacccaaatatagcattgctgtcacagggctgatcaaagatatgctggaagcctcaccaaatgccagaccagacatcacacaggcaagagctttgattgattgatcattcatcttcacgatactctaggtctggtttcgtgttaatgagctactgtcgcttgagttacagaaaaggttacctgatggaccttcaccagccgtttccttgagctcgcaagatgaaggtgctcataaaagaacacctgtgatgcctagaaggaaccctccacctccaagagagcaatctaatagttttttaccgcatggaagctcaaaggcaggagatgcacctttaggtgcattttgggcgacacagcatgcacaaggtgctcaagctgtagttaataggaaccctttgtttgatggggagtcaattaaggcaccactgtcatcaaagcagaaccaaagctgggtggacaccagcatcagtattcctggcaataggcatgatcattctggtcagatgtcactgacaagtaaagcacaaaataactctttgtccaataatggtttcagaggtctctctgacacggagatacaaaattctgggaaaagtagagcacaacaacctcaacccgagccaaaatgtgagaaagacccatttaatagctttgttgcagattttgacactcacaatctcaacattgccgttggtaaggcatccgaacttgaacttgaagtgtccaatctgaaggagcagttgaagaaaaccacattagaaaaggctgagatgacagccaagcatctcctcatcgtcaggagatccaagagctgaagctcactcttgccgagccaacacctccctcaaacaaagtcagctcaaggacacaagattctggatctcagcgaaaggaaaagatccaaggtactgtgtgggagcttgaacaagggatgcttgctagcaactcctcatcagccagttctgatgccaaaacatggcaggctttccctgacacaaagactcaggcccgaccaaaggtcgatcatgcaactaatgggagccaaaacataaccaagaacacaacgtcaggtgcttcccccgatgcgtggggttttggtactgataatttcagaacaccagcaacagcattaagcgctaccacacagatcaacagggcagctgcccaacggagctcatcccaaagatttaacgctggtgtggccaaggtagagcagccatctggatgggctggtttttaacttcaatcgacatgcgttaaccatcattctggtcaacatttgcaatccgcgctacacagctgctgttgccgatggagttgtgatctttgacatccacagggcatcaaaatcggttatttttagtgtgttcatcaattttggttgtgccaactttgatattgattcatgagatcacttgaaattacccgttgttaataagtaaatatatattgacagtattgtgcgtatttctttgtatgattatgaata

SEQ ID NO: 202986 - DNA, 2378 bp, Zea Mays
gaccacacgtccacaccccaccagcggccaccttcgtcatcgccatgtctccaccgctccacgtctcgaccctttcctgcttccttccttcctccttccttcccgtcagactcgccaaagtgcgcccgggcgcgccgaatctccagacgagatcgcactccgcacctgacgccgccagtgccggagccgacggagatagcgggcctccacctccgatctagtgaaacatttggagaaccatacccaacaaaataagcaccagcatttcatcctttgtctcggcattccaataataataatgtggaaacgtaatccctttgggggtaaagcacatagtggactggatgggcgcactattgttgttagaagtctgaagatctcagtacgaaatgtcattgcacaaggaggcttctcttgtgtatatctggcatgtgacacagtacatccatcaaagatgtatgcattgaagcacattatttgcaatgactcagaatcacttgatcttgtcatgaaggagatccaggttatgaacctccttaaagggcatcctaatgtggtcacacttgttgcccatgatgttgttgacatgggccgtacaaaggaggcacttcttgtaatggagttttgtgagaagtccttggtgagtgcaatggagagcagaggtagtggttactatgaggagaagaaggtgcttttaattttcagagatgtctgcaatgctgtctttgccatgcatggacaatcactgccaattgcacatagggatctgaaagctgaaaatgttcttcttggatcggatggtgcatggaaaatatgtgattttggaagcacatcaactaatcataaatgctttaacaaaccagaagagatgggcattgaggaagatgtcatcaggaagcatacaaccccagactacagggccccagagatgtgggatctctacagaagagaagttatcagtgaaaaagttgacatttgggctttggggtgccttctatatagaatatgctacttcaagtctgcatttgacggagaatccaagttgcaggtactcaatggcaattatcatatccctgagcaacccaaatatagcattgctgtcacagggctgatcaaagatatgctggaagcctcaccaaatgccagaccagacatcacacaggcaagagctttgattgattgatcattcatcttcacgatactctaggtctggtttcgtgttaatgagctactgtcgcttgagttacagaaaaggttacctgatggaccttcaccagccgtttccttgagctcgcaagatgaaggtgctcataaaagaacacctgtgatgcctagaaggaaccctccacctccaagagagcaatctaatagttttttaccgcatggaagctcaaaggcaggagatgcacctttaggtgcattttgggcgacacagcatgcacaagaggtctctctgacacggagatacaaaattctgggaaaagtagagcacaacaacctcaacccgagccaaaatgtgagaaagacccatttaatagctttgttgcagattttgacactcacaatctcaacattgccgttggtaaggcatccgaacttgaacttgaagtgtccaatctgaaggagcagttgaagaaaaccacattagaaaaggctgagatgacagccaagcatctcctcatcgtcaggagatccaagagctgaagctcactcttgccgagccaacacctccctcaaacaaagtcagctcaaggacacaagattctggatctcagcgaaaggaaaagatccaaggtactgtgtgggagcttgaacaagggatgcttgctagcaactcctcatcagccagttctgatgccaaaacatggcaggctttccctgacacaaagactcaggcccgaccaaaggtcgatcatgcaactaatgggagccaaaacataaccaagaacacaacgtcaggtgcttcccccgatgcgtggggttttggtactgataatttcagaacaccagcaacagcattaagcgctaccacacagatcaacagggcagctgcccaacggagctcatcccaaagatttaacgctggtgtggccaaggtagagcagccatctggatgggctggtttttaacttcaatcgacatgcgttaaccatcattctggtcaacatttgcaatccgcgctacacagctgctgttgccgatggagttgtgatctttgacatccacagggcatcaaaatcggttatttttagtgtgttcatcaattttggttgtgccaactttgatattgattcatgagatcacttgaaattacccgttgttaataagtaaatatatattgacagtattgtgcgtatttctttgtatgattatgaata

SEQ ID NO: 202987 - DNA, 3131 bp, Zea Mays
gaccacacgtccacaccccaccagcggccaccttcgtcatcgccatgtctccaccgctccacgtctcgaccctttcctgcttccttccttcctccttccttcccgtcagactcgccaaagtgcgcccgggcgcgccgaatctccagacgagatcgcactccgcacctgacgccgccagtgccggagccgacggagatagcgggcctccacctccgatctagtggcgtggtgttacagtcatcactcatcagcagtggcggagcacgacccaaaattaagggcagcaggctttccaagcagccgaatttgaaagcagcaaaagaaagcaggcggagcagtggagcacgggctgcacatccgaagcaggcggagcaaagcaaagcaggcaagcagccgtggagcagtggaggtggagcacggccgtgcggccgccggccagccaacgcccaacgggtcaaccggacaagcacgcgcgcacagcaggaaggcagaggcagccaccagccaggcaagaccgcagcccgcaggaagcagaagccagagacggaggtgggcaggcggccgcggacggacaggcggtcggccggccgggcgagccgcgagcggacgtcttgtgctgcagcggctgtgttgcggcggctgtgctgtgcgggctgcgtgggctgggcggctgaatacctagatttcacttttttactgggccgagttgaggtatggcgcgggccatacttggccataacgggccctccgcccctgctcatcagaacggtgcagaatcattatcagaaacatttggagaaccatacccaacaaaataagcaccagcatttcatcctttgtctcggcattccaataataataatgtggaaacgtaatccctttgggggtaaagcacatagtggactggatgggcgcactattgttgttagaagtctgaagatctcagtacgaaatgtcattgcacaaggaggcttctcttgtgtatatctggcatgtgacacagtacatccatcaaagatgtatgcattgaagcacattatttgcaatgactcagaatcacttgatcttgtcatgaaggagatccaggttatgaacctccttaaagggcatcctaatgtggtcacacttgttgcccatgatgttgttgacatgggccgtacaaaggaggcacttcttgtaatggagttttgtgagaagtccttggtgagtgcaatggagagcagaggtagtggttactatgaggagaagaaggtgcttttaattttcagagatgtctgcaatgctgtctttgccatgcatggacaatcactgccaattgcacatagggatctgaaagctgaaaatgttcttcttggatcggatggtgcatggaaaatatgtgattttggaagcacatcaactaatcataaatgctttaacaaaccagaagagatgggcattgaggaagatgtcatcaggaagcatacaaccccagactacagggccccagagatgtgggatctctacagaagagaagttatcagtgaaaaagttgacatttgggctttggggtgccttctatatagaatatgctacttcaagtctgcatttgacggagaatccaagttgcaggtactcaatggcaattatcatatccctgagcaacccaaatatagcattgctgtcacagggctgatcaaagatatgctggaagcctcaccaaatgccagaccagacatcacacaggcaagagctttgattgattgatcattcatcttcacgatactctaggtctggtttcgtgttaatgagctactgtcgcttgagttacagaaaaggttacctgatggaccttcaccagccgtttccttgagctcgcaagatgaaggtgctcataaaagaacacctgtgatgcctagaaggaaccctccacctccaagagagcaatctaatagttttttaccgcatggaagctcaaaggcaggagatgcacctttaggtgcattttgggcgacacagcatgcacaaggtgctcaagctgtagttaataggaaccctttgtttgatggggagtcaattaaggcaccactgtcatcaaagcagaaccaaagctgggtggacaccagcatcagtattcctggcaataggcatgatcattctggtcagatgtcactgacaagtaaagcacaaaataactctttgtccaataatggtttcagaggtctctctgacacggagatacaaaattctgggaaaagtagagcacaacaacctcaacccgagccaaaatgtgagaaagacccatttaatagctttgttgcagattttgacactcacaatctcaacattgccgttggtaaggcatccgaacttgaacttgaagtgtccaatctgaaggagcagttgaagaaaaccacattagaaaaggctgagatgacagccaagcatctcctcatcgtcaggagatccaagagctgaagctcactcttgccgagccaacacctccctcaaacaaagtcagctcaaggacacaagattctggatctcagcgaaaggaaaagatccaaggtactgtgtgggagcttgaacaagggatgcttgctagcaactcctcatcagccagttctgatgccaaaacatggcaggctttccctgacacaaagactcaggcccgaccaaaggtcgatcatgcaactaatgggagccaaaacataaccaagaacacaacgtcaggtgcttcccccgatgcgtggggttttggtactgataatttcagaacaccagcaacagcattaagcgctaccacacagatcaacagggcagctgcccaacggagctcatcccaaagatttaacgctggtgtggccaaggtagagcagccatctggatgggctggtttttaacttcaatcgacatgcgttaaccatcattctggtcaacatttgcaatccgcgctacacagctgctgttgccgatggagttgtgatctttgacatccacagggcatcaaaatcggttatttttagtgtgttcatcaattttggttgtgccaactttgatattgattcatgagatcacttgaaattacccgttgttaataagtaaatatatattgacagtattgtgcgtatttctttgtatgattatgaata

SEQ ID NO: 202988 - DNA, 2979 bp, Zea Mays
ttaccgaggttcgacgagctttagcggcaaagaacaaagggcattgggagactgggagtggttagattggctcgtcttggagggatgcgatcgtagccgggcctgcacttttcgtggcgtggtgttacagtcatcactcatcagcagtggcggagcacgacccaaaattaagggcagcaggctttccaagcagccgaatttgaaagcagcaaaagaaagcaggcggagcagtggagcacgggctgcacatccgaagcaggcggagcaaagcaaagcaggcaagcagccgtggagcagtggaggtggagcacggccgtgcggccgccggccagccaacgcccaacgggtcaaccggacaagcacgcgcgcacagcaggaaggcagaggcagccaccagccaggcaagaccgcagcccgcaggaagcagaagccagagacggaggtgggcaggcggccgcggacggacaggcggtcggccggccgggcgagccgcgagcggacgtcttgtgctgcagcggctgtgttgcggcggctgtgctgtgcgggctgcgtgggctgggcggctgaatacctagatttcacttttttactgggccgagttgaggtatggcgcgggccatacttggccataacgggccctccgcccctgctcatcagaacggtgcagaatcattatcagaaacatttggagaaccatacccaacaaaataagcaccagcatttcatcctttgtctcggcattccaataataataatgtggaaacgtaatccctttgggggtaaagcacatagtggactggatgggcgcactattgttgttagaagtctgaagatctcagtacgaaatgtcattgcacaaggaggcttctcttgtgtatatctggcatgtgacacagtacatccatcaaagatgtatgcattgaagcacattatttgcaatgactcagaatcacttgatcttgtcatgaaggagatccaggttatgaacctccttaaagggcatcctaatgtggtcacacttgttgcccatgatgttgttgacatgggccgtacaaaggaggcacttcttgtaatggagttttgtgagaagtccttggtgagtgcaatggagagcagaggtagtggttactatgaggagaagaaggtgcttttaattttcagagatgtctgcaatgctgtctttgccatgcatggacaatcactgccaattgcacatagggatctgaaagctgaaaatgttcttcttggatcggatggtgcatggaaaatatgtgattttggaagcacatcaactaatcataaatgctttaacaaaccagaagagatgggcattgaggaagatgtcatcaggaagcatacaaccccagactacagggccccagagatgtgggatctctacagaagagaagttatcagtgaaaaagttgacatttgggctttggggtgccttctatatagaatatgctacttcaagtctgcatttgacggagaatccaagttgcaggtactcaatggcaattatcatatccctgagcaacccaaatatagcattgctgtcacagggctgatcaaagatatgctggaagcctcaccaaatgccagaccagacatcacacaggtctggtttcgtgttaatgagctactgtcgcttgagttacagaaaaggttacctgatggaccttcaccagccgtttccttgagctcgcaagatgaaggtgctcataaaagaacacctgtgatgcctagaaggaaccctccacctccaagagagcaatctaatagttttttaccgcatggaagctcaaaggcaggagatgcacctttaggtgcattttgggcgacacagcatgcacaaggtgctcaagctgtagttaataggaaccctttgtttgatggggagtcaattaaggcaccactgtcatcaaagcagaaccaaagctgggtggacaccagcatcagtattcctggcaataggcatgatcattctggtcagatgtcactgacaagtaaagcacaaaataactctttgtccaataatggtttcagaggtctctctgacacggagatacaaaattctgggaaaagtagagcacaacaacctcaacccgagccaaaatgtgagaaagacccatttaatagctttgttgcagattttgacactcacaatctcaacattgccgttggtaaggcatccgaacttgaacttgaagtgtccaatctgaaggagcagttgaagaaaaccacattagaaaaggctgagatgacagccaagcatctcctcatcgtcaggagatccaagagctgaagctcactcttgccgagccaacacctccctcaaacaaagtcagctcaaggacacaagattctggatctcagcgaaaggaaaagatccaaggtactgtgtgggagcttgaacaagggatgcttgctagcaactcctcatcagccagttctgatgccaaaacatggcaggctttccctgacacaaagactcaggcccgaccaaaggtcgatcatgcaactaatgggagccaaaacataaccaagaacacaacgtcaggtgcttcccccgatgcgtggggttttggtactgataatttcagaacaccagcaacagcattaagcgctaccacacagatcaacagggcagctgcccaacggagctcatcccaaagatttaacgctggtgtggccaaggtagagcagccatctggatgggctggtttttaacttcaatcgacatgcgttaaccatcattctggtcaacatttgcaatccgcgctacacagctgctgttgccgatggagttgtgatctttgacatccacagggcatcaaaatcggttatttttagtgtgttcatcaattttggttgtgccaactttgatattgattcatgagatcacttgaaattacccgttgttaataagtaaatatatattgacagtattgtgcgtatttctttgtatgattatgaata

SEQ ID NO: 202989 - DNA, 1758 bp, Zea Mays
aagaagtagggctgctacaaacaattgtcaggaaggactaaatttcataggatctctttgtatgtcgatgatgtcctctttctgcaccccactgcagtggatatttccattaccatgaatctcttggatttatttggtaaagcttcagagctccataataatgagcagaaatccaatgtgttcccgatccagtgctccgaggatgatctaatggtggttcagaacttgttaccttgtgagaggtttgatttcccttgcagatatcttggaatccctctctcccttcgcaaattgtccaaagaacagtttcaacctttcatcgataggtttgctgactgcctgccaagctggaaagcagaccttatgacaagggccgggacaaaagttatggtgcagcatgtgcttacaggtgctcataaaagaacacctgtgatgcctagaaggaaccctccacctccaagagagcaatctaatagttttttaccgcatggaagctcaaaggcaggagatgcacctttaggtgcattttgggcgacacagcatgcacaaggtgctcaagctgtagttaataggaaccctttgtttgatggggagtcaattaaggcaccactgtcatcaaagcagaaccaaagctgggtggacaccagcatcagtattcctggcaataggcatgatcattctggtcagatgtcactgacaagtaaagcacaaaataactctttgtccaataatggtttcagaggtctctctgacacggagatacaaaattctgggaaaagtagagcacaacaacctcaacccgagccaaaatgtgagaaagacccatttaatagctttgttgcagattttgacactcacaatctcaacattgccgttggtaaggcatccgaacttgaacttgaagtgtccaatctgaaggagcagttgaagaaaaccacattagaaaaggctgagatgacagccaagcatctcctcatcgtcaggagatccaagagctgaagctcactcttgccgagccaacacctccctcaaacaaagtcagctcaaggacacaagattctggatctcaggtgatttatctacatatgtctaatacaacatattcactctcctgaagtttattagcatcttacatagtatttataatccatgcagcgaaaggaaaagatccaaggtactgtgtgggagcttgaacaagggatgcttgctagcaactcctcatcagccagttctgatgccaaaacatggcaggctttccctgacacaaagactcaggcccgaccaaaggtcgatcatgcaactaatgggagccaaaacataaccaagaacacaacgtcaggtgcttcccccgatgcgtggggttttggtactgataatttcagaacaccagcaacagcattaagcgctaccacacagatcaacagggcagctgcccaacggagctcatcccaaagatttaacgctggtgtggccaaggtagagcagccatctggatgggctggtttttaacttcaatcgacatgcgttaaccatcattctggtcaacatttgcaatccgcgctacacagctgctgttgccgatggagttgtgatctttgacatccacagggcatcaaaatcggttatttttagtgtgttcatcaattttggttgtgccaactttgatattgattcatgagatcacttgaaattacccgttgttaataagtaaatatatattgacagtattgtgcgtatttctttgtatgattatgaata

SEQ ID NO: 202990 - DNA, 1372 bp, Zea Mays
cagagctctcgcctcttggcaaggtgctcataaaagaacacctgtgatgcctagaaggaaccctccacctccaagagagcaatctaatagttttttaccgcatggaagctcaaaggcaggagatgcacctttaggtgcattttgggcgacacagcatgcacaaggtgctcaagctgtagttaataggaaccctttgtttgatggggagtcaattaaggcaccactgtcatcaaagcagaaccaaagctgggtggacaccagcatcagtattcctggcaataggcatgatcattctggtcagatgtcactgacaagtaaagcacaaaataactctttgtccaataatggtttcagaggtctctctgacacggagatacaaaattctgggaaaagtagagcacaacaacctcaacccgagccaaaatgtgagaaagacccatttaatagctttgttgcagattttgacactcacaatctcaacattgccgttggtaaggcatccgaacttgaacttgaagtgtccaatctgaaggagcagttgaagaaaaccacattagaaaaggctgagatgacagccaagcatctcctcatcgtcaggagatccaagagctgaagctcactcttgccgagccaacacctccctcaaacaaagtcagctcaaggacacaagattctggatctcaggtgatttatctacatatgtctaatacaacatattcactctcctgaagtttattagcatcttacatagtatttataatccatgcagcgaaaggaaaagatccaaggtactgtgtgggagcttgaacaagggatgcttgctagcaactcctcatcagccagttctgatgccaaaacatggcaggctttccctgacacaaagactcaggcccgaccaaaggtcgatcatgcaactaatgggagccaaaacataaccaagaacacaacgtcaggtgcttcccccgatgcgtggggttttggtactgataatttcagaacaccagcaacagcattaagcgctaccacacagatcaacagggcagctgcccaacggagctcatcccaaagatttaacgctggtgtggccaaggtagagcagccatctggatgggctggtttttaacttcaatcgacatgcgttaaccatcattctggtcaacatttgcaatccgcgctacacagctgctgttgccgatggagttgtgatctttgacatccacagggcatcaaaatcggttatttttagtgtgttcatcaattttggttgtgccaactttgatattgattcatgagatcacttgaaattacccgttgttaataagtaaatatatattgacagtattgtgcgtatttctttgtatgattatgaata

SEQ ID NO: 202991 - DNA, 2201 bp, Zea Mays
gtccgtccgtgatccgtccctcccctcgcccgcccgcccgctgtggaacatatgatatgtaacctcggggaaatttttaaatatactggagctgccatagaaagatcgcctccgcgactcataatttgttcgcagccagtcacgtgggatggtccccttgacgtctctgtcgtgtcgtggtcgacaggaacgtctgtgatgggaaataatgcgtctgggtatcccagctttgctcaaacttttgatcggtttggagaattaggaaggatgggggcatcgaccaaatcgtgacctttcgatcacaaggaaaaactgcacacgcctagggctcctttttccccccctagagattgagatcaagcgggagatttcgactatgaagctgatcaaacatcccaatgtggtacagctgcatgaggttatggcgagcaaaacgaagatatacatggttcttgaatttgttgatggaggcgagctattcgataagatcgtcaattctggaaggctaggagaggatgaagctaggatatactttcatcaacttataaatgcagttgattattgccatagccgaggagtgtaccatagagacctgaagccagagaatttgcttctggattcaaatggagctcttaaagtttcagacttcggcctaagtgcatttgcaccacaaacaaatgaggatgggcttctgcatactacctgtggaactccaaactatgtagcacctgaggtgcttgctgataaaggttatgatggtatggctgcagatgtatggtcctgtggcataatcttatttgttcttatggctggatacttaccctttgatgatgccaatctgatgagactgtacaaactgatctgccaagcatatttttcttgcccaccatggttttcttctggagcgaagaagtttattaagcgcattctcgatcctaatcctgatacgaggataacaattgcagaaattttggaagatgaatggttcaaaaaagattataaaccaccacgttttgaacaaggtgaagatgttagccttgacgacattgatgctgcattcaatgattcagaggaccgtcttgtggcagagaaaagagagaaaccggaatccatgaacgcgtttgctcttatttcgaggtcgcagggtttcaaccttggaaatttgtttgagaaggagatgatgggaatggtaaagagggaaacatctttcacgtctcaatgcacagcacaggagatcatgacaaaaatagaggatgcatgtgggccactcggtttcaacgtgcggaaacaaaattacaagatgaaattgaaaggtgacaaatctggaagaaaaggtcacttatctgttgcaactgaggtttttgaggttgccccatcacttcacatggttgagcttcgtaaaaccggaggagacacattggagttccacagcttctacaagaacttctcatcggagctgaaagatatcgtgtggaaagctgaatctgacgcaaataataaacagacgaataagtgatacccagagaatctgtgtagccctcatgaggccacattcagatagatcacctcttcgggtgataccacctgcttggtactgtatgcttttttttttactggtaccacattagcagccaaaatctcttgtaaacgggaactccttctgaatgagcgcaattgtacaaaacacatatgaagaggccctccgtgagatgctccgaacactgcaatgggatgtcaaatagttctgaatggtgagtgctgtttttgcatctataggggcatatatgtttccattccatgtgcatgtaccgttgttgtatgcgcatgggggtacgtgtgcagcaggagagagagaacatctgaacgtgtcctgagaggaaaaaaaaagtctatgtccgtttctaaaatgctttggttgtcaccagggttgagtgcctttgttttatgaaaatggacaatggagaatgatgtatgaagcttaactctagtatttgggagtaaaagtatgtttggttggatgtataatgaggaatggaagggggtcgtcacactttctatagtgtttggatgaaagttaagcggtgaagaggtaaatgccggagtaattttttggtggtgtagggaatgttgagatccacatagttgtacttggttggatacgctattatttttagcacatattaggacttctttgattagta

SEQ ID NO: 202992 - DNA, 1937 bp, Zea Mays
ctttcgatcacaaggaaaaactgcacacgcctagggctcctttttccccccctagagattgagatcaagcgggagatttcgactatgaagctgatcaaacatcccaatgtggtacagctgcatgaggttatggcgagcaaaacgaagatatacatggttcttgaatttgttgatggaggcgagctattcgataagatcgtcaattctggaaggctaggagaggatgaagctaggatatactttcatcaacttataaatgcagttgattattgccatagccgaggagtgtaccatagagacctgaagccagagaatttgcttctggattcaaatggagctcttaaagtttcagacttcggcctaagtgcatttgcaccacaaacaaatgaggatgggcttctgcatactacctgtggaactccaaactatgtagcacctgagatgtgtaagcatcgcgctcttcctgcaggtgcttgctgataaaggttatgatggtatggctgcagatgtatggtcctgtggcataatcttatttgttcttatggctggatacttaccctttgatgatgccaatctgatgagactgtacaaactgatctgccaagcatatttttcttgcccaccatggttttcttctggagcgaagaagtttattaagcgcattctcgatcctaatcctgatacgaggataacaattgcagaaattttggaagatgaatggttcaaaaaagattataaaccaccacgttttgaacaaggtgaagatgttagccttgacgacattgatgctgcattcaatgattcagaggaccgtcttgtggcagagaaaagagagaaaccggaatccatgaacgcgtttgctcttatttcgaggtcgcagggtttcaaccttggaaatttgtttgagaaggagatgatgggaatggtaaagagggaaacatctttcacgtctcaatgcacagcacaggagatcatgacaaaaatagaggatgcatgtgggccactcggtttcaacgtgcggaaacaaaattacaagatgaaattgaaaggtgacaaatctggaagaaaaggtcacttatctgttgcaactgaggtttttgaggttgccccatcacttcacatggttgagcttcgtaaaaccggaggagacacattggagttccacagcttctacaagaacttctcatcggagctgaaagatatcgtgtggaaagctgaatctgacgcaaataataaacagacgaataagtgatacccagagaatctgtgtagccctcatgaggccacattcagatagatcacctcttcgggtgataccacctgcttggtactgtatgcttttttttttactggtaccacattagcagccaaaatctcttgtaaacgggaactccttctgaatgagcgcaattgtacaaaacacatatgaagaggccctccgtgagatgctccgaacactgcaatgggatgtcaaatagttctgaatggtgagtgctgtttttgcatctataggggcatatatgtttccattccatgtgcatgtaccgttgttgtatgcgcatgggggtacgtgtgcagcaggagagagagaacatctgaacgtgtcctgagaggaaaaaaaaagtctatgtccgtttctaaaatgctttggttgtcaccagggttgagtgcctttgttttatgaaaatggacaatggagaatgatgtatgaagcttaactctagtatttgggagtaaaagtatgtttggttggatgtataatgaggaatggaagggggtcgtcacactttctatagtgtttggatgaaagttaagcggtgaagaggtaaatgccggagtaattttttggtggtgtagggaatgttgagatccacatagttgtacttggttggatacgctattatttttagcacatattaggacttctttgattagta

SEQ ID NO: 202993 - DNA, 1844 bp, Zea Mays
gcctagggctcctttttccccccctagagattgagatcaagcgggagatttcgactatgaagctgatcaaacatcccaatgtggtacagctgcatgaggttatggcgagcaaaacgaagatatacatggttcttgaatttgttgatggaggcgagctattcgataagatcgtcaattctggaaggctaggagaggatgaagctaggatatactttcatcaacttataaatgcagttgattattgccatagccgaggagtgtaccatagagacctgaagccagagaatttgcttctggattcaaatggagctcttaaagtttcagacttcggcctaagtgcatttgcaccacaaacaaatgaggatgggcttctgcatactacctgtggaactccaaactatgtagcacctgagatgtatggtcctgtggcataatcttatttgttcttatggctggatacttaccctttgatgatgccaatctgatgagactgtacaaactgatctgccaagcatatttttcttgcccaccatggttttcttctggagcgaagaagtttattaagcgcattctcgatcctaatcctgatacgaggataacaattgcagaaattttggaagatgaatggttcaaaaaagattataaaccaccacgttttgaacaaggtgaagatgttagccttgacgacattgatgctgcattcaatgattcagaggaccgtcttgtggcagagaaaagagagaaaccggaatccatgaacgcgtttgctcttatttcgaggtcgcagggtttcaaccttggaaatttgtttgagaaggagatgatgggaatggtaaagagggaaacatctttcacgtctcaatgcacagcacaggagatcatgacaaaaatagaggatgcatgtgggccactcggtttcaacgtgcggaaacaaaattacaagatgaaattgaaaggtgacaaatctggaagaaaaggtcacttatctgttgcaactgaggtttttgaggttgccccatcacttcacatggttgagcttcgtaaaaccggaggagacacattggagttccacagcttctacaagaacttctcatcggagctgaaagatatcgtgtggaaagctgaatctgacgcaaataataaacagacgaataagtgatacccagagaatctgtgtagccctcatgaggccacattcagatagatcacctcttcgggtgataccacctgcttggtactgtatgcttttttttttactggtaccacattagcagccaaaatctcttgtaaacgggaactccttctgaatgagcgcaattgtacaaaacacatatgaagaggccctccgtgagatgctccgaacactgcaatgggatgtcaaatagttctgaatggtgagtgctgtttttgcatctataggggcatatatgtttccattccatgtgcatgtaccgttgttgtatgcgcatgggggtacgtgtgcagcaggagagagagaacatctgaacgtgtcctgagaggaaaaaaaaagtctatgtccgtttctaaaatgctttggttgtcaccagggttgagtgcctttgttttatgaaaatggacaatggagaatgatgtatgaagcttaactctagtatttgggagtaaaagtatgtttggttggatgtataatgaggaatggaagggggtcgtcacactttctatagtgtttggatgaaagttaagcggtgaagaggtaaatgccggagtaattttttggtggtgtagggaatgttgagatccacatagttgtacttggttggatacgctattatttttagcacatattaggacttctttgattagta

SEQ ID NO: 202994 - DNA, 1684 bp, Zea Mays
ctcctttttccccccctagagattgagatcaagcgggagatttcgactatgaagctgatcaaacatcccaatgtggtacagctgcatgaggttatggcgagcaaaacgaagatatacatggttcttgaatttgttgatggaggcgagctattcgataagatcgaggatgggcttctgcatactacctgtggaactccaaactatgtagcacctgaggtgcttgctgataaaggttatgatggtatggctgcagatgtatggtcctgtggcataatcttatttgttcttatggctggatacttaccctttgatgatgccaatctgatgagactgtacaaactgatctgccaagcatatttttcttgcccaccatggttttcttctggagcgaagaagtttattaagcgcattctcgatcctaatcctgatacgaggataacaattgcagaaattttggaagatgaatggttcaaaaaagattataaaccaccacgttttgaacaaggtgaagatgttagccttgacgacattgatgctgcattcaatgattcagaggaccgtcttgtggcagagaaaagagagaaaccggaatccatgaacgcgtttgctcttatttcgaggtcgcagggtttcaaccttggaaatttgtttgagaaggagatgatgggaatggtaaagagggaaacatctttcacgtctcaatgcacagcacaggagatcatgacaaaaatagaggatgcatgtgggccactcggtttcaacgtgcggaaacaaaattacaagatgaaattgaaaggtgacaaatctggaagaaaaggtcacttatctgttgcaactgaggtttttgaggttgccccatcacttcacatggttgagcttcgtaaaaccggaggagacacattggagttccacagcttctacaagaacttctcatcggagctgaaagatatcgtgtggaaagctgaatctgacgcaaataataaacagacgaataagtgatacccagagaatctgtgtagccctcatgaggccacattcagatagatcacctcttcgggtgataccacctgcttggtactgtatgcttttttttttactggtaccacattagcagccaaaatctcttgtaaacgggaactccttctgaatgagcgcaattgtacaaaacacatatgaagaggccctccgtgagatgctccgaacactgcaatgggatgtcaaatagttctgaatggtgagtgctgtttttgcatctataggggcatatatgtttccattccatgtgcatgtaccgttgttgtatgcgcatgggggtacgtgtgcagcaggagagagagaacatctgaacgtgtcctgagaggaaaaaaaaagtctatgtccgtttctaaaatgctttggttgtcaccagggttgagtgcctttgttttatgaaaatggacaatggagaatgatgtatgaagcttaactctagtatttgggagtaaaagtatgtttggttggatgtataatgaggaatggaagggggtcgtcacactttctatagtgtttggatgaaagttaagcggtgaagaggtaaatgccggagtaattttttggtggtgtagggaatgttgagatccacatagttgtacttggttggatacgctattatttttagcacatattaggacttctttgattagta

SEQ ID NO: 202995 - DNA, 1185 bp, Zea Mays
tatgtatattgggttccgttacaacgcatggccatgtttgctaatacgaactaaaggaccgtcttgtggcagagaaaagagagaaaccggaatccatgaacgcgtttgctcttatttcgaggtcgcagggtttcaaccttggaaatttgtttgagaaggagatgatgggaatggtaaagagggaaacatctttcacgtctcaatgcacagcacaggagatcatgacaaaaatagaggatgcatgtgggccactcggtttcaacgtgcggaaacaaaattacaagatgaaattgaaaggtgacaaatctggaagaaaaggtcacttatctgttgcaactgaggtttttgaggttgccccatcacttcacatggttgagcttcgtaaaaccggaggagacacattggagttccacagcttctacaagaacttctcatcggagctgaaagatatcgtgtggaaagctgaatctgacgcaaataataaacagacgaataagtgatacccagagaatctgtgtagccctcatgaggccacattcagatagatcacctcttcgggtgataccacctgcttggtactgtatgcttttttttttactggtaccacattagcagccaaaatctcttgtaaacgggaactccttctgaatgagcgcaattgtacaaaacacatatgaagaggccctccgtgagatgctccgaacactgcaatgggatgtcaaatagttctgaatggtgagtgctgtttttgcatctataggggcatatatgtttccattccatgtgcatgtaccgttgttgtatgcgcatgggggtacgtgtgcagcaggagagagagaacatctgaacgtgtcctgagaggaaaaaaaaagtctatgtccgtttctaaaatgctttggttgtcaccagggttgagtgcctttgttttatgaaaatggacaatggagaatgatgtatgaagcttaactctagtatttgggagtaaaagtatgtttggttggatgtataatgaggaatggaagggggtcgtcacactttctatagtgtttggatgaaagttaagcggtgaagaggtaaatgccggagtaattttttggtggtgtagggaatgttgagatccacatagttgtacttggttggatacgctattatttttagcacatattaggacttctttgattagta

SEQ ID NO: 202996 - DNA, 535 bp, Zea Mays
gtaggcgcaggcagatttgctctgcgggcactcgggcagcactagcgagctgaggggcgcgcctgaggctgaggccgagcagcagaggtctcgctcttcgcctggacttggaccacaccaccacacacttccattccctccgtcaggtccgaataatgggccaccgccgtctcttcgttctctcgctggggctggctcatcttctcctcatcgccaccgcgcacgccggaggcggccatgctcgaggcgccgccaccgacgatgctgtcgcccaccagggcatgagcatggtcgggtcgaggccgccgagctgcgcggggcggtgctggtggtgcggcgcccgccgctgcgaggccgtgcaggcatgcatggacgacggatcgtcatcagagcgcgtcttggcttgcagtgtggtgtgttgatcttgcatcgatcaatccattttctttcctgttgcggtgtgaatatagtagaagtcgctgctaaatatgcgtcttcaaaaataaattaaagaaaaggaaaaacccgtttatcg

SEQ ID NO: 202997 - DNA, 2605 bp, Zea Mays
tttcttgcgcaattgctcgcccttgctgacgaggagcagcacctcatactgaagcagcacccagcaggaggggcggaggcggcaacaccaacaccaacaccacaggccgccgccgcgcctcgagctggctatggcgcacgcgcggggcggcgggggccacggccacggccacgaggaggaagcggaggcggccgtctgcctggacggcgactccgaggcgggcgaagcgcgcagcgcggggcgcgcgccgccgtggcgggaccagctgacggcgcgcgggatggtggcgagcctcgccgtcggcgccatgtacagcgtcatcgtcatgaagctgggcctcaccacagggctcgtccccacgctcaacgtctccgccgcgctcatcgccttcgtcatcctccgcgggtggacgcaggcgctcgcccgcttcggcgtcgctacgcgcccgttcacccgccaggagaacaccgtcgtccagacatgcgccgtcgcctgctacagcatcgccgtcggaggtgggtttggctccttcttgcttgctctgaacaagaggacctacgagatggctggggaggacacggaaggcaaccttccgggaagctacaaggagcctggcattggctggatgaccggcttcctcttcgccgtaagcttcgtcgggattgttgcgctaatacctctaaggaagatttttcttcgatttcagtctaacatatgttggcgctgggatgatttgctctcacctcgttaatctatctctccttcttggtgcacttctctcatggggaataatgtggccactggtcagtgatttgaaaggggattggtatcctgcagatatgccagaaagcagcatgagaagcctgcaaggttacaaggccttcatctgcatagcgctcctcttgggcgatggtctttacaattttgttaaggttgttgcattcactgttaagagtctacttggcagatcaagactgaagaatgcaaagaaagaggaagacattccagtgcttgatgaaattcagcgcaatgagatttttacaagagacagtatccccacatggctagcctactctggatatcttgcactatcagctgttgctgtgtttgccattcccttgatgttccatgagatgaaatggtactatgttattatagcatacttattggccccggcattgggtttctgcaatgcctatggtgctggccttactgatatcaacatggcctacaattatggaaaggtcgcgctctttattcttgcggcctgggctgggaaggactctggtgttgtagctggcctagtgggttgtggtttggtgaaatcactggtgtcaatatccgctgatctgatgcatgacttcaagactggacatcttacattaacatcacctagatcaatgattattgctcaggctattggcactgccatgggctgtgtcattggaccactgacatttttactgttctacaaggcttttgacattggaaaccctgatgggtactggaaggcaccatatgctctaatctaccgcaatatggcaattcttggtgtccagggcttctctgctctgcccctgcattgtttgcagctgtgctacggattctttggatttgcagtggcagccaatctgatgagggacctcttgccaccaaagtacggcaaatgggttccattaccaatggcaatgggggttcccttcctagttggtgcgagctttgccatcgacatgtgtgtggggagcttgatggtcttcatctggcacatcattgacagaagtaaagcatctttaatggtgccagcagttgcatctgggttgatatgtggcgatgggctttggatcttccctgaatccttgcttgccttggccaagatcagtccaccattgtgcatggcattcaggtcttcacactagagtaacaaaatgctcgacatctgagaacagttccatgtccaatcggagaagctgttggcatgccaagtttgttattaattagctgggatatgatacatgcaggtaggtaaagatgcagtgcctatctggatgttacctacatataatgacgtaatgtggtacccctgtaaaatttatcatatgcaagatgatacatcacattagagcaatggtaagtttgagaatttcaccccagtggtaatggatggatgcaagagctagcagtagccaaaattttgcaccataggttgtacccccacccctatagtttaatatggaaccacaagctacagtatacaaaccatcttccaaagacagctgaccctattgtcaatcacagctggttttggtaaaagaaaaatgcagtcaaatcttgcatgaatggttagcaaatcatgtatatatttatgtatgtctttgccataacttggattcacaagatgcaatgtagtaagaggcatcttggtcaggcatctgatacaattgtaaaatcatctgctgcgtccttttatcataaacaaaatcatcaggtgatgtatgcctatgaatagttagcaaaaggtacatatatggttatgtatattaaacacgttctgtgaagaagaaatgtaaccattcaacaagaacaatccaatgatacatttgtcagc

SEQ ID NO: 202998 - DNA, 2930 bp, Zea Mays
tttcttgcgcaattgctcgcccttgctgacgaggagcagcacctcatactgaagcagcacccaggtatggaatcactcgtattggcctgtcaaaatcggagatgctcctcctgtttgtccatcatttccccctcttttcggtgacctccacatttcttcctctgtcactggctcagtgctgtgtgttgtccttctggctggagcaagcggagcccagcaggaggggcggaggcggcaacaccaacaccaacaccacaggccgccgccgcgcctcgagctggctatggcgcacgcgcggggcggcgggggccacggccacggccacgaggaggaagcggaggcggccgtctgcctggacggcgactccgaggcgggcgaagcgcgcagcgcggggcgcgcgccgccgtggcgggaccagctgacggcgcgcgggatggtggcgagcctcgccgtcggcgccatgtacagcgtcatcgtcatgaagctgggcctcaccacagggctcgtccccacgctcaacgtctccgccgcgctcatcgccttcgtcatcctccgcgggtggacgcaggcgctcgcccgcttcggcgtcgctacgcgcccgttcacccgccaggagaacaccgtcgtccagacatgcgccgtcgcctgctacagcatcgccgtcggaggtgggtttggctccttcttgcttgctctgaacaagaggacctacgagatggctggggaggacacggaaggcaaccttccgggaagctacaaggagcctggcattggctggatgaccggcttcctcttcgccgtaagcttcgtcgggattgttgcgctaatacctctaaggaagatcatgataattgactacaaattaacttacccaagtggtactgcaacagctgttcttataaatggattccacacaactcatggagatgcaacggcaaagcagcaagtgaatgggttcacaaaatactttgcaatcagcttcttttggagcttcttccagtggttttactcagatttttcttcgatttcagtctaacatatgttggcgctgggatgatttgctctcacctcgttaatctatctctccttcttggtgcacttctctcatggggaataatgtggccactggtcagtgatttgaaaggggattggtatcctgcagatatgccagaaagcagcatgagaagcctgcaaggttacaaggccttcatctgcatagcgctcctcttgggcgatggtctttacaattttgttaaggttgttgcattcactgttaagagtctacttggcagatcaagactgaagaatgcaaagaaagaggaagacattccagtgcttgatgaaattcagcgcaatgagatttttacaagagacagtatccccacatggctagcctactctggatatcttgcactatcagctgttgctgtgtttgccattcccttgatgttccatgagatgaaatggtactatgttattatagcatacttattggccccggcattgggtttctgcaatgcctatggtgctggccttactgatatcaacatggcctacaattatggaaaggtcgcgctctttattcttgcggcctgggctgggaaggactctggtgttgtagctggcctagtgggttgtggtttggtgaaatcactggtgtcaatatccgctgatctgatgcatgacttcaagactggacatcttacattaacatcacctagatcaatgattattgctcaggctattggcactgccatgggctgtgtcattggaccactgacatttttactgttctacaaggcttttgacattggaaaccctgatgggtactggaaggcaccatatgctctaatctaccgcaatatggcaattcttggtgtccagggcttctctgctctgcccctgcattgtttgcagctgtgctacggattctttggatttgcagtggcagccaatctgatgagggacctcttgccaccaaagtacggcaaatgggttccattaccaatggcaatgggggttcccttcctagttggtgcgagctttgccatcgacatgtgtgtggggagcttgatggtcttcatctggcacatcattgacagaagtaaagcatctttaatggtgccagcagttgcatctgggttgatatgtggcgatgggctttggatcttccctgaatccttgcttgccttggccaagatcagtccaccattgtgcatggcattcaggtcttcacactagagtaacaaaatgctcgacatctgagaacagttccatgtccaatcggagaagctgttggcatgccaagtttgttattaattagctgggatatgatacatgcaggtaggtaaagatgcagtgcctatctggatgttacctacatataatgacgtaatgtggtacccctgtaaaatttatcatatgcaagatgatacatcacattagagcaatggtaagtttgagaatttcaccccagtggtaatggatggatgcaagagctagcagtagccaaaattttgcaccataggttgtacccccacccctatagtttaatatggaaccacaagctacagtatacaaaccatcttccaaagacagctgaccctattgtcaatcacagctggttttggtaaaagaaaaatgcagtcaaatcttgcatgaatggttagcaaatcatgtatatatttatgtatgtctttgccataacttggattcacaagatgcaatgtagtaagaggcatcttggtcaggcatctgatacaattgtaaaatcatctgctgcgtccttttatcataaacaaaatcatcaggtgatgtatgcctatgaatagttagcaaaaggtacatatatggttatgtatattaaacacgttctgtgaagaagaaatgtaaccattcaacaagaacaatccaatgatacatttgtcagc

SEQ ID NO: 202999 - DNA, 2835 bp, Zea Mays
tttcttgcgcaattgctcgcccttgctgacgaggagcagcacctcatactgaagcagcacccaggaggggcggaggcggcaacaccaacaccaacaccacaggccgccgccgcgcctcgagctggctatggcgcacgcgcggggcggcgggggccacggccacggccacgaggaggaagcggaggcggccgtctgcctggacggcgactccgaggcgggcgaagcgcgcagcgcggggcgcgcgccgccgtggcgggaccagctgacggcgcgcgggatggtggcgagcctcgccgtcggcgccatgtacagcgtcatcgtcatgaagctgggcctcaccacagggctcgtccccacgctcaacgtctccgccgcgctcatcgccttcgtcatcctccgcgggtggacgcaggcgctcgcccgcttcggcgtcgctacgcgcccgttcacccgccaggagaacaccgtcgtccagacatgcgccgtcgcctgctacagcatcgccgtcggaggtgggtttggctccttcttgcttgctctgaacaagaggacctacgagatggctggggaggacacggaaggcaaccttccgggaagctacaaggagcctggcattggctggatgaccggcttcctcttcgccgtaagcttcgtcgggattgttgcgctaatacctctaaggaagatcatgataattgactacaaattaacttacccaagtggtactgcaacagctgttcttataaatggattccacacaactcatggagatgcaacggcaaagcagcaagtgaatgggttcacaaaatactttgcaatcagcttcttttggagcttcttccagtggttttactcaggtggagacaactgtgggttttcacagtttcccacttttggacttagagcttggaaacaaacatttttcttcgatttcagtctaacatatgttggcgctgggatgatttgctctcacctcgttaatctatctctccttcttggtgcacttctctcatggggaataatgtggccactggtcagtgatttgaaaggggattggtatcctgcagatatgccagaaagcagcatgagaagcctgcaaggttacaaggccttcatctgcatagcgctcctcttgggcgatggtctttacaattttgttaaggttgttgcattcactgttaagagtctacttggcagatcaagactgaagaatgcaaagaaagaggaagacattccagtgcttgatgaaattcagcgcaatgagatttttacaagagacagtatccccacatggctagcctactctggatatcttgcactatcagctgttgctgtgtttgccattcccttgatgttccatgagatgaaatggtactatgttattatagcatacttattggccccggcattgggtttctgcaatgcctatggtgctggccttactgatatcaacatggcctacaattatggaaaggtcgcgctctttattcttgcggcctgggctgggaaggactctggtgttgtagctggcctagtgggttgtggtttggtgaaatcactggtgtcaatatccgctgatctgatgcatgacttcaagactggacatcttacattaacatcacctagatcaatgattattgctcaggctattggcactgccatgggctgtgtcattggaccactgacatttttactgttctacaaggcttttgacattggaaaccctgatgggtactggaaggcaccatatgctctaatctaccgcaatatggcaattcttggtgtccagggcttctctgctctgcccctgcattgtttgcagctgtgctacggattctttggatttgcagtggcagccaatctgatgagggacctcttgccaccaaagtacggcaaatgggttccattaccaatggcaatgggggttcccttcctagttggtgcgagctttgccatcgacatgtgtgtggggagcttgatggtcttcatctggcacatcattgacagaagtaaagcatctttaatggtgccagcagttgcatctgggttgatatgtggcgatgggctttggatcttccctgaatccttgcttgccttggccaagatcagtccaccattgtgcatggcattcaggtcttcacactagagtaacaaaatgctcgacatctgagaacagttccatgtccaatcggagaagctgttggcatgccaagtttgttattaattagctgggatatgatacatgcaggtaggtaaagatgcagtgcctatctggatgttacctacatataatgacgtaatgtggtacccctgtaaaatttatcatatgcaagatgatacatcacattagagcaatggtaagtttgagaatttcaccccagtggtaatggatggatgcaagagctagcagtagccaaaattttgcaccataggttgtacccccacccctatagtttaatatggaaccacaagctacagtatacaaaccatcttccaaagacagctgaccctattgtcaatcacagctggttttggtaaaagaaaaatgcagtcaaatcttgcatgaatggttagcaaatcatgtatatatttatgtatgtctttgccataacttggattcacaagatgcaatgtagtaagaggcatcttggtcaggcatctgatacaattgtaaaatcatctgctgcgtccttttatcataaacaaaatcatcaggtgatgtatgcctatgaatagttagcaaaaggtacatatatggttatgtatattaaacacgttctgtgaagaagaaatgtaaccattcaacaagaacaatccaatgatacatttgtcagc

SEQ ID NO: 203000 - DNA, 3311 bp, Zea Mays
tttcttgcgcaattgctcgcccttgctgacgaggagcagcacctcatactgaagcagcacccaggtatggaatcactcgtattggcctgtcaaaatcggagatgctcctcctgtttgtccatcatttccccctcttttcggtgacctccacatttcttcctctgtcactggctcagtgctgtgtgttgtccttctggctggagcaagcggagcccaggtgtggcgagatatttcctatctttctctcgatgaaactttctcaaaaataaattccatggattcttcatcaagttattttcttgctccacggattgcctgctctgatgatctggtccttggcaagatcacactcgtgttcataaactcaccaactcactgacacccccgtactctttcttcttcacccacggccaagatagaactcactggcatgctaggcttcctctttttaattcaccaactccctcctccggcgcatccgcatccgaatctcaatccccacgggcacgaatctgacgctgcgaaaacctttccgccatgaagcaggaggggcggaggcggcaacaccaacaccaacaccacaggccgccgccgcgcctcgagctggctatggcgcacgcgcggggcggcgggggccacggccacggccacgaggaggaagcggaggcggccgtctgcctggacggcgactccgaggcgggcgaagcgcgcagcgcggggcgcgcgccgccgtggcgggaccagctgacggcgcgcgggatggtggcgagcctcgccgtcggcgccatgtacagcgtcatcgtcatgaagctgggcctcaccacagggctcgtccccacgctcaacgtctccgccgcgctcatcgccttcgtcatcctccgcgggtggacgcaggcgctcgcccgcttcggcgtcgctacgcgcccgttcacccgccaggagaacaccgtcgtccagacatgcgccgtcgcctgctacagcatcgccgtcggaggtgggtttggctccttcttgcttgctctgaacaagaggacctacgagatggctggggaggacacggaaggcaaccttccgggaagctacaaggagcctggcattggctggatgaccggcttcctcttcgccgtaagcttcgtcgggattgttgcgctaatacctctaaggaagatcatgataattgactacaaattaacttacccaagtggtactgcaacagctgttcttataaatggattccacacaactcatggagatgcaacggcaaagcagcaagtgaatgggttcacaaaatactttgcaatcagcttcttttggagcttcttccagtggttttactcaggtggagacaactgtgggttttcacagtttcccacttttggacttagagcttggaaacaaacatttttcttcgatttcagtctaacatatgttggcgctgggatgatttgctctcacctcgttaatctatctctccttcttggtgcacttctctcatggggaataatgtggccactggtcagtgatttgaaaggggattggtatcctgcagatatgccagaaagcagcatgagaagcctgcaaggttacaaggccttcatctgcatagcgctcctcttgggcgatggtctttacaattttgttaaggttgttgcattcactgttaagagtctacttggcagatcaagactgaagaatgcaaagaaagacattccagtgcttgatgaaattcagcgcaatgagatttttacaagagacagtatccccacatggctagcctactctggatatcttgcactatcagctgttgctgtgtttgccattcccttgatgttccatgagatgaaatggtactatgttattatagcatacttattggccccggcattgggtttctgcaatgcctatggtgctggccttactgatatcaacatggcctacaattatggaaaggtcgcgctctttattcttgcggcctgggctgggaaggactctggtgttgtagctggcctagtgggttgtggtttggtgaaatcactggtgtcaatatccgctgatctgatgcatgacttcaagactggacatcttacattaacatcacctagatcaatgattattgctcaggctattggcactgccatgggctgtgtcattggaccactgacatttttactgttctacaaggcttttgacattggaaaccctgatgggtactggaaggcaccatatgctctaatctaccgcaatatggcaattcttggtgtccagggcttctctgctctgcccctgcattgtttgcagctgtgctacggattctttggatttgcagtggcagccaatctgatgagggacctcttgccaccaaagtacggcaaatgggttccattaccaatggcaatgggggttcccttcctagttggtgcgagctttgccatcgacatgtgtgtggggagcttgatggtcttcatctggcacatcattgacagaagtaaagcatctttaatggtgccagcagttgcatctgggttgatatgtggcgatgggctttggatcttccctgaatccttgcttgccttggccaagatcagtccaccattgtgcatggcattcaggtcttcacactagagtaacaaaatgctcgacatctgagaacagttccatgtccaatcggagaagctgttggcatgccaagtttgttattaattagctgggatatgatacatgcaggtaggtaaagatgcagtgcctatctggatgttacctacatataatgacgtaatgtggtacccctgtaaaatttatcatatgcaagatgatacatcacattagagcaatggtaagtttgagaatttcaccccagtggtaatggatggatgcaagagctagcagtagccaaaattttgcaccataggttgtacccccacccctatagtttaatatggaaccacaagctacagtatacaaaccatcttccaaagacagctgaccctattgtcaatcacagctggttttggtaaaagaaaaatgcagtcaaatcttgcatgaatggttagcaaatcatgtatatatttatgtatgtctttgccataacttggattcacaagatgcaatgtagtaagaggcatcttggtcaggcatctgatacaattgtaaaatcatctgctgcgtccttttatcataaacaaaatcatcaggtgatgtatgcctatgaatagttagcaaaaggtacatatatggttatgtatattaaacacgttctgtgaagaagaaatgtaaccattcaacaagaacaatccaatgatacatttgtcagc

SEQ ID NO: 203001 - DNA, 1410 bp, Zea Mays
ttccggggtgatttcccgggtgggacgcaagtccactgttgttttctgcttttccatttggtttttgggcaacctattacttttaacctttctatttgttgttagtgtacctttgaactaccagggcatagggtacctgagggcttgtttggttagggtggattcaagagttagaggggactagttaaaattgaatagaaagatatataatcccactcaaccccctccgtatccgatcctcatgcaactgagcaaggccagacaagggtattaaacgatgtgtcaatgaggtgggtgttggattcatgatgtctgcaaattatcatcctgcaatgaaaattgtcagacctgtgaggaagaagcttaaaataaagacagttttcaatatccttggtcctctactgaatccagcaagggtgcctcatgctgttattggtgtttaccatgagaatatagttaccaagatggctaaggctgctcagaaatttggaatgaagagagcattggtcgtccattcaaagggtttggatgaaataagcccacttggtcccggatatatccttgatgttactccagagaagattgaaaaaatgttcttcgatccattggattttggcattcctcgctgcacattggaagatctgaaaggaggcgatccagcgtttaatgcaaaagttctccaggatgttcttgctggtcaaaggggggcgattgcagatgcccttgttctaaatgctgcggcgtccctacttgtcagtggtaaagtgaaaaatttacatgacggtgttgctttagcacaggagacacagcggtccgggaaagccatcaatacacttgagtcttggataaaaaaatcaaatagttccagagactgagtgaagttgagtagcaatagatggatttctgcaataagacatgaggaatggtagcaaataagggctccgctgagtccatccatcatccgtgtatgattggctttcttctcgtgttttgttcatgatttgtgtcagaaacctaggtggcatctagtctggtttatgtattgccagtgctgttgtgtagaaaaatctccgtcgatattctaagctttttggttagaaaggtgcgctcttcattgtccttgacggaactcggggtagatgaacataggccatctgttgtgatcttgtgatgctgcattacgtttgcaatggatcatatattatgcaatggcatgggaagattatacccatttgtaatgggggagaatcagggcttaaacatttctacaataacgtgcgaagagttgtccccattggtaacgcatgtcctgaaatatgaataaagctgcaggcagttgatattttgcaactgaaagtccgtcgcctcgagtaattggagctcgtccttgattcttatatgtatcattat

SEQ ID NO: 203002 - DNA, 899 bp, Zea Mays
gactctggcttcctctaggaagccagaataaattggtcccggatatatccttgatgttactccagagaagattgaaaaaatgttcttcgatccattggattttggcattcctcgctgcacattggaagatctgaaaggaggcgatccagcgtttaatgcaaaagttctccaggatgttcttgctggtcaaaggggggcgattgcagatgcccttgttctaaatgctgcggcgtccctacttgtcagtggtaaagtgaaaaatttacatgacggtgttgctttagcacaggagacacagcggtccgggaaagccatcaatacacttgagtcttggataaaaaaatcaaatagttccagagactgagtgaagttgagtagcaatagatggatttctgcaataagacatgaggaatggtagcaaataagggctccgctgagtccatccatcatccgtgtatgattggctttcttctcgtgttttgttcatgatttgtgtcagaaacctaggtggcatctagtctggtttatgtattgccagtgctgttgtgtagaaaaatctccgtcgatattctaagctttttggttagaaaggtgcgctcttcattgtccttgacggaactcggggtagatgaacataggccatctgttgtgatcttgtgatgctgcattacgtttgcaatggatcatatattatgcaatggcatgggaagattatacccatttgtaatgggggagaatcagggcttaaacatttctacaataacgtgcgaagagttgtccccattggtaacgcatgtcctgaaatatgaataaagctgcaggcagttgatattttgcaactgaaagtccgtcgcctcgagtaattggagctcgtccttgattcttatatgtatcattat

SEQ ID NO: 203003 - DNA, 1244 bp, Zea Mays
cacggagccgcgggaccggatccgaaaatggttatttgcagttttgcacgatgtatcacgatcgcttcagtaccactgatgtgtcacctcgggttttgtcagatttagggctggtttgggaactccatttttctaaattatttctatttttcccaagtgttgattggaaaaatagggtttctaaactagcccttaggatgcgcttaaaacccactcgtagatctaggatgcccctaaaacccactcgtagatctaggatgctcctaaaacccagtcgtagattcacacatgcagtcttggtgttaaatgatttagggtgcagtgtgcagatcagcagatgttcaatccacttgtctactgcaagttgcgtgagcaagctgtggtcgctcacagcgtgtttggtttgcatcacaaaaccattccatggcgtgtggtgccgtttggtttaagctgcggaatcaatcagtctatcatggagttgttctgtgtagaccccccccttcaccgatgtacccggtgcacctgacacggctggctattatccacgcgatgaagaaagggcagggtatcgtgctgctagagataccgagtctcttaacgcttcctacgaacgttttctacgtactgggcaaattcaatcctttggtggtggacatgctggagaacctattaggcctgctgtgggtggcaatgctgcctacccagttgatgatcgttcaatgatggctgctaggggtatggatagcagaaatattggtttcgttggtggaatgccagagccaccccttccacctgatgcctcaaacaccttatatatagaaggcgttccatctgactgtacacgtcgagaagtttcacgtatccttagatatatatcttttctgccgctctttgtttctaaacatctatttgcataaactgtgatcaaacataactagtccttcacttcccccagacatcttccgaccatttgttggctttcgtgaggttagacttgtaaacaaagaaccgaaacatcctggtggtgaccctattgtcctttgttttgttgattttgcggaacctacacaatctgctattgcattggatgctttgcaaggctataagtttgacgagcatgatcgcaattcacccaatctgcggctgcagtttgctcgtttcgcaggtccaaaggggaattcaggacctggtggtcgtggtaggcgataagttattggcgttcctttttgccaggtgattcacgg

SEQ ID NO: 203004 - DNA, 657 bp, Zea Mays
cactccgaagcgctcgtcgcaaaagctgtggcactgccgcactggcacagtggcacgcgattcctttccttccgcgtccgcgtccttctcggctgtctgtgcagttgtgctcgcttgctccccacgcccacgtcattccccgtccgctgcggctcacctccagcctcacggtcccgcgaccgctatggccgacgcgtactggaggtacgcggccgctgccccgcgccagcagcagcagcagcagcagccgccgccctccgccggcgggggcgtcgcgcaccccggcatgggcggcggcgcaccgcagatggcccccgccggggggcagcagcagcccatgaagcggccccgccccaccgaattctcagacatcttccgaccatttgttggctttcgtgaggttagacttgtaaacaaagaaccgaaacatcctggtggtgaccctattgtcctttgttttgttgattttgcggaacctacacaatctgctattgcattggatgctttgcaaggctataagtttgacgagcatgatcgcaattcacccaatctgcggctgcagtttgctcgtttcgcaggtccaaaggggaattcaggacctggtggtcgtggtaggcgataagttattggcgttcctttttgccaggtgattcacgg

SEQ ID NO: 203005 - DNA, 2152 bp, Zea Mays
gtgctttacttcgcgcgagcaaagaggggagctggggagggcaaacacgcactagacccaaatcctcgtagctccagacatccagaacggcagaaccttctagaccaaaccttcgacccatcacctcgagctccagccatgtcgctctcgtcggcgcgccagcgccgggccactgcagcgtcgccaccgacagatgatgggtacgccaaggacgccaaggacaggaggcggcggcccggcggagacggggacagcgaggacgagggtatcaagtggttcctcccgttcctggcgctcgggctcctccgccacatgagcgcgtcctccaacctgatccacgactgcgacgaggtcttcaactactgggagcccctccacttcctcctctaccgctccggcttccagacatgggagtacagttccgactttgctcttcggtcatatttgtaccttttctttcatgctcttgtagctgggcctgcttcattgatctttggtgagcataaggttcgtgtgttctactcagtgagaatctttcttggtctcatttcaactattaccgaaactgttctggtggttgctctttcaagaagatatgggaagcggcttgcttgttatgttcttgcaatgctatgcttatccagcggttgcttctttgctagtaccagtttcttgccaagttcattctccatgtatgcagtaacactttcgtctgcactcttccttcttgagaaatatgctggtgcagtctcagttgcagctgctggagtgatccttggttggcctttctcaattttggtcttcctccctgttaccgtttattctctaattagaggatcttttagaagggtttttctatctggatttgtgacttcactgtgctttcttgttctttcgtttgttgctgattattactgctatggtcgattgacattctcggtgttcaatcttctgaaatataacgttattggtggcggcgaaagtcacttgtatggaaccgaggggttttcattttacttcaggaatggattcaataatttcaattttgccttcatcctggctcttcttttcttgggggttgtaccatttgcaagaaagaaatatgctcctgatctcctgatagttgtctctcctgtctatatctggttggctttcatgtctttgcaggcacacaaagaagaaaggtttctctatccaatttattcattgatatgtgttgcagctgcagctgttattgacagtttacctgattttttccatgacaaatattcatctgatcagtctatttttgaaaagatagcgaagggtctgcgtcctttgatacttggttttattctgtgtgcttcccacagccgaacattttccatgttaaatggatatggtgctcccctgcagatctatcagcatctagaacatcatgatgacactggacccgggtctattctgtgtgttggaagtgagtggcatcgctatccatcatcgttcttcataccctcttatatcagtgaagtccggtggatagatgatggcttccgtgggttacttccatttcccttcaacgagacactgggtgggaccactgcagctccgtcctacttcaataacaagaacaaggcggctgaagggcaatatctgaaagacattggagcatgtaacttactggtggaacttgatctaagacggccttacccctcgcgcgggagtgacttgtcgacatgggaggcattggccgcactgccgttcctggacagagagctttcccctgcattatatcggtccttcttcataccataccgatggcaacaaaacaatgtgttcggcctgtacaagctactgaggagcttgcagatttttactgccatagattttctgatcccaatgtgtaatggcgtacctatttttgtcccactgatccttccatcatacaaattcatcacgagatgacgaggatgagagtgctcaactgctgatgtagggagggatgttcgaggagaatcatgttgtgaaacggctgcttcgccagttgttacctttttggattgtttgttgaatattagccaatgacagactgatagatctatacctttttatgttgagcatttttttcctcctgcaaaatgcctctattgtttctccgcatatgctgtgcaaa

SEQ ID NO: 203006 - DNA, 1239 bp, Zea Mays
cttctcgctgttattgtcgtgctgcgccagttcttagtttaattgctatataagcacagacaagttgagtgaatcagtcattttggaagttgtcaccaagaacttcaaagaccacctcatacttggggaggaaggcggccttgttggagattccctatcagagtacctctggtgcattgaccctttagatggaacaacgaactttgcacatggttaccccagcttttctgtgtccattagtgttctcttccgtggaaagcctgctgcttctactgtggtggaattttgtggcgggcctatgtgctggagcacccgtacaatttctgcatctgctggcggaggagcttactgtaatgggcaaaagattcatgtcagtcagacagacaaggtggaacaatcacttctcgtcacaggttttggatatgaacacgatgatgcctggacgaccaatatgaatctgttcaaggaatttactgacattagcaggggagtgcgaaggctagggtctgctgctgctgacatgtcccacattggacttggtattacagaagcttactgggaataccgacttaagccatgggatatggctgctggcgtcctgatagtagaggaagctggtggggtggtaactcgcatggacggtggagagtttacggtcttcgatcgctctgttcttgtttccaacggacttgttcatggacagcttttggaccggatcggccctcctactgaagaccttaagaagaaagggatcgacttctcgttgtggttcaagcctgacaagtacccgactgacttttgagctgcatcaagggcaccaccaccagccatgggccaccataataaagcagccatcatttttttttgggaaatttggatctgtaatcttttaatggtatagatccaattattccttttttttggggggtgtccttcaagaagaaacaataatgtttttagttcaatagcactgtacttgtaatggcaatacgatgtacagttcttcgactcgagtttcaaatcagagtttcaagagagccaagctcctgaaagaacagagcttcacaactgaacatggaatgtgcccccattgctctggcttttcgattgttacatgtatcggacgagatcgagattttggaagaggccagctcatttctacatctaagaattgattccatcgtgagccgctttggcctgctaggctgctgctcctcttcgagataccattgatggggg

SEQ ID NO: 203007 - DNA, 2073 bp, Zea Mays
actgtagtggagctggagcgcgcacgcacacacgagtacacgacacgagacacaagccgggaattgaagcatcaagccctttctctgagcgccgatggcacggtatcttctcgcccccacttccacctcctcctctacctttctccccaaggatggagtcaagaactcgccgacgtcacggcccctccgcctccgtgcgctcggctccaggaccagcaaggcgcggcacatcatggcggtggcgtccgagcaggccgcgccgccggccaggtaccccaaggtggccgcccctaccaccggcccgatccccgccgccgagctgctcggagtcatcgaggccgccgcaaaagctggggccgatgttataatggaagctgttaataagccacgcaatatccactataaaggtgttgcagacctggtgacagacacagacaagttgagtgaatcagtcattttggaagttgtcaccaagaacttcaaagaccacctcatacttggggaggaaggcggccttgttggagattccctatcagagtacctctggtgcattgaccctttagatggaacaacgaactttgcacatggttaccccagcttttctgtgtccattagtgttctcttccgtggaaagcctgctgcttctactgtggtggaattttgtggcgggcctatgtgctggagcacccgtacaatttctgcatctgctggcggaggagcttactgtaatgggcaaaagattcatgtcagtcagacagacaaggtggaacaatcacttctcgtcacaggttttggatatgaacacgatgatgcctggacgaccaatatgaatctgttcaaggaatttactgacattagcaggggagtgcgaaggctagggtctgctgctgctgacatgtcccacattggacttggtattacagaagcttactgggaataccgacttaagccatgggatatggctgctggcgtcctggtagttatagttactttatctcccatgggaatattaacatttaataagtacttctccaaatcagtgttgataaataaccatgagtacatcagaactaaatatcgcccctttttttttgctttgcctaatctcacctcaatcagatattacctgttattgatctaatctaacatttttttgttaaaattagttatacgtaaataggggctgcctctaatatggcagtaaccagtctaaaaatagtgtcagaatcctgtccatggcctttctgtgaacaacgagagtaaaaggtttgaatcgatgcttatattatatttcatgatcgtataaatggatttacttttgttagatcaacgcgtactcgttaagtcagaggatgacagctctgtttccaatctagcataatcttgttttatggtgtatgttgtgctgatatatatctgcccgcttcttcgacagatagtagaggaagctggtggggtggtaactcgcatggacggtggagagtttacggtcttcgatcgctctgttcttgtttccaacggacttgttcatggacagcttttggaccggatcggccctcctactgaagaccttaagaagaaagggatcgacttctcgttgtggttcaagcctgacaagtacccgactgacttttgagctgcatcaagggcaccaccaccagccatgggccaccataataaagcagccatcatttttttttgggaaatttggatctgtaatcttttaatggtatagatccaattattccttttttttggggggtgtccttcaagaagaaacaataatgtttttagttcaatagcactgtacttgtaatggcaatacgatgtacagttcttcgactcgagtttcaaatcagagtttcaagagagccaagctcctgaaagaacagagcttcacaactgaacatggaatgtgcccccattgctctggcttttcgattgttacatgtatcggacgagatcgagattttggaagaggccagctcatttctacatctaagaattgattccatcgtgagccgctttggcctgctaggctgctgctcctcttcgagataccattgatggggg

SEQ ID NO: 203008 - DNA, 2019 bp, Zea Mays
actgtagtggagctggagcgcgcacgcacacacgagtacacgacacgagacacaagccgggaattgaagcatcaagccctttctctgagcgccgatggcacggtatcttctcgcccccacttccacctcctcctctacctttctccccaaggatggagtcaagaactcgccgacgtcacggcccctccgcctccgtgcgctcggctccaggaccagcaaggcgcggcacatcatggcggtggcgtccgagcaggccgcgccgccggccaggtaccccaaggtggccgcccctaccaccggcccgatccccgccgccgagctgctcggagtcatcgaggccgccgcaaaagctggggccgatgttataatggaagctgttaataagccacgcaatatccactataaaggtgttgcagacctggtgacagacacagacaagttgagtgaatcagtcattttggaagttgtcaccaagaacttcaaagaccacctcatacttggggaggaaggcggccttgttggagattccctatcagagtacctctggtgcattgaccctttaggtttggtcccttgctcggttcctacctctgatttgacgaacatctatttaacattgtaaccatttttgtactttgtaataccggatagctccagtagttttccagataatttctcgattttttacagcaaacctgtgaatttgaacagattagtctatcctccacttcattcatttagaaggtgatagttctctgtattactgttaccccggcgagaaaaagaattcagtcctgtgtattattagtgacaagcagattgagaaatagaaggactagtacaattcatatatctgatatttcacagcagtaagggtgtacctgcatatatgggttattgtacctgaatttaatgagaaaattaagttagcatgacggggatctaatctaccaaatttctccctccagatggaacaacgaactttgcacatggttaccccagcttttctgtgtccattagtgttctcttccgtggaaagcctgctgcttctactgtggtggaattttgtggcgggcctatgtgctggagcacccgtacaatttctgcatctgctggcggaggagcttactgtaatgggcaaaagattcatgtcagtcagacagacaaggtggaacaatcacttctcgtcacaggttttggatatgaacacgatgatgcctggacgaccaatatgaatctgttcaaggaatttactgacattagcaggggagtgcgaaggctagggtctgctgctgctgacatgtcccacattggacttggtattacagaagcttactgggaataccgacttaagccatgggatatggctgctggcgtcctgatagtagaggaagctggtggggtggtaactcgcatggacggtggagagtttacggtcttcgatcgctctgttcttgtttccaacggacttgttcatggacagcttttggaccggatcggccctcctactgaagaccttaagaagaaagggatcgacttctcgttgtggttcaagcctgacaagtacccgactgacttttgagctgcatcaagggcaccaccaccagccatgggccaccataataaagcagccatcatttttttttgggaaatttggatctgtaatcttttaatggtatagatccaattattccttttttttggggggtgtccttcaagaagaaacaataatgtttttagttcaatagcactgtacttgtaatggcaatacgatgtacagttcttcgactcgagtttcaaatcagagtttcaagagagccaagctcctgaaagaacagagcttcacaactgaacatggaatgtgcccccattgctctggcttttcgattgttacatgtatcggacgagatcgagattttggaagaggccagctcatttctacatctaagaattgattccatcgtgagccgctttggcctgctaggctgctgctcctcttcgagataccattgatggggg

SEQ ID NO: 203009 - DNA, 1607 bp, Zea Mays
actgtagtggagctggagcgcgcacgcacacacgagtacacgacacgagacacaagccgggaattgaagcatcaagccctttctctgagcgccgatggcacggtatcttctcgcccccacttccacctcctcctctacctttctccccaaggatggagtcaagaactcgccgacgtcacggcccctccgcctccgtgcgctcggctccaggaccagcaaggcgcggcacatcatggcggtggcgtccgagcaggccgcgccgccggccaggtaccccaaggtggccgcccctaccaccggcccgatccccgccgccgagctgctcggagtcatcgaggccgccgcaaaagctggggccgatgttataatggaagctgttaataagccacgcaatatccactataaaggtgttgcagacctggtgacagacacagacaagttgagtgaatcagtcattttggaagttgtcaccaagaacttcaaagaccacctcatacttggggaggaaggcggccttgttggagattccctatcagagtacctctggtgcattgaccctttagatggaacaacgaactttgcacatggttaccccagcttttctgtgtccattagtgttctcttccgtggaaagcctgctgcttctactgtggtggaattttgtggcgggcctatgtgctggagcacccgtacaatttctgcatctgctggcggaggagcttactgtaatgggcaaaagattcatgtcagtcagacagacaaggtggaacaatcacttctcgtcacaggttttggatatgaacacgatgatgcctggacgaccaatatgaatctgttcaaggaatttactgacattagcaggatagtagaggaagctggtggggtggtaactcgcatggacggtggagagtttacggtcttcgatcgctctgttcttgtttccaacggacttgttcatggacagcttttggaccggatcggccctcctactgaagaccttaagaagaaagggatcgacttctcgttgtggttcaagcctgacaagtacccgactgacttttgagctgcatcaagggcaccaccaccagccatgggccaccataataaagcagccatcatttttttttgggaaatttggatctgtaccatcaaaagattacaactttagatatataccattgtatctcacttatatgtggggtccatatgaggcaatgacatgtggagccaatggtatatatctaaagttgtaatcttttaatggtatagatccaattattccttttttttggggggtgtccttcaagaagaaacaataatgtttttagttcaatagcactgtacttgtaatggcaatacgatgtacagttcttcgactcgagtttcaaatcagagtttcaagagagccaagctcctgaaagaacagagcttcacaactgaacatggaatgtgcccccattgctctggcttttcgattgttacatgtatcggacgagatcgagattttggaagaggccagctcatttctacatctaagaattgattccatcgtgagccgctttggcctgctaggctgctgctcctcttcgagataccattgatggggg

SEQ ID NO: 203010 - DNA, 1717 bp, Zea Mays
actgtagtggagctggagcgcgcacgcacacacgagtacacgacacgagacacaagccgggaattgaagcatcaagccctttctctgagcgccgatggcacggtatcttctcgcccccacttccacctcctcctctacctttctccccaaggatggagtcaagaactcgccgacgtcacggcccctccgcctccgtgcgctcggctccaggaccagcaaggcgcggcacatcatggcggtggcgtccgagcaggccgcgccgccggccaggtaccccaaggtggccgcccctaccaccggcccgatccccgccgccgagctgctcggagtcatcgaggccgccgcaaaagctggggccgatgttataatggaagctgttaataagccacgcaatatccactataaaggtgttgcagacctggtgacagacacagacaagttgagtgaatcagtcattttggaagttgtcaccaagaacttcaaagaccacctcatacttggggaggaaggcggccttgttggagattccctatcagagtacctctggtgcattgaccctttagatggaacaacgaactttgcacatggttaccccagcttttctgtgtccattagtgttctcttccgtggaaagcctgctgcttctactgtggtggaattttgtggcgggcctatgtgctggagcacccgtacaatttctgcatctgctggcggaggagcttactgtaatgggcaaaagattcatgtcagtcagacagacaaggtggaacaatcacttctcgtcacaggttttggatatgaacacgatgatgcctggacgaccaatatgaatctgttcaaggaatttactgacattagcaggggagtgcgaaggctagggtctgctgctgctgacatgtcccacattggacttggtattacagaagcttactgggaataccgacttaagccatgggatatggctgctggcgtcctgtagaggaagctggtggggtggtaactcgcatggacggtggagagtttacggtcttcgatcgctctgttcttgtttccaacggacttgttcatggacagcttttggaccggatcggccctcctactgaagaccttaagaagaaagggatcgacttctcgttgtggttcaagcctgacaagtacccgactgacttttgagctgcatcaagggcaccaccaccagccatgggccaccataataaagcagccatcatttttttttgggaaatttggatctgtaccatcaaaagattacaactttagatatataccattgtatctcacttatatgtggggtccatatgaggcaatgacatgtggagccaatggtatatatctaaagttgtaatcttttaatggtatagatccaattattccttttttttggggggtgtccttcaagaagaaacaataatgtttttagttcaatagcactgtacttgtaatggcaatacgatgtacagttcttcgactcgagtttcaaatcagagtttcaagagagccaagctcctgaaagaacagagcttcacaactgaacatggaatgtgcccccattgctctggcttttcgattgttacatgtatcggacgagatcgagattttggaagaggccagctcatttctacatctaagaattgattccatcgtgagccgctttggcctgctaggctgctgctcctcttcgagataccattgatggggg

SEQ ID NO: 203011 - DNA, 1254 bp, Zea Mays
ctggaatcctggatcgttgccttcacaagatttattttgctgggcgctgttcctttcccaagtgatgttccacggttgaagcagcttggagttcaaggggttgtaacgttgaatgaaccttatgaaactcttgtcccaacatctttataccaggctaatgagattgagcacctggtaattccaacaagagattacctctttgcaccttcattcgaggatatttctcaagccatagatttcatccatcggaatgcatcacaaggcggtactacatatgttcattgtaaagctggaagaggacgaagcaccactattgtattgtgctacttgattaaatacaggaacatgacccctgaagcagctttggatcatgtacgatccattaggcctcgagtgcttttggcaccctcgcagtggcatgctgttaattcatttggagctctcaccggtggacaacttccagtacggagtacaaacctggcctgtttcctagaagccattgaagctggctgtacgaacacaacaggaaatgatgattaccacgtgatggagtttgactgcgaagatagtggcttaccactttatcaaattatgctacctaggccagccagccccactgggtctgggtgcaccgatgcagtcctcgtaacagaagcagatcttgagggctatgatacttatattggtaccaggaaagatgcggtgtcgttggaagtagccactcgcagtcccatcatgaggagattgtcctgcctctttggctccctcaaacttagtaacagcaactgtgagccagcttcaagccggttcactgaggttcgcgcctgctaggtaggtagtgtcttcctccagttttccatgctgcatcaagagtgtatctctagataggcaggcaatcatccaaaaaggatttgtagaagcctgtgttcatttcatggccatggggcagtgccatcgggaagaaagttgtgtgcatagccagaggggttgtttagttttcattagagtgtagagctgtgaacgcgtcgaatatccttgttttttcttgagagcatgtgattcattgcaatttgcatcattgtttacttgaaataaaataagttttctttccatccaacggaggcggcaacgacttaagtttgattggttattgacaaaatttgtattacctgcaacttagttccttctgtctgtacatgaaattgtcgtgaatttgtggtcgactttgctaaagttgttctcgtactgcttgat

SEQ ID NO: 203012 - DNA, 2588 bp, Zea Mays
cttccgaatcagcaatccgtgccacctgtttccgcattccgccattccgccttctgctgctggggttttagacaaaaatcactcgtcccatttctcgcgtccccaggccacggtcgcgagcaaggctaccccactgtctcgatccaccgatttccctccctcttctgtgcctccacggatcttctcgttgtggaagcggaggcggacgctggaggcgtctcggcgcgaggatttgcgagctgctgcggtggtgggaaatgaggatctgcgaatcgggagacggtgacgacgttgcgggcctggtgtttcagcaagagcagcaggaggaggtccaggcgagcggcgagctcgtacggcttaaggcgaagcacgcgctcgtcggcgccggcgcgagggtgctgttctacccgacgctgctctacaacgtcttgcgcaaccggttcgaggcggacttccggtggtgggatcgcgtcgaccagtttattttgctgggcgctgttcctttcccaagtgatgttccacggttgaagcagcttggagttcaaggggttgtaacgttgaatgaaccttatgaaactcttgtcccaacatctttataccaggctaatgagattgagcacctggtaattccaacaagagattacctctttgcaccttcattcgaggatatttctcaagccatagatttcatccatcgtaagttcttgccctttcttgtttatttttaagggaataagtacacgatagcaaattcacaccttttcctgaaacataaccccagcgctgatcagttttctattattttattttcgttgcatccgtggtaccttttgttatgtatttcccccaaagagcaaccgttgaattataggtaggagagtttattgtggttgactcaaaaacttagggaagcaaagcaggtagcagttaactcagaaaaggaaagctggttattattttgatcactggtcaactaatgtttatgttattaggtatgcatggccaattaaattttgatgtggtaggtatggttacaaagaagctgcagcactatcttttaatgcacagtccactcccaacctccggattaaggttctgttagatgtcgttgtatatgatgtcatgcatgacaactatgtcaaatcattgtagatatgctattgaaaaaaattgaaatgagcctagccattacacaatgtctgtcagtaattcaaacgaagtagaatcataacctatcaaagcacatctataatctaaaatctttgctttgtgtcaaacagcaatctatgacagggtggattcaggacttcagctgaatgcatagccacttttgccaaaaagttatgcatatataatatatattatgtagatgtattaaaaaaataaagatgacacaaaatgataggctattcaagtattcaacccaaaatcaattatacaattagtactgtgatttttaatcgaatatacattgccagaaactacgatttatgcaatcagcacaaaaaaaaccttttagcctttgaaattctgaatacacgctctcaaattggtagattcaacatatagctgcattttcagggaatgcatcacaaggcggtactacatatgttcattgtaaagctggaagaggacgaagcaccactattgtattgtgctacttgattaaatacaggaacatgacccctgaagcagctttggatcatgtacgatccattaggcctcgagtgcttttggcaccctcgcagtggcatgctgttaattcatttggagctctcaccggtggacaacttccagtacggagtacaaacctggcctgtttcctagaagccattgaagctggctgtacgaacacaacaggaaatgatgattaccacgtgatggagtttgactgcgaagatagtggcttaccactttatcaaattatgctacctaggccagccagccccactgggtctgggtgcaccgatgcagtcctcgtaacagaagcagatcttgagggctatgatacttatattggtaccaggaaagatgcggtgtcgttggaagtagccactcgcagtcccatcatgaggagattgtcctgcctctttggctccctcaaacttagtaacagcaactgtgagccagcttcaagccggttcactgaggttcgcgcctgctaggtaggtagtgtcttcctccagttttccatgctgcatcaagagtgtatctctagataggcaggcaatcatccaaaaaggatttgtagaagcctgtgttcatttcatggccatggggcagtgccatcgggaagaaagttgtgtgcatagccagaggggttgtttagttttcattagagtgtagagctgtgaacgcgtcgaatatccttgttttttcttgagagcatgtgattcattgcaatttgcatcattgtttacttgaaataaaataagttttctttccatccaacggaggcggcaacgacttaagtttgattggttattgacaaaatttgtattacctgcaacttagttccttctgtctgtacatgaaattgtcgtgaatttgtggtcgactttgctaaagttgttctcgtactgcttgat

SEQ ID NO: 203013 - DNA, 1241 bp, Zea Mays
tggccatcgatcatcagctagctagccagcagcaggtagtaccttggccaaacgacttagctatcaagctcgaccgaagctaagctaccaagctagtagccttcttggtcacgtaccggccgttgttgattgcagcggtcaagcacacacaagctaggcagctagctagctagagctagggtcgtcggatagatcgacatggccggcagggacagggagccgctggtggttggtagggtggtcggcgacgtgctggaccccttcgtccggaccaccaacctcagggtcagctacggggccaggaccgtgtccaacggctgcgagctcaagccgtccatggtggtgcaccagcccagggtcgaggtcgggggacctgacatgaggaccttctacaccctcgtgatggtggacccggatgctccgagcccaagcgacccgaaccttagggagtacctacactggctggtgacggatattccgggaactactggggcagcattttggcaagaggtgatctgctacgagagccctcggccgaccatggggatccaccgcttcgtgctggtgctgttccagcagctggggcggcagacggtgtacgccccgggctggcgccagaacttcaacaccagggacttcgccgagctctacaacctgggcccgcccgtcgccgccgtctacttcaactgccagcgtgaggccggctctgggggcaggaggatgtactcgtgatcggatgcatggttacataccatgcacactactcactccatcgtctccatacatgtagacggacgatggtgcatgcatcgatcgtcaactactcaacaattacgaactagaaatacacgcgtatatatacatatataaatatgcatatataccggtactgtacatgtcgccgtacacgcgcaggtggctgctgctagcttgctataccggccggtggtactgagcaggcagcatgcgctatatacttgcttggcgacgacgtgcagtgtgtgtatacaataatgagcggccggccggctagcagggcgacgagccgtggctttagcaatacgtatacatatgcatgctggttaattaaggcgctatctttgtgcgtacgtgcttggtgtaataatattacaagtcctcagtggagaatataataataaattaagagctatagcttttgtgtggacaaaccagcagggttgttggtatacatttcatgcatgattctctccataatatat

SEQ ID NO: 203014 - DNA, 1371 bp, Zea Mays
cgaagagaatccatcccaatagtctgcccggtccattctatcttcgtcgatatcgccgtctgcccgtctctactgggaagggaagggagcacctgcctgctcctgcgcggcggcggttgagcggcgtggaggaggcactacccgttcttctgggctgtcaggccttccgtaccgccgccgccgtcgccactcccactcccacagccgcgcacgcgcttctcctcctcctcctcactgcgctccaccaagagatccgccgcaaagacgtcaatggactcgtcttcagtcggtgaacccttctacgtcgtccgcaagggggacgtcatcggcatctacaaaaccctcagcgaatgccaagctcaagtcagcaattcggttcgcgacccttctgtcaccgtcttcaaaggctactcgctgcgtaaagacaccgaggaatacctcgccgcgcgcgggttaaggaacgctctctacgccattgatgcaacagatgcacgagatgaattgttcgacgatctagttccctgccctttccagcaacctgatggagctgcatcgtctactctgaaaagatcacaggagattgaaatcggaccatcaaagaagcatcccaaagttgatgagcaggtaccattacctgatagtcatctctcttgtattcttgaatttgatggtgcctctaaaggaaatccagggaaagccggtgctggagcaataataaggcagccaagaaagggttcaagtatattcgtgctcaaggcgactctaagcttgtttgtaaccaggtccaagatatctggcgtgttaagaatgataatatggctagcttctgcaagaaagtgaaggagctaaagggaacatttcatttatttcaaatcagacatgttttgagggaatataattcggctgctgatgctcaagctaactttgcagtagaacttcctgttggtgaagttcaagagcagtcgaacttcccatgctagcagttgtgttgtggtcaagtgtggtttgtgcatcgctaaggttctgggactgaagctatgtcacatttgttcagttctcattgacacaaaaggaagagacgaaacaacagttgtattggaagtggtagtgggtctgatatatctgcggagtattgaacagacagatgcaatattgagtagattcttaggaaatttaatcgtctcaaacttctagatagtgcgagttgatttgtccaggaccagtgtttgctgatatacgatgtttgtattcagaacagtattagtaccggaaactttaattgctcctttctctatgttggttacttggttaaggttgagtgttgcttttaataaattggtcaaaattttattatcacttaataagtataag

SEQ ID NO: 203015 - DNA, 1721 bp, Zea Mays
cgaagagaatccatcccaatagtctgcccggtccattctatcttcgtcgatatcgccgtctgcccgtctctactgggaagggaagggagcacctgcctgctcctgcgcggcggcggttgttactcttctttccactgtgggttgctgatttccagagcggcgtggaggaggcactacccgttcttctgggctgtcaggccttccgtaccgccgccgccgtcgccactcccactcccacagccgcgcacgcgcttctcctcctcctcctcactgcgctccaccaagagatccgccgcaaagacgtcaatggactcgtcttcagtcggtgaacccttctacgtcgtccgcaagggggacgtcatcggcatctacaaaaccctcagcgaatgccaagctcaagtcagcaattcggttcgcgacccttctgtcaccgtcttcaaaggctactcgctgcgtaaagacaccgaggaatacctcgccgcgcgcgggttaaggaacgctctctacgccattgatgcaacagatgcacgagatgaattgttcgacgatctagttccctgccctttccagcaacctgatggagctgcatcgtctactctgaaaagatcacaggagattgaaatcggaccatcaaagaagcatcccaaagttgatgagcaggtaccattacctgatagtcatctctcttgtattcttgaatttgatggtgcctctaaaggaaatccagggaaagccggtgctggagcaataataaggcaggtagatggttccgtggtatgtagccaactgattgctcaactacgtgagggtctgggcattgcaaccaacaatgctgctgaatatcgtgcattgatcctagggctaacatatgcagccaagaaagggttcaagtatattcgtgctcaaggcgactctaagcttgtttgtaaccaggtcagttgtgatagctttgttattttgtagcttatatgttctttgttgcactgtgaaatataaatagagatttagcactgtgcaattcaatctgactctttaaattccactaaggtataatacctcgaatgtgatttggccatacaattttcttcattcttgtatcacggaaggttgttgcttcattcaacatgccaaagtccaagatatctggcgtgttaagaatgataatatggctagcttctgcaagaaagtgaaggagctaaagggaacatttcatttatttcaaatcagacatgttttgagggaatataattcggctgctgatgctcaagctaactttgcagtagaacttcctgttggtgaagttcaagagcagtcgaacttcccatgctagcagttgtgttgtggtcaagtgtggtttgtgcatcgctaaggttctgggactgaagctatgtcacatttgttcagttctcattgacacaaaaggaagagacgaaacaacagttgtattggaagtggtagtgggtctgatatatctgcggagtattgaacagacagatgcaatattgagtagattcttaggaaatttaatcgtctcaaacttctagatagtgcgagttgatttgtccaggaccagtgtttgctgatatacgatgtttgtattcagaacagtattagtaccggaaactttaattgctcctttctctatgttggttacttggttaaggttgagtgttgcttttaataaattggtcaaaattttattatcacttaataagtataag

SEQ ID NO: 203016 - DNA, 1343 bp, Zea Mays
cgaagagaatccatcccaatagtctgcccggtccattctatcttcgtcgatatcgccgtctgcccgtctctactgggaagggaagggagcacctgcctgctcctgcgcggcggcggttgagcggcgtggaggaggcactacccgttcttctgggctgtcaggccttccgtaccgccgccgccgtcgccactcccactcccacagccgcgcacgcgcttctcctcctcctcctcactgcgctccaccaagagatccgccgcaaagacgtcaatggactcgtcttcagtcggtgaacccttctacgtcgtccgcaagggggacgtcatcggcatctacaaaaccctcagcgaatgccaagctcaagtcagcaattcggttcgcgacccttctgtcaccgtcttcaaaggctactcgctgcgtaaagacaccgaggaatacctcgccgcgcgcgggttaaggaacgctctctacgccattgatgcaacagatgcacgagatgaattgttcgacgatctagttccctgccctttccagcaacctgatggagctgcatcgtctactctgaaaagatcacaggagattgaaatcggaccatcaaagaagcatcccaaagttgatgagcaggaaatccagggaaagccggtgctggagcaataataaggcaggtagatggttccgtgggctaacatatgcagccaagaaagggttcaagtatattcgtgctcaaggcgactctaagcttgtttgtaaccaggtccaagatatctggcgtgttaagaatgataatatggctagcttctgcaagaaagtgaaggagctaaagggaacatttcatttatttcaaatcagacatgttttgagggaatataattcggctgctgatgctcaagctaactttgcagtagaacttcctgttggtgaagttcaagagcagtcgaacttcccatgctagcagttgtgttgtggtcaagtgtggtttgtgcatcgctaaggttctgggactgaagctatgtcacatttgttcagttctcattgacacaaaaggaagagacgaaacaacagttgtattggaagtggtagtgggtctgatatatctgcggagtattgaacagacagatgcaatattgagtagattcttaggaaatttaatcgtctcaaacttctagatagtgcgagttgatttgtccaggaccagtgtttgctgatatacgatgtttgtattcagaacagtattagtaccggaaactttaattgctcctttctctatgttggttacttggttaaggttgagtgttgcttttaataaattggtcaaaattttattatcacttaataagtataag

SEQ ID NO: 203017 - DNA, 1086 bp, Zea Mays
tgaggcggttgcgtggcttctgggccgtcttcttcgcgtcctgttcacgttgctgcgcctgagagcggcccacagctacaggaggtcggcgcggcgtacgctggaagacttcattcaggttggtgatattgttttgccacctccaccttgggctaaaggcagttgccagagaattcattaggaagcatcggcgggaagcactggaatcggattacgtatctgagaatctgcaccattggactgatcttatttttggatataagcagagaggaaagataatgagttcctgggaggcgaaagctagacagtttctgttagaggaggaaaaagaggatgatgaactcttcttagtaattgtccctgctgttctcttggccatgcaagaagagaaaaggtcagtccgtaccagaagtacgtcagcacatggaagcgcgaaaaagcggaagaaaaatcatgttgcaagtgttctggaagactatttggagcacaggaagaagcaaacggagaagactgtagaggcgttacttgagatgaagagtcgtgaagaggagtactctattgagaggtgtcttgacatagttgatgcattggaggagttgacggatgaggagaaggccgctgcagcagaggtgttcaagaatgaagtgaatcgggagatgtttgtgattgcgaagcaaaaaattccaaatgtggggttgatttggcttcggaggaagataagtaggattgcatctacctgagatggataaggtgcgactgatggagtgatggctcattgagttgcttgctgtgtgcgtgcgcatttgttttctatgcccgacgatgagtagcttgttgtggtgcctgatccaagagctcacaccagtttattcagttcagttcagagcttgcatgctccatataagcagaccgctgcatgctatgtgttgttaagcagactgctacattctatacggagtttgcatgctccatgtactgttgcatgccacttgttgctgatcgaaaattttagtttgcgaactacatgttgaggacagatattttgtaaactgctactagcactgatgcatgcttgcactgcagttt

SEQ ID NO: 203018 - DNA, 3288 bp, Zea Mays
ctgaaatgaaaatgaactatatatgttagtgtcaatacaatgtttacagctcccatttctgagtcgtaattcaacatgcaggagtagtgaaagatttgaaacttaccagtataccgacaatatgatcaattttgaccaagagactaccaacattgtggtattaataattgtcactatactagatatgaacaaatttacaacaataatatgcaatatccatacaccataacaaaagaatatgacaaaactaaattgctgcaaatatttccaacttctctgagaaactgatgaaactatttgatgccaagatgccaacttgccttcagatcataggaagggcttctacagttcagatcataggaatggcttctactgacattgccgagagctcagttgacacttgacacagtgcgtcgggtgtacataaagacagccaatgaccacatggtgaagccggagcaccaggacgaggcggtgattcgactgtggctgccgagcaaggtggtggtaatggacacttgaccacagccctttctcctccacgccggagcgagctgatcctcaagtcattgtgatctgtaagcgatggtgtatcgtagtcccgttggaggttccacctgttctgttctttcagtggtgctatatgtaagccaatcaagttatcattcatctatcaatataaaaaaaaggaggaaaaaccatgaggtgagaaggctaaatatataccactctcagtcacacacaaggaaagaaaggaggaaaactagctggtccacacactatatcccgatcatctaccatattaggcaactctgcatgccagaaatgcaggctcctccagtcctgagaccctctatttacaataggaatcaccggaagccttgtcggtttgacataatttggattgtccacgaaaatgcagctcccctgcctcatgcccatcaaatcgttaaacttgttagatcggtaggcagagagaggccagactgatgggaatggcagcgaaggagcactttgtgcttgttcatggtgaagggcatggagcctggtgctggttcaagctccgctggctccttgagggtgctggctaccatgttacatgcattgacctagccggaggcggcgtcgatcctactgaccccaacacaatccggtcgttccagcagtacgacaagccactcatagacctcatttcaaccttgccggagggggagaaggtacgtgtattcttccttttttgccaacacatttaatataagtggtaattaggtaatatgttggcataatctataatatcattactacgggttgcaatgtaaatgaccagaagccaaatgtttcatgccattttgaataaaaggtgtattagattgcacaaaagtaggtgcaacctattttaaataaatcttaaaacatgtgcttaagtctgctagatgtatctatcttcttgtatttccccattgtataattggtttactgtatattttccctcctgtaccggtgtatatatatatcggccttagtgtctcataatgaatgcaaatgctattcataacaaagtcatgatccttgacattttatctaggataacacctgaaaaataccttatacctgtgttctacaagaaaaagttggaaattatgtgaccccagcaaacgtacataaggaagtcaaggatctatttaagaataatgttgaaaattgatgaccatgcatgctaacccatttcagtcctattctaggtgattctaatcggacatggtgctggagggctgagtgtgattcatgcaatgcacgaatttgttgacagaatcagccaagcattttttgtggcagctacaatgctaccatttggatttcaagctgatgaagataagaaagatgtaatgttttgaagagtttgtttgtcctctttataaagcatagatctcctggcaaatgataaaaaaaatataagccatagactacacatcaaacaaacatatacatacagtgcaaacattaaggtttttattatagaaaaggaaatgtaataactcatatgagcatgggtccacctagttgcagtagctactaaaatgtgtttgatcaaaagtagggtaatacggtggataatgtcaactaggaacctagttacctaaaagactgactcactgttagcatagtcaaatgcatagtagacaagaaagagaaagttgacggaattttagaagaactctgaaacgactatatgaacttaccttaggtcgtggtgaattcactgcaactaatcttctgttacaatacaatgtatgattattacatacttcttatattaacatgtaacaggggttaccaactttgcctgagaacgagattgagttgacacttggtgcgggagcagatgatcctccaacaaccatttccttgaggccagaattccagcgtgatcgactatcacaacaaagccctgaagagctatcagtacagcaagcttcgaaggagatgatgaaagattgaaccgaatcaaacgaattttcataaagatgcagcgtgaccacatgctggatcctcaacagcaagattccatgatcaagaagtggccacccagcgaggttttggccatagatacagatcacagtcccttcttctctgcaccagaacagctgtttaatttaatagtcaaatctctatgatgcataaatgcagaaagctacagactggggttgcccggattcttgtaacactacccacaaacaataatcaccacaagatttacgacctcagatttgtcaaacatgcttctcagtgattcttcaagtcatatctgcaaatgtggtttaatgatgcaagactgcaagtaaaacatcgcttagcgcaaacacttaccttcagttttttgaacaattcactaaagtcagagccttataatttccattccaaaagttcttacatgtctggataaaaatatgtaaaatatagatgctactttggaagcacttttaactgcaccggtgatggataagaatatgtagttttggccactcgttgttaatctaactgatacgtttaaagagttattatttttctcttttgagtaattcaagagttcttgttttcatcaaatataaaggaagcaaacttctgacaccctaaaagttctcagataatgaacaatagaattttcacttcaaatagtttcataatatacaatcgcctcatgacgtgtaaaggatcatacaccgtttatacgtgacaaagaaattattacttcatttgtataaggatattgttggaatgcaattcggt

SEQ ID NO: 203019 - DNA, 2763 bp, Zea Mays
ctgaaatgaaaatgaactatatatgttagtgtcaatacaatgtttacagctcccatttctgagtcgtaattcaacatgcaggagtagtgaaagatttgaaacttaccagtataccgacaatatgatcaattttgaccaagagactaccaacattgtggtattaataattgtcactatactagatatgaacaaatttacaacaataatatgcaatatccatacaccataacaaaagaatatgacaaaactaaattgctgcaaatatttccaacttctctgagaaactgatgaaactatttgatgccaagatgccaacttgccttcagatcataggaagggcttctacagttcagatcataggaatggcttctactgacattgccgagagctcagttgacacttgacacagtgcgtcgggtgtacataaagacagccaatgaccacatggtgaagccggagcaccaggacgaggcggtgattcgactgtggctgccgagcaaggtggtggtaatggacacttgaccacagccctttctcctccacgccggagcgagctgatcctcaagtcattgtgatctgtaagcgatggtgtatcgtagtcccgttggaggttccacctgttctgttctttcagtggtgctatatgtaagccaatcaagttatcattcatctatcaatataaaaaaaaggaggaaaaaccatgaggtgagaaggctaaatatataccactctcagtcacacacaaggaaagaaaggaggaaaactagctggtccacacactatatcccgatcatctaccatattaggcaactctgcatgccagaaatgcaggctcctccagtcctgagaccctctatttacaataggaatcaccggaagccttgtcggtttgacataatttggattgtccacgaaaatgcagctcccctgcctcatgcccatcaaatcgttaaacttgttagatcggtaggcagagagaggccagactgatgggaatggcagcgaaggagcactttgtgcttgttcatggtgaagggcatggagcctggtgctggttcaagctccgctggctccttgagggtgctggctaccatgttacatgcattgacctagccggaggcggcgtcgatcctactgaccccaacacaatccggtcgttccagcagtacgacaagccactcatagacctcatttcaaccttgccggagggggagaaggtgattctaatcggacatggtgctggagggctgagtgtgattcatgcaatgcacgaatttgttgacagaatcagccaagcattttttgtggcagctacaatgctaccatttggatttcaagctgatgaagataagaaagatgtaatgttttgaagagtttgtttgtcctctttataaagcatagatctcctggcaaatgataaaaaaaatataagccatagactacacatcaaacaaacatatacatacagtgcaaacattaaggtttttattatagaaaaggaaatgtaataactcatatgagcatgggtccacctagttgcagtagctactaaaatgtgtttgatcaaaagtagggtaatacggtggataatgtcaactaggaacctagttacctaaaagactgactcactgttagcatagtcaaatgcatagtagacaagaaagagaaagttgacggaattttagaagaactctgaaacgactatatgaacttaccttaggtcgtggtgaattcactgcaactaatcttctgttacaatacaatgtatgattattacatacttcttatattaacatgtaacaggggttaccaactttgcctgagaacgagattgagttgacacttggtgcgggagcagatgatcctccaacaaccatttccttgaggccagaattccagcgtgatcgactatcacaacaaagccctgaagagctatcagtacagcaagcttcgaaggagatgatgaaagattgaaccgaatcaaacgaattttcataaagatgcagcgtgaccacatgctggatcctcaacagcaagattccatgatcaagaagtggccacccagcgaggttttggccatagatacagatcacagtcccttcttctctgcaccagaacagctgtttaatttaatagtcaaatctctatgatgcataaatgcagaaagctacagactggggttgcccggattcttgtaacactacccacaaacaataatcaccacaagatttacgacctcagatttgtcaaacatgcttctcagtgattcttcaagtcatatctgcaaatgtggtttaatgatgcaagactgcaagtaaaacatcgcttagcgcaaacacttaccttcagttttttgaacaattcactaaagtcagagccttataatttccattccaaaagttcttacatgtctggataaaaatatgtaaaatatagatgctactttggaagcacttttaactgcaccggtgatggataagaatatgtagttttggccactcgttgttaatctaactgatacgtttaaagagttattatttttctcttttgagtaattcaagagttcttgttttcatcaaatataaaggaagcaaacttctgacaccctaaaagttctcagataatgaacaatagaattttcacttcaaatagtttcataatatacaatcgcctcatgacgtgtaaaggatcatacaccgtttatacgtgacaaagaaattattacttcatttgtataaggatattgttggaatgcaattcggt

SEQ ID NO: 203020 - DNA, 2843 bp, Zea Mays
ctgaaatgaaaatgaactatatatgttagtgtcaatacaatgtttacagctcccatttctgagtcgtaattcaacatgcaggagtagtgaaagatttgaaacttaccagtataccgacaatatgatcaattttgaccaagagactaccaacattgtggtattaataattgtcactatactagatatgaacaaatttacaacaataatatgcaatatccatacaccataacaaaagaatatgacaaaactaaattgctgcaaatatttccaacttctctgagaaactgatgaaactatttgatgccaagatgccaacttgccttcagatcataggaagggcttctacagttcagatcataggaatggcttctactgacattgccgagagctcagttgacacttgacacagtgcgtcgggtgtacataaagacagccaatgaccacatggtgaagccggagcaccaggacgaggcggtgattcgactgtggctgccgagcaaggtggtggtaatggacacttgaccacagccctttctcctccacgccggagcgagctgatcctcaagtcattgtgatctgtaagcgatggtgtatcgtagtcccgttggaggttccacctgttctgttctttcagtggtgctatatgtaagccaatcaagttatcattcatctatcaatataaaaaaaaggaggaaaaaccatgaggtgagaaggctaaatatataccactctcagtcacacacaaggaaagaaaggaggaaaactagctggtccacacactatatcccgatcatctaccatattaggcaactctgcatgccagaaatgcaggctcctccagtcctgagaccctctatttacaataggaatcaccggaagccttgtcggtttgacataatttggattgtccacgaaaatgcagctcccctgcctcatgcccatcaaatcgttaaacttgttagatcggtaggcagagagaggccagactgatgggaatggcagcgaaggagcactttgtgcttgttcatggtgaagggcatggagcctggtgctggttcaagctccgctggctccttgagggtgctggctaccatgttacatgcattgacctagccggaggcggcgtcgatcctactgaccccaacacaatccggtcgttccagcagtacgacaagccactcatagacctcatttcaaccttgccggagggggagaaggtacgtgtattcttccttttttgccaacacatttaatataagtggtaattaggtaatatgttggcataatctataatatcattactacgggttgcaatgtaaatgaccagaagccaaatgtttcatgccattttgaataaaaggtgtattagattgcacaaaagtaggtgcaacctattttaaataaatcttaaaacatgtgcttaagtctgctagatgtatctatcttcttgtatttccccattgtataattggtttactgtatattttccctcctgtaccggtgtatatatatatcggccttagtgtctcataatgaatgcaaatgctattcataacaaagtcatgatccttgacattttatctaggataacacctgaaaaataccttatacctgtgttctacaagaaaaagttggaaattatgtgaccccagcaaacgtacataaggaagtcaaggatctatttaagaataatgttgaaaattgatgaccatgcatgctaacccatttcagtcctattctaggtgattctaatcggacatggtgctggagggctgagtgtgattcatgcaatgcacgaatttgttgacagaatcagccaagcattttttgtggcagctacaatgctaccatttggatttcaagctgatgaagataagaaagatgggttaccaactttgcctgagaacgagattgagttgacacttggtgcgggagcagatgatcctccaacaaccatttccttgaggccagaattccagcgtgatcgactatcacaacaaagccctgaagagctatcagtacagcaagcttcgaaggagatgatgaaagattgaaccgaatcaaacgaattttcataaagatgcagcgtgaccacatgctggatcctcaacagcaagattccatgatcaagaagtggccacccagcgaggttttggccatagatacagatcacagtcccttcttctctgcaccagaacagctgtttaatttaatagtcaaatctctatgatgcataaatgcagaaagctacagactggggttgcccggattcttgtaacactacccacaaacaataatcaccacaagatttacgacctcagatttgtcaaacatgcttctcagtgattcttcaagtcatatctgcaaatgtggtttaatgatgcaagactgcaagtaaaacatcgcttagcgcaaacacttaccttcagttttttgaacaattcactaaagtcagagccttataatttccattccaaaagttcttacatgtctggataaaaatatgtaaaatatagatgctactttggaagcacttttaactgcaccggtgatggataagaatatgtagttttggccactcgttgttaatctaactgatacgtttaaagagttattatttttctcttttgagtaattcaagagttcttgttttcatcaaatataaaggaagcaaacttctgacaccctaaaagttctcagataatgaacaatagaattttcacttcaaatagtttcataatatacaatcgcctcatgacgtgtaaaggatcatacaccgtttatacgtgacaaagaaattattacttcatttgtataaggatattgttggaatgcaattcggt

SEQ ID NO: 203021 - DNA, 484 bp, Zea Mays
attggacacccatcttcttcgtgtggagtgtgcggagagccgcgccgtgtgtgtgcgtccatttgtgtatccacggaccgcagaagaacctcaaaagctcttcacttttcccctccactccacagcgcaggcgaggcaggcacacgcaagctgccgcatttcttgcagttgcacctcgcaaacagatggggagggcgccgtgctgcgggaaggtggggttgaagaaggggaggtggaccagggaggaggacgagatcctggcgaggtacatcgaggagcacggggaaggctcatggagatcactgcccaagaatgctgggttgctgcggtgcgggaagagctgcaggctgcggtggatcaactacctgagggcgggtctcaagagggggaacatcacggaggaggaggaggacgtgatcgtcaagcttcacgccacgcttggcaacagcgcggcgatcaacccatgaagcaaacctcgcatgca

SEQ ID NO: 203022 - DNA, 433 bp, Zea Mays
cggagagccgcgccgtgtgtgtgcgtccatttgtgtatccacggaccgcagaagaacctcaaaagctcttcacttttcccctccactccacagcgcaggcgaggcaggcacacgcaagctgccgcatttcttgcagttgcacctcgcaaacagatggggagggcgccgtgctgcgggaaggtggggttgaagaaggggaggtggaccagggaggaggacgagatcctggcgaggtacatcgaggagcacggggaaggctcatggagatcactgcccaagaatgctgggttgctgcggtgcgggaagagctgcaggctgcggtggatcaactacctgagggcgggtctcaagagggggaacatcacggaggaggaggaggacgtgatcgtcaagcttcacgccacgcttggcaacagccattgattgctcacgc

SEQ ID NO: 203023 - DNA, 1454 bp, Zea Mays
cccgccgaccggacccaccccacacagtccacacccagacccatggaatcgacgtgggagtggaacagccagacgtgccctcgcctggcggcgccaccgctccgagcgacgccgcgcgtgccgctcctccgctgcgtcctcctcgttgcctcctgcatcccccccgccatgccgccggtcgccgacgagggcgagtgggcggcggtggagcgccggggcccgcacctttgggcgtcggggcggcccttcgtcgtccacggcttcaacacctactggctcatgtacttcgcggccgaccccgcaacgcgcgccgccgtcaccgccgccctcgcggacgccgcccactcggggctcaacgtgtgccgcacctgggccttcaacgacggggggcaccgcgcgctgcagctcaagcccttctcctacgacgaggaggtcttccaggcattagatttcgtgatcagcgaggcaagaaaccataagatgagactgatactgtcactgtgtaataactgggaagattacggaggtaaggcacagtatgtaaggtggggaaaggaggctggcctggatcttacttccgatgacgacgctttcttctctcacgccacaatcaagagctactataaagcttttgttaaggctgttttgacaagaaaaaacacaatcacaaatgtcgcctacatggatgaccctacgattcttgcctgggagctgattaatgagccacactgccattccgatccatcaggcgacacattgcaggcatggatagaagagatggcgtcttatgtgaaggatatagaccctgtgcaccttttagagatcggtgttgaagggttttatggtccgtcgactccagaacttctgcacgtgaacccagatgcttattctggaactattgggacagattttatcaggaaccatcatgcactgggaattgatttggcttctgttcatatttattctgacaattggttgactcactctgaagaggtcagtcacctccattttgtgaaaacctggatgcaacagcatattgatgatgcagccaacttgcttgggatgccaattctgatcggggagtttggggtatcgcttaaggatggaaagtttggccataagtttcgtgaagctttcatggatacagtctacaacatttttttgcgctcttggaagactggggtgattggaggaggctgccttgtttggcagcttttccctgaaagcgctgagcacatggatgatggttatgcagttatttttgcaaaatcaccagaaaccacattaaaattacttgcagatcactcgagaagtctggaatcttgacaatctgttgcctccctaattacacaagtatatgacagaatccatgctataagggtttgcaaaccaaaaacatgtctcagaaagttcagtttgtaaattgcaagagaagaagggactgtgatctgtat

SEQ ID NO: 203024 - DNA, 1777 bp, Zea Mays
cagtttagtatcgaatagagacatttctccgctgtttgtatccccccgacgagttcggttcggaagcgtggggtcgtccaactggcggttcatggcgcgggaccatgggccggcgtggagcacgacgcaggcgccgccggggccgctgcagttccggctggtggtgacaggttgctatgacggcaagtgggtgtgggcggagttggaggtgctgccgcgccggtgggaggccggccgcgtctacgacgccggggtgcaggtctccgacgtctcgcgggaagggtgctacctctgcgacacgcacaagtggcagtgacgcgcgcacgagctggattgtacagttttttgttttggtcgggaatgggacgaaagatatgaaatgatgatgagcggagccggagagccgaatcaaatctattaatcggtggcgctggaagggtgctgccgtcgattcctctaccggtggcactggaacacaagtaaccggcagttgccgaccattaccaagatctctaaagggcttagattaattagataatccagcataagcacaaaacgttaatctcaaatctattagcagatataatattgtttgtgtgacattgtactgttttgtttcttaaacaaacgtcattctacaaattttgcatctgtccctgtagggcgcccgtaagggcgccgcctgttctagtatgactaatggtcgatcccgtagtaaaaagctgtctccaatcccaggctacctgaacctacgaagagccgactcaaccgctagtacagtccacacatgacacaacgacaccaactgtcctcaatccagcagccctcgagtctcgtccccgcacatcagcagagagacgccactaccaccaccgcaagcgacgacggggagatgtttctgcgacggatcctgaccggcggaggtggcctggcggcgctgagggcggcgcgcgccgtgaaggagacgacggggatcgtcggccttgaggtggcgcccaacgcgcgggaggttctcatcgggctctacacgcgtacgctcaaggagatcgaggccgtccccaaagacgagggctaccgcaaggccgttgagtccttcaccaatcaccgcctccagatctgccaggaggaggacgactggaagcgcatcgaggaccgaatcggatgcgggcaagtcgaggagctcatcgaggaggccgaggacgagctcaagctcatcgccaaaatgattgttcgttttaatgtgattctttgtttgaatgaatggcagaatgggatccgtggggtgtccctgatgactacgaatgtgaggtgattgaagacgacaccccaattcctaagcatgttcctcagcaccggcccgttgctcttcctgaggagttcttcaagacactagatgccgtcaaatcagatcccgccctccaaggcgatgctcctcctcaagtgaaggcgtaaagatgagtcttcccggttatgtcttatgtcatttcacactttgctgcgctgggtagggactagtttcttgtgccatttgccagcaatgtgcttgttccgagcagaataaatttctggcgagtaccatcgaagagtgactttgaacgaagtgattcgacacagtaaatttgttgttgtccatgaatacttgctctgaacatcgcttgccgatgaaatattgaatgctaggtagagttcattgcctggtgctgccggcaccggagacgcaacggccatgggagccgtggctagcgtaacctggctcgccataaaatatcgttatgct

SEQ ID NO: 203025 - DNA, 937 bp, Zea Mays
cttcaatcaagctctgagcgtctcctctcttgcccgctgtccacttccctctcatcctctcgacctcgcttcctccctcccaccgtgccctgccttttcctcacgacctcgccgctgattgcggtcccccatggaaccgtgaaggcggccgagcacgcggccgagatggaggcgacggtggtcgtcgcggctgccgtggaggccgaggaggaggaggctgctgctgctgcggcttcgacgccgcagcggtctgggaggaaacggccccgcgcgattgggagtgggcggtaccgctcggtgtccaggcaggcagtcggccagggacggatggacggagacgacggatggaagccgcagccactagccagccacaccgcagaccgcgcacgcaagagaaagaagcggtgtttgcatggactgggattgccgacttgactgcggattgacggggacaggtgggagccagaaccgcccgaggaccctcttctcctcggccaagagacccacaccgcaactggaaccctcttctcctcatccgacgacagtggtggccactgctccggccaggcatagcataggcagcctggttacacaaaccaaaaaagaatggtagtgtgaagtggaatcaaaatgggaactgggtgcagactgcctcaaaggatcagattattaagatccatgaaagagcagcaatccttctgaggggacgtcgctggttagatagttattacagtatcaagatttttatatgttcctttacatattttaaggttcacaaattgatactggttttatatgtagcagttcattgttcactgtaaccatacatgtaaaccataagcaaatgtgatgtaggagattgttatataaagagacttttgcagccactttgatgttttgttttatgcttctttttgtgaaaaattattatggtgct

SEQ ID NO: 203026 - DNA, 1362 bp, Zea Mays
cttcaatcaagctctgagcgtctcctctcttgcccgctgtccacttccctctcatcctctcgacctcgcttcctccctcccaccgtgccctgccttttcctcacgacctcgccgctgattgcggtcccccatggaaccgtcgtcctctcaatccgtccgccgctccatcgtcttcctgtatttgtgctgctgatatgtgtaacttgtgtttctccaggtgaaggcggccgagcacgcggccgagatggaggcgacggtggtcgtcgcggctgccgtggaggccgaggaggaggaggctgctgctgctgcggcttcgacgccgcagcggtctgggaggaaacggccccgcgcgattgggagtgggcggtaccgctcggtgtccaggtgtttctcccaatctcccctgctttcctcatcctgctgccgcttttgcttttaatcgctgtgacagcatagcacccgcctcgtctcgctgccggctgccgctggtgatcctgctccctgtggcattggccctagccagcaggcaggcagtcggccagggacggatggacggagacgacggatggaagccgcagccactagccagccacaccgcagaccgcgcacgcaagagaaagaagcggtgtttgcatggactgggattgccgacttgactgcggattgacggggacaggtgggagccagaaccgcccgaggaccctcttctcctcggccaagagacccacaccgcaactggaaccctcttctcctcatccgacgacagtggtggccactgctccggccaggcatagcataggcagcctggttacacaaaccaaaaaagaatggtagtgtgaagtggaatcaaaatgggaactgggtgcagactgcctcaaaggatcagattattaaggtccgtggcttgtgctttttatttttctatcttcttcaaagaattttcggattacagtgtgcactctataaccagaattctatactatctatggagatggcctaatccatcctataaccaggatcgataagtttgttttttgatgccagtaaattattgattttggtccatttgctaattcattttgcaactgtatgacattagatccatgaaagagcagcaatccttctgaggggacgtcgctggttagatagttattacagtatcaagatttttatatgttcctttacatattttaaggttcacaaattgatactggttttatatgtagcagttcattgttcactgtaaccatacatgtaaaccataagcaaatgtgatgtaggagattgttatataaagagacttttgcagccactttgatgttttgttttatgcttctttttgtgaaaaattattatggtgct

SEQ ID NO: 203027 - DNA, 913 bp, Zea Mays
tcttgcccgctgtccacttccctctcatcctctcgacctcgcttcctccctcccaccgtgccctgccttttcctcacgacctcgccgctgattgcggtcccccatggaaccgtgaaggcggccgagcacgcggccgagatggaggcgacggtggtcgtcgcggctgccgtggaggccgaggaggaggaggctgctgctgctgcggcttcgacgccgcagcggtctgggaggaaacggccccgcgcgattgggagtgggcggtaccgctcggtgtccagcaggcaggcagtcggccagggacggatggacggagacgacggatggaagccgcagccactagccagccacaccgcagaccgcgcacgcaagagaaagaagcggtgtttgcatggactgggattgccgacttgactgcggattgacggggacaggtgggagccagaaccgcccgaggaccctcttctcctcggccaagagacccacaccgcaactggaaccctcttctcctcatccgacgacagtggtggccactgctccggccaggcatagcataggcagcctggttacacaaaccaaaaaagaatggtagtgtgaagtggaatcaaaatgggaactgggtgcagactgcctcaaaggatcagattattaagatccatgaaagagcagcaatccttctgaggggacgtcgctggttagatagttattacagtatcaagatttttatatgttcctttacatattttaaggttcacaaattgatactggttttatatgtagcagttcattgttcactgtaaccatacatgtaaaccataagcaaatgtgatgtaggagattgttatataaagagacttttgcagccactttgatgttttgttttatgcttctttttgtgaaaaattattatggtgct

SEQ ID NO: 203028 - DNA, 1877 bp, Zea Mays
caaagtcgcaacgcgccccacgaggccacgacgcacgagcgcgcgctccgggcgttcgggaactcgaacgcgccggtgggagaggagaaccgcaccgcggcgcagacatgggcgagtactgcccctccccgcagggggactccgcgctggcggcgccgcccttgacgctcccctcctcgtccccagcgacggcggttaggccaagctacgggagctgcgaccgcagctacgtgaagcaggtcttcgacaacctccacggcagcatctccgtagacccgttggccctgcaatttgttgatacagaggagtttcagaggttgcgggatttgaaacagcttggtcttacatacctcgtctatcctggagcggttcacacacgctttgaacactcattaggtgtctattcgttggctggaaaggcaataaataatcttaaaacatatcagggagtagagcttggaattgatcctgtcgacatgcagactgtaaaacttgcaggtctcttgcatgatattggacatggacccttcagtcatttgtttgagcatgagtttcttcctcgagttgatcctggctcatcctggtcccatgaaaagatgtcagtgctccttttggacagtattgttgacaaacatgcaatagatattgaaaatgattacctcaaaatggtcaaggacatgataactgccagctctgatcctgccagcacaacaagtgcaaaggagaaacattttctttatgacattgtcgctaatggtcgcaatggtatagatgttgacaagtttgactacattggccgtgactgcagagcatgtggtcttggatgtaattttcagtattggaggttgatggaaggcatgcgagtgatgggtgatgaaatttgctaccctgccaaagattacttgagcatccataaattgttttcaacacgtgctgatctgcaccgaacagtctacacccatgccaaagtgaaggctgttgaactcatgctcgtggatgcccttgttgaggctaatgattacttggggatatcattgcatgcacatgatccagaagatttttggaagttggatgacacaatcattaaaacaattgagactgctcctaacaatgaactgaagaaagcaaaagaaatcattcaacgtattcgccgaagagaactctacaagttttgcaaccagtattctgttccaaaggacaagctggagcatttcaaaaatattactgcacaggacatagtttgttcacagaaatcttctgaggtgctgctgaaggaagaggatgttgcagtatgcaatgttaagatagatcttactcgtggaaaatataaccccctcgaaaggattttggttgcgatgagaagttcccgatcatagatgatagagtcagccacttgctacctgcgtacaatgaggatagaattgtgagggtctatgccaagaaccctgagttggttgatgtggtgtcagaagccttcgagaatctccaaatgagaatgtatggtgagaagactcaagtgcacgagacgcccaagaaaaagaagattaggtccaactagccggttgtatgttgtcaaatcagtctttaaatagcaatacaattacgtcacatgaaaatagcttgacaaacaagaagctgtatagataaagcatcccagaataaacaggttttagatggtagtctccactggtaaggtatagatatttagtgtacatctgaagtacaaacaacactgcatgaagtataaaaactcacgttgacgtacgtggtgcgatgttgcatgtgcgtatagattggatagtttgccaaatacattttttatggcgaggctggacttttaaacacttaatacacatgtatcgcctttttaagcgatc

SEQ ID NO: 203029 - DNA, 2724 bp, Zea Mays
cagcgaggagagcgagcgcaccaacgggatctgagcatctgaccagccgcttgctagggtttcgtcccccctctccctcggccagcaccacctcgcatccctagctctagccttgctcgccccgggatcctgtagcggccatggcggcggaagcgccaccgtcggcttcggcgtcttcttcctcggccccgcggccgcctgccgcggcggcctctgcctccggcggcggggcggccgggtccgcggagtcgtacatcgggagcctcattagcctgacttcgaagagcgagatcagtgcggtcctttgggaccgaaggtcggaagaaagatggaatgcagattcctgctagcgacaaagtatacgagtatatcctctttcggggaactgatatcaaggatttgcaagttaagtcatcaccaccgccgccgccacctcaagcagcttccctgcacaatgaccctgccataatccagtcacattattctcaaccagcatcaacatcgtcaaatttgccttccgctgggggtgcagttttaccagacctcagctcccaggcagttcaatatgggcttcagaggccaacttttcagagtaaccttcctctataccaaccagggaatgctccacggggctcttcagcggcacctccagcaggaaatgctccgtggggctcttcagcagaacctccagcaggaacgacactttcggttccctcaatgtactggcatggatactatgcgccttcaagtgggctgccacctcatttgcagcaacctctgctgcttcagccaacaccaggattgtcagttccccagaatcttcaatatccaggactaaatccttctttgccatctgggatgcaaaagctgtcagaactccaaccttcattgatgccacctattaatagtcaaggttcttcaggtatcctgcctactacaacagctcctgcttctgctaccttattagctccagaaagctcaaagcctcaggtgccaaacatgggatctttgtttactcctgcaacatctcttggtgcaacttttccttatccaagccagccaacaccggtggctgaaactagtgcaacagtgtcacagaacataacttcatttagtagcaacaaggctactgctcttccaggctcaacactgtcataccaaactgcatctcagtctgtttcttcgactattgccccatctagctcagcacaagtggagatggctgtgcctttgttggcatcatcaggtcaactattgcagaacacatcatccatgctttcatcatcacactcgatgcaggcaccattacaggtagctagcaaagaagtcaagccggttgagccaaaggctaaggttgcagaaccattactgcctgaccctttgctaccagacccaccatcacagtctctgcctgaaaataaggagcctatattgccattgcccaaacagacacctcagaagtacaatggatctggtttgcacaaccatcacaactttaggggccgtggaaggggtagagggagtgcgttttcacagtcagtaacaacattcactgaagaatttgatttcacggccatgaatgagaagtttaacaaagatgaagtctggggtcatcttggaaagaaatcgcagtcaagggacaaggatggtgaggtgggagatgatgtgtttgatgaagacctggaggttgaggaaactgataacccagagctatctgttaagcctgtttatgtcaaggatgatttttttgattccctctctagtggaacatttggacgtggaggaccaaatggaaggggtagaccttctgaacggcgcagagtagatacagagacttttggcgaatttccacggcacaggcaaccctaccgtggtggcgcccgaggttaccgtggcggtggacgttcccgaggttcatattatggtggcagaggctatggaaacacagggaccggaggctatggaaacacagggacaggtggccctggaaattcttattctcaccggggctatgggagagattgattatagcagaaatgtgcaggcaaccatacttgtgggtgttgtagtcttttaccacatgtatgatgtatcccttactactggtgcagcggtgagaagtcgttttcccactgagccgagccaaaggtttaatgggctctaaattttacactataagatttaaggattggattaggatcggactctatttctattcatttttaactaaaatttatttagggccctaccattctgtgaagaatcatttggatcctaatcaattaccacccctaggttttagattcaacgcagcaaaagaatgtagatgtaagacttaccttgttattcccttggagagtgcactcgtgggagtcgccagcactaggtctgcgagtctgtccattatgcatcccttaatattcaacaaataaatggagcttaccagcatgtcacttgggtgtgccttgtccagacaaggcgtgtagcgtttggtcattgacgtggtacacccgtgttctgtaggagagttaccagtagatgagcggatgatgctggataggtataagcttgtggcccttgatgtgtataccttacgcttgggatttagttgtataggccgatctcgatgcaggcatgcaacgcctggcctagctcagtaactttttcctttaacaaagttctgccatgttgtcttttgtattggtgatagtgtaacttaaaaat

SEQ ID NO: 203030 - DNA, 1506 bp, Zea Mays
taaaaatgcctcaagctgcggccacccgccgggaccagcctcgccgccgcgcgccaaaaccctaacccctcccggcgtccgcccctgccgcgtgacggccccagagatggggcgagacaagagccgtcgtctatacggcagccgccacttccggcagcggctggtgctggcgacgctcacctctaccgctgtcaccatcgaggacatccgctctggggacgcttcgccggggctccgcccttacgaggtctccctcctccgcctcctcgacaagatctcagaccatcacaccattgacctcaacgagacaggaacgaagctgaggtaccggccgggggtgattatagggggaaagggccttgagcacgactgcggggtgcaccggggtattggatactttcttgagccactcatactgcttggtctattttcgagggcccctatatcgattcggcttaaagcactttggtgttcctctggatggtttcgatctaaatattgacagccgtggatctcctcctcttggtggtggtgaggtgtttctccgggttcgcaatataaatagcacattgacggcagcaaattgggtagatgaaggtatggtgaagaggataaggggtgtttcgttctccactagagtatctccacagttggaaaaccgcatcatttatgctgcacgtggaatcttcaatcgtttcattcctgatgttcatatacacacggatcatagatctggttctgctggtcaccaggctatggtgtatcgttagttgctgagaccactacgggatgcctgctctctgtagatgtcactgtgagttatcctagtgttgatgaaataaatgaagaatctgagaagcctgagctgacttctccggaggatcttggtgttcaagctgcatcaatgctactagaagaggtggctcaaggaggtgttgttgattctacacatcagggcctcctatttattctgtgtgctttatgcccaccggatgtatcaaaggttcgtgtgggacagttgactccatatggtatagagacacttcgaaacatcagagattttcttgacgtcaagttcatcatcaagcctgatcccaattcaaacaccgttactttaaaatgtgttggcgcgggagtgaagaatcttgctcggaagatttcataagcaacatgaccattaatctgatgaaggatccatgccacatcaagagactactatgagaccctatttgtaactgcaaacaacagtgtaggagtttcccttagctgttactgctgaaattctattcgaggtccatgatgtcttagacatcaccgatgtacatcagtattagaatggattgttctgatcatgatgccctgtattgtcgacacatttttgcatcacattgcttcactccaactatgccatgacatgctgatacatagaaatgaagaaaaggtgacaaacgtccagactaaatgtttgttttaccatgtgcattttgtttgatcaaattgtcctgt

SEQ ID NO: 203031 - DNA, 1881 bp, Zea Mays
aaaaatgcctcaagctgcggccacccgccgggaccagcctcgccgccgcgcgccaaaaccctaacccctcccggcgtccgcccctgccgcgtgacggccccagagatggggcgagacaagagccgtcgtctatacggcagccgccacttccggcagcggctggtgctggcgacgctcacctctaccgctgtcaccatcgaggacatccgctctggggacgcttcgccggggctccgcccttacgaggtctccctcctccgcctcctcgacaagatctcagaccatcacaccattgacctcaacgagacaggaacgaagctgaggtaccggccgggggtgattatagggggaaagggccttgagcacgactgcggggtgcaccggggtattggatactttcttgagccactcatactgcttggtctattttcgagggcccctatatcgattcggcttaaagcactttggtgttcctctggatggtttcgatctaaatattgacagccgtggatctcctcctcttggtggtggtgaggtgtttctccgggttcgcaatataaatagcacattgacggcagcaaattgggtagatgaaggtatggtgaagaggataaggggtgtttcgttctccactagagtatctccacagttggaaaaccgcatcatttatgctgcacgtggaatcttcaatcgtttcattcctgatgttcatatacacacggatcatagatctggttctgctggtgggaggtcaccaggctatggtgtatcgttagttgctgagaccactacgggatgcctgctctctgtagatgtcactgtgagttatcctagtgttgatgaaataaatgaagaatctgagaagcctgagctgacttctccggaggatcttggtgttcaagctgcatcaatgctactagaagaggtggctcaaggaggtgttgttgattctacacatcaggtctgggcttttatgcaagcattctatgtatttctgaattttgcctggtgttaagctcgatgatagctgtatatattgttatgggctcagtgaagcttagacaggagtacaggacagtgaagcattttgttcttttggactgtttgtgtctactacagacaagctgcaagttctacatggcatgtggataactagatatgatttttttcaacgatctactttctcttaaaaaatgttgtcctctcttggactgacagtgctgtacatttatgtttgcccatcttaaattgcttgttgtctatcctgatgatattccatgcataagttacagatgcttttgtttagtgattttatcttaaatgcttgcagggcctcctatttattctgtgtgctttatgcccaccggatgtatcaaaggttcgtgtgggacagttgactccatatggtatagagacacttcgaaacatcagagattttcttgacgtcaagttcatcatcaagcctgatcccaattcaaacaccgttactttaaaatgtgttggcgcgggagtgaagaatcttgctcggaagatttcataagcaacatgaccattaatctgatgaaggatccatgccacatcaagagactactatgagaccctatttgtaactgcaaacaacagtgtaggagtttcccttagctgttactgctgaaattctattcgaggtccatgatgtcttagacatcaccgatgtacatcagtattagaatggattgttctgatcatgatgccctgtattgtcgacacatttttgcatcacattgcttcactccaactatgccatgacatgctgatacatagaaatgaagaaaaggtgacaaacgtccagactaaatgtttgttttaccatgtgcattttgtttgatcaaattgtcctgt

SEQ ID NO: 203032 - DNA, 1108 bp, Zea Mays
ttttgatttgcttgtgcaaagatctctgaatcaggttctaactaacaaagcagttgaaaagaatgaagggaagccattgcctctaattcagaaagcttttattggtctgactgctggagcaattggtgcttgttttggtagtcctgctgatctggcactcattagaatgcaagccgactcgaccctgccagctgcacaacgacgcaactataagaatgctttccatgcactctaccgtatcagtgctgatgagggagtccttgcgctttggaagggtgcaggtccaactgtggtgagagctatggcactcaatatgggtatgcttgcttcctatgaccagagtgtcgagctatttagggacaaatttggcgcaggagaaatttctactgttgttggagccagcgctgtttctggattcttcgcctcagcatgcagtttgccctttgactatgtgaagacacagattcagaagatgcaacctgatgctaatggcaagtacccatacacagggtctttggactgtgctgtgaagaccttcaagagcggtggcccattcaagttctacactggtttcccggtgtactgcgtcaggattgcaccccatgtcatgatgacctggatattcttgaatcagatccagaagtttgagaagaagatcggcatataggattcccatcggacggatacagggttgaccgttctatgctattactgctggactctgtaataacattccagctgctttcgcaccatggtagttggttttggtagagacaagtctgttacaatttttttaccttagctttccaattattgtgtcgcaataatcgaattaattgttgctgggggattttttttggggggtgggtgggtggacatgcatttgttggctgggatgtagccatgaggagagggggatactacctagttatgccattgaatggaattggaccatattttatacagatttttaccttcagttcttttgaacttattgcatttgggacattgattttttttgtaatggaaacgatgggaattgatcaactgtgagattatgttctcggcctgctcgagattgtacctgataaggtaacggtgtgacaac

SEQ ID NO: 203033 - DNA, 1610 bp, Zea Mays
ctcggtccgtcgctccgacactccccttcggcatctcctctcctttcagttctttctcgccactccgtttgcccgttcacgctcccctctccctctcccacctcctattcttcgtcttcgtggagactactgagatggccgtcgacaagcaggcggacgccaaggagagggagaagatcgacgccgttcgcaagctgctgcgcaagcaggcgccgctctccataaagcaggcgcagtactgcgacgacgcgtgcgtggagcggttcctgcggtggcgcggggagagcgtcaagaaggcggcgaagcacctgaggaccgtcctgtcatggagggagaccgtcggagctgaccacatcatggccgacgagttctccgccgagctcgccgacggcgtggcgttcgtctccggccacgacgacgacggccgcccggtgtttcgaatcaagcaggaataccccaagttccgctcgccgaaatcgttcgtgcgcctgctggtgttgacactggaggtggccgtggcgtgcatgtcccggtccgtggaccagctcgtcctcctcttcgatgcaagctttttccgatcggcgtcggctttcctcaacctgctcatgggcacgctcaagatcgtcgccgactactaccccggccgcctccaccgcgccttcgtcatcgacgcgccctccctcttctccgtcctctggaagggagtgaggccgttcgtggagctggcgccggcgacggcggtggtgtgctccctggacttcgaggactcactggaggacgcctccttcacggcgtacccgcggaccgcgtccctgcggttcgagccgccgccggcggcggtcacggggaaggccggcgtggggtcagcctcgtcgcggttctccgtcacccccaccgacaaccccgtcaagccgtggtacctctgcaccatccccgcctcggtgggctcccgctccgtggtacccacctccagcagcagcccgtcgctggtcggcgcgtccccgctctccgcgcgctccttctccttcgcctcgcccgccgcgctgcgctcgacgccgttcccgcgcggcgggggcgcccccccgacgccttcctccgccgtcacgggccacaagatcccgccgccgccgcagttcccgcggacgccgcggccgtcgttcctgcagtcgccgtcgacgctgttcgcgttccggaaggacgggcagcagaccagccgcgtggagcgcgagcgcgggtccttcctcccgtacctccgcttctaccgccgcccctacgacgagatttcctaccgcgccatgatgcgcccgccgctcggcggcctgatacccatcgtcgagaagttcaagcacaagccggtgcagcagacgctgcgtcgacacgctgggctccaccagcatcagcagcagcagcaccaccattaccaacagcagcagaggatctgagtctcgtctctcagtcggtactgcatggcgacccgagaattttctccatacagcataaaggcgatgctatattatgctaagttaatcttttgccaagtatgatattcttaaaggcatgtataataacatcccaaaaaaatgtgagtaaaatggactcctttctgcacc

SEQ ID NO: 203034 - DNA, 392 bp, Zea Mays
ctgctagggttaatccactggctctcctatatagaagcgcggcgagagctcgcaccgccgccgccgccgctgtcgcatcacaggcctctcttccggtttccccccaaacccgtccgagaggcagtcatcccgccgcgatgagggccaagtggaagaagaagcggatgaggcggcttaagaggaagcgccgaaagatgaggcagaggtccaagtaggcagattcatggagtgtccccgcctggagtctctctgcgttcggttgttgtttactgagtaattttagtttttttactaagacagtctgttatggatcagaaattccttgcgtttgtccgtggtctagatattgcatcaagtgttctgcactttattctttagttgttaaaaaaaaa

SEQ ID NO: 203035 - DNA, 601 bp, Zea Mays
acacacacctgtagagtctagactagtcctcttccacttcctccttccagtaggttccaccccaattccctcaagggatcgagatgaacaactccacctcgccggcggtggactggggtgacgactccgcgggggagatggactctgaggacgcagcgccttcctcctccatgggcatcagcatcgccattggcagcatgatggaggtcgacgccgacgaccgccaacccagtccgcctcccgacgccgacttcttcaacgccttccccgacgacttcgacgaccaagacctcgactgattgccgccgccgcttctttgctcgcccggaccccttccgccagttgggagtcgtatacgaacctacctacttccaaggaagcaccagtcatccatcaccttgtacatgtttttatgttgcagcactagtggtgtttaattgtcagctgcgatcataatgttcttgttggttggattcgtgcgcagttgagcagtgctggtgttgtaatgtgatggtcgcgactgcgttgttcgcatttgtgatggttttgcttttcattggtgaatggtgaatggtgaagacaaagctgaatctactaatta

SEQ ID NO: 203036 - DNA, 1866 bp, Zea Mays
tggtggccagaagctgccagaagctaaaacaaacaggccctatatatgagtcatcgcagtagttaacaattacacctagacctagtactgatttttgtccgtccgggttgctttccggctaacgtgtgtagtgtagcacaacccatcggtcgctgtctgctttctgaagaacgttcattccggttgacgccgctacgctgccgtgtcttctttccttcccttataccctgccgcacacaccttttccgtttgcagtggtgcaggtcttttcggtcctcaggcttcatccctgtgcaagtgcagggataattgcttctgatctcccgaggctgcataacctgattcagaggcagagcaagggggcgtgagggagatgagggagatcatcagcatccatatcgggcaggcaggcatccaggtagggaattcttgctgggagctctactgcctcgagcacggtatccagcctgacggcctcatgcccagtgacacctctgtcgggatcgcgagggatgcgttcaacacgttcttcagtgaaacgggcgcagggaagcacgttccaagggccctgtttgtcgacttggagcccactgtgattgacgaggtgaagactggggcttaccgccagcttttccatcctgagcagctcatctcacacaaggaagatgcagcgaacaacttcgcccgtggacattacacagttggaagagaagtaatagatctttgccttgatcggatacgaaaattggcagacaactgcactggtcttcaaggttttctggttttcaatgctgttggtggtggaacaggctccggcctgggttcgctacttttagaacgtctatcagtagattatggtaggaagtcaaagctcggtttcaccatctatccttccccacagatctcgactgctgtggtcgagccttataacagcgtgctctccacacattccttgattgaacacacagatgttgttgtgcttcttgacaatgaagctatctatgacatatgcaagaggtccctcgacattgagcgtccaacatacaccaatctgaacaggcttatatcacaagttatatcatctctgactacctctctgaggtttgaaggagctattaatgttgacataactgagttccagaccaaccttgtgccttatccccgcatacactttatgctctcttcgtatgctccaattatctcagtggaaaaggcctaccatgaacaacactctgttcctgagatcacaaattctgtgtttgagccatcaagtgtgatggcaaaatgtgatcccaggcatggaaagtacatggcatgctgtttgatgtaccgtggcgacgttgttccaaaagatgtgaatgctgctgtccattcaatcaagaccaagagagcagtgcagtttgttgattggtgccctactggtttcaagtgtgggataaactaccaaccaccaactgtagtccctggaggggacctggccaagggatggaagaaggggagttctcagaggcaagggaggatcttgcagcactggagaaggattatgaggaagtcggagctgaagttgaagatgaggacgaggaagctgagtattgagtcatcgatctggatgcatggttattttcctttggtgtcagtcaaccaggcgtgcttgagttgcatggttgtacctcccatttattccatgtttgctattgcattacacctgttcatggttggcatagtagaagtgtgaagattggttgaactggtatgatggtttcagatcaaataaattatgttttcaaaatgtcatatgaaaaatttattagtagattagtcacaaaaaacatacttcaatatggttatactatattcacaacaaat

SEQ ID NO: 203037 - DNA, 1914 bp, Zea Mays
tggtggccagaagctgccagaagctaaaacaaacaggccctatatatgagtcatcgcagtagttaacaattacacctagacctagtactgatttttgtccgtccgggttgctttccggctaacgtgtgtagtgtagcacaacccatcggtcgctgtctgctttctgaagaacgttcattccggttgacgccgctacgctgccgtgtcttctttccttcccttataccctgccgcacacaccttttccgtttgcagtggtgcaggtcttttcggtcctcaggcttcatccctgtgcaagtgcagggataattgcttctgatctcccgaggctgcataacctgattcagaggcagagcaagggggcgtgagggagatgagggagatcatcagcatccatatcgggcaggcaggcatccaggtagggaattcttgctgggagctctactgcctcgagcacggtatccagcctgacggcctcatgcccagtgacacctctgtcgggatcgcgagggatgcgttcaacacgttcttcagtgaaacgggcgcagggaagcacgttccaagggccctgtttgtcgacttggagcccactgtgattgacgaggtgaagactggggcttaccgccagcttttccatcctgagcagctcatctcacacaaggaagatgcagcgaacaacttcgcccgtggacattacacagttggaagagaagtaatagatctttgccttgatcggatacgaaaattggcagacaactgcactggtcttcaaggttttctggttttcaatgctgttggtggtggaacaggctccggcctgggttcgctacttttagaacgtctatcagtagattatggtaggaagtcaaagctcggtttcaccatctatccttccccacagatctcgactgctgtggtcgagccttataacagcgtgctctccacacattccttgattgaacacacagatgttgttgtgcttcttgacaatgaagctatctatgacatatgcaagaggtccctcgacattgagcgtccaacatacaccaatctgaacaggcttatatcacaagttatatcatctctgactacctctctgaggtttgaaggagctattaatgttgacataactgagttccagaccaaccttgtgccttatccccgcatacactttatgctctcttcgtatgctccaattatctcagtggaaaaggcctaccatgaacaacactctgttcctgagatcacaaattctgtgtttgagccatcaagtgtgatggcaaaatgtgatcccaggcatggaaagtacatggcatgctgtttgatgtaccgtggcgacgttgttccaaaagatgtgaatgctgctgtccattcaatcaagaccaagagagcagtgcagtttgttgattggtgccctactggtttcaagtgtgggataaactaccaaccaccaactgtagtccctggaggggacctggccaaggtgcaacgagcagtctgcatgatcagcaacaacacagccgtggctgagggatggaagaaggggagttctcagaggcaagggaggatcttgcagcactggagaaggattatgaggaagtcggagctgaagttgaagatgaggacgaggaagctgagtattgagtcatcgatctggatgcatggttattttcctttggtgtcagtcaaccaggcgtgcttgagttgcatggttgtacctcccatttattccatgtttgctattgcattacacctgttcatggttggcatagtagaagtgtgaagattggttgaactggtatgatggtttcagatcaaataaattatgttttcaaaatgtcatatgaaaaatttattagtagattagtcacaaaaaacatacttcaatatggttatactatattcacaacaaat

SEQ ID NO: 203038 - DNA, 2306 bp, Zea Mays
cacaacccatcggtcgctgtctgctttctgaagaacgttcattccggttgacgccgctacgctgccgtgtcttctttccttcccttataccctgccgcacacaccttttccgtttgcagtggtgcaggtcttttcggtcctcaggcttcatccctgtgcaagtgcagggataattgcttctgatctcccgaggctgcataacctgattcagaggcagagcaagggggcgtgagggagatgagggagatcatcagcatccatatcgggcaggcaggcatccaggtagggaattcttgctgggagctctactgcctcgagcacggtatccagcctgacggcctcatgcccagtgacacctctgtcgggatcgcgagggatgcgttcaacacgttcttcagtgaaacgggcgcagggaagcacgttccaagggccctgtttgtcgacttggagcccactgtgattgacgaggtgaagactggggcttaccgccagcttttccatcctgagcagctcatctcacacaaggaagatgcagcgaacaacttcgcccgtggacattacacaggtgtgacatgttcccctcaccctgagctatttcccggagaacaaaaaatgtttttgcaattttaaatgcaatattggttcaagtacaaaaactattggggtttggaagccctaccttgaatttcggtgcattgccaaaatgcgtaaagaccaaatttgtgttcttgaacagtactagcaagtggtagccagaactagtccacaacaatttggatattatgaaggggctgggtcaggatcttataatttacatattcaaccatcctatgccatgattattatagtatttttcatgacttcatatcatacaagcaacctcactttccttacctggggcaattgttttaaaaacattacaatgctttggaactgttctctgctctttattaatacctatcctgtttggaaactgagtaatgtcagaagttctacaacatgttttttctgctgcagttggaagagaagtaatagatctttgccttgatcggatacgaaaattggcagacaactgcactggtcttcaaggttttctggttttcaatgctgttggtggtggaacaggctccggcctgggttcgctacttttagaacgtctatcagtagattatggtaggaagtcaaagctcggtttcaccatctatccttccccacagatctcgactgctgtggtcgagccttataacagcgtgctctccacacattccttgattgaacacacagatgttgttgtgcttcttgacaatgaagctatctatgacatatgcaagaggtccctcgacattgagcgtccaacatacaccaatctgaacaggcttatatcacaagttatatcatctctgactacctctctgaggtttgaaggagctattaatgttgacataactgagttccagaccaaccttgtgccttatccccgcatacactttatgctctcttcgtatgctccaattatctcagtggaaaaggcctaccatgaacaacactctgttcctgagatcacaaattctgtgtttgagccatcaagtgtgatggcaaaatgtgatcccaggcatggaaagtacatggcatgctgtttgatgtaccgtggcgacgttgttccaaaagatgtgaatgctgctgtccattcaatcaagaccaagagagcagtgcagtttgttgattggtgccctactggtttcaagtgtgggataaactaccaaccaccaactgtagtccctggaggggacctggccaaggtgcaacgagcagtctgcatgatcagcaacaacacagccgtggctgaggtcttctctcgtattgaccgcaagtttgatctcatgtatgccaaacgtgcattcgttcattggtatgtcggtgaagggatggaagaaggggagttctcagaggcaagggaggatcttgcagcactggagaaggattatgaggaagtcggagctgaagttgaagatgaggacgaggaagctgagtattgagtcatcgatctggatgcatggttattttcctttggtgtcagtcaaccaggcgtgcttgagttgcatggttgtacctcccatttattccatgtttgctattgcattacacctgttcatggttggcatagtagaagtgtgaagattggttgaactggtatgatggtttcagatcaaataaattatgttttcaaaatgtcatatgaaaaatttattagtagattagtcacaaaaaacatacttcaatatggttatactatattcacaacaaat

SEQ ID NO: 203039 - DNA, 3912 bp, Zea Mays
ccagctcccacattcccaatcccaccgcctcgtcagcagcgcgtacgaagaaccccacgacccacgttcttttcttcctcttttcgctgccatttcctcccccaccacaccagggcccaggccaccgccgccttcatcccctatccgcgtaccgccccccgggcgatcgatcgaacgcggctagcctcgccgccgacccgtcgaggcagccatggcggagatcgccgaacgggccgtcgcgggcgaggtgccggaggagccgcggccgccgcacggggaggaggacgacgaaggggaggaggagggggacgtgtgccggatctgccgtaaccatggcgacgaggatcacccactgcggtacccgtgcgcctgcagcggcagcatcaagttcgtgcaccaggactgcctcctccagtggctcgaccatagcaactcgcgccagtgcgaggtctgtaaacatgcattctccttctcacccgtgtacgctgataatgctccgacaagacttcctttccaggaactgatggttggtgttggaatgaaagcatgccatgtgtttcagttcatccttcggcttgcctttgttctctcagtttggctcatgattatcccattcataacctattggatatggcggttaacatttgtgagaagtctcagtgaagctcaaaggctgttcctcagtcacatcagcgctcagttgatccttagtgattgccttcatgggttccttctctcagctatcattgtccttatatttcttggagccacctcattacgagactacataaggcatttgcgtgaacttggtggacacgatgctgagagggatgatggtgggcgtgaaaggcatggtgctcgggctgttaggaggctagctggtcctaataatagggttcctgcagatggaaatgttgatgaattagcagaagcccaaggaatcggtgctggtgaacttctgaggagaaatgctgaaaatgttgctgctcgattagaacgacttgaggctcaggttgagcagatgcttgatggtctagatgatgcagatggtgcagaggacgttccttttgatgaacttgttggttttggccagcaatgctatattcctcattgttgtgatctttgttccattctcattgggaaggattatcctgtactatctatcctggtttttctcttcggcttctactcctatgctggcaaaagtgatgcccttcacagaaacagctatttctatagctaatgatacattaaagagcgcacttaatgttgtgaagaatttttcttctgacagtaataatgaaggtgttatcgggcatgtgattgaggttgttactcaatccttgaagataaatgccactggacttagtgtaattcaaggcactgggaagaacagtctgatgaaaggaacaacaattgcctcatcttatctttcagatctgacaactcttgctgttggatacatgttcatcttctgtcttgtgtttttgtatattggatcactggctttacttcgatatgccaggggagaacgttttaccattggaagactctacggtatagctactatattagaggccatcccttctctatgcagacagttctttgctggaatgaagcaccttatgactatggtcaaagttgcattccttctggtcattgagcttggtgtatttcctcttatgtgtggttggtggcttgatgtttgcactctaaagatgctgggcacaacaattgcgcagagagttgaattctttacaatgtcacccttggcgagctcatctatccattggctagttggtattgtgtatatgcttcaaataagcatatttgtgagccttcttcgaggggtgctgcgcaatggagttctttattttctgcgggaccctgctgatccaaattacaatccatttagggatttgattgatgaccctgtgcataaacatgcccgacgagttcttttgtcagttgcagtgtatggaagtttgattgtgatgttagtcttcttacctgtaaaagtggccatgagagtagctccttcaatgtttcctctggacataaccatatttgacccattcactgagattccagttgatgttcttctgttccaaatatgcatcccattcgctattgaacatttcaagcctcgtgcaaccattaaagctcttttacatcattggttttctgtggttggttggggccttggcttaaccgatttcttactgccaaaatctgaagaaaacggtgggcaggaaaatttgaatgcaagggcagaaagaagagacagaggacatggtgggagggaaatggtcgccccacaggttgaacaactcatgatacaacatgttgccgcagaagataatggcaggggggattcaaatgaagccaatgatgtaactgaggactctgatgtagatgaccagggagactctgagtatggctttgtgcttcggatcgtgctcttgcttgtactggcatggatgacattactaatattcaatgctggaatgatagtttttcctatctcacttggccgtctggtttttgaggctgttccccgcctgccaatcacacatggcatcaagtgcaatgatctgttctcctttagcattgggtgctatattctctggagtgtggcagctgggaccagatatgcgattgattacatcacatcacgacagctggggtttttggtacaacagatctgcaagtggtgctcaattgttttgaagagctctgttctcttgtcgatatggatctttgttattcctgtgctgattggactcctttttgagctgctggtcatcgtacccatgagggtgcctattgatgagagccctgtcttcctattgtatcaggattgggctctggggttaatattcttgaaaatatggactagactggttatgttggatcagatggcacctttggttgatgaaagctggaggtcaaagtttgagagagttagagacgatggcttctcccgtttaaagggtctgtgggtcctccatgaaattataatgccgatcgtgaccaagctccttactgctctctgtgtcccatacgtccttgcaaggggcatcttcccgttgctgggttacccactcatcgtgaactcagcggtgtaccggtttgcctggcttggaagcctgatcttcagcgccctcttcttttggggcaagagatttcatgtctggttcaccaacctccacaactctatcagggatgaccgctatctgattgggcggaggctgcacaactttggcgaggactcacactcacctgagcggagtgaatctggagcaagtatagggtcagatgatcaggacagagatattgtactgcgagatcaggaagaggaagtggggttgaggatgaggcgcaataatatgcatgcaaaccaacaacctaggtttgctttataagtaggaagtagttttggacaaagagctcataaccatggtataagcttcggtctgcaggttctgcttgtgctttgtaatgggcgttgtagagtgagtttatgtgttagtgataggaaatagtctaaggactgttctacgataaagcctggagaaagctgaagtggctggtgattacaaaactggtggcaactcccattcctgtggtagtcctggctaactgtaaatatcgtttgacagagcattaccatgccaactcaatctgttgtgatcctcttgtaatgactagtgagttaaggtgaactgttgggtagatacgagatactagattattatcgcgttcactcttttttttttgggtcccatctttgtttttttagaaactgcaattgcattctgtttatatcatggagcatctagcggcttgaaatgaacaagaacaagatgcatgggcagtgggcagtattggttgtgggtaactgaaagcagg

SEQ ID NO: 203040 - DNA, 3740 bp, Zea Mays
gtcagcagcgcgtacgaagaaccccacgacccacgttcttttcttcctcttttcgctgccatttcctcccccaccacaccagggcccaggccaccgccgccttcatcccctatccgcgtaccgccccccgggcgatcgatcgaacgcggctagcctcgccgccgacccgtcgaggcagccatggcggagatcgccgaacgggccgtcgcgggcgaggtgccggaggagccgcggccgccgcacggggaggaggacgacgaaggggaggaggagggggacgtgtgccggatctgccgtaaccatggcgacgaggatcacccactgcggtacccgtgcgcctgcagcggcagcatcaagttcgtgcaccaggactgcctcctccagtggctcgaccatagcaactcgcgccagtgcgaggtctgtaaacatgcattctccttctcacccgtgtacgctgataatgctccgacaagacttcctttccaggaactgatggttggtgttggaatgaaagcatgccatgtgtttcagttcatccttcggcttgcctttgttctctcagtttggctcatgattatcccattcataacctattggatatggcggttaacatttgtgagaagtctcagtgaagctcaaaggctgttcctcagtcacatcagcgctcagttgatccttagtgattgccttcatgggttccttctctcagctatcattgtccttatatttcttggagccacctcattacgagactacataaggcatttgcgtgaacttggtggacacgatgctgagagggatgatggtgggcgtgaaaggcatggtgctcgggctgttaggaggctagctggtcctaataatagggttcctgcagatggaaatgttgatgaattagcagaagcccaaggaatcggtgctggtgaacttctgaggagaaatgctgaaaatgttgctgctcgattagaacgacttgaggctcaggttgagcagatgcttgatggtctagatgatgcagatggtgcagaggacgttccttttgatgaacttgttggtatgcaaggccctgtcttccacttggttgagaacgcaataacagttttggccagcaatgctatattcctcattgttgtgatctttgttccattctcattgggaaggattatcctgtactatctatcctggtttttctcttcggcttctactcctatgctggcaaaagtgatgcccttcacagaaacagctatttctatagctaatgatacattaaagagcgcacttaatgttgtgaagaatttttcttctgacagtaataatgaaggtgttatcgggcatgtgattgaggttgttactcaatccttgaagataaatgccactggacttagtgtaattcaaggcactgggaagaacagtctgatgaaaggaacaacaattgcctcatcttatctttcagatctgacaactcttgctgttggatacatgttcatcttctgtcttgtgtttttgtatattggatcactggctttacttcgatatgccaggggagaacgttttaccattggaagactctacgagagttgaattctttacaatgtcacccttggcgagctcatctatccattggctagttggtattgtgtatatgcttcaaataagcatatttgtgagccttcttcgaggggtgctgcgcaatggagttctttattttctgcgggaccctgctgatccaaattacaatccatttagggatttgattgatgaccctgtgcataaacatgcccgacgagttcttttgtcagttgcagtgtatggaagtttgattgtgatgttagtcttcttacctgtaaaagtggccatgagagtagctccttcaatgtttcctctggacataaccatatttgacccattcactgagattccagttgatgttcttctgttccaaatatgcatcccattcgctattgaacatttcaagcctcgtgcaaccattaaagctcttttacatcattggttttctgtggttggttggggccttggcttaaccgatttcttactgccaaaatctgaagaaaacggtgggcaggaaaatttgaatgcaagggcagaaagaagagacagaggacatggtgggagggaaatggtcgccccacaggttgaacaactcatgatacaacatgttgccgcagaagataatggcaggggggattcaaatgaagccaatgatgtaactgaggactctgatgtagatgaccagggagactctgagtatggctttgtgcttcggatcgtgctcttgcttgtactggcatggatgacattactaatattcaatgctggaatgatagtttttcctatctcacttggccgtctggtttttgaggctgttccccgcctgccaatcacacatggcatcaagtgcaatgatctgttctcctttagcattgggtgctatattctctggagtgtggcagctgggaccagatatgcgattgattacatcacatcacgacagctggggtttttggtacaacagatctgcaagtggtgctcaattgttttgaagagctctgttctcttgtcgatatggatctttgttattcctgtgctgattggactcctttttgagctgctggtcatcgtacccatgagggtgcctattgatgagagccctgtcttcctattgtatcaggattgggctctggggttaatattcttgaaaatatggactagactggttatgttggatcagatggcacctttggttgatgaaagctggaggtcaaagtttgagagagttagagacgatggcttctcccgtttaaagggtctgtgggtcctccatgaaattataatgccgatcgtgaccaagctccttactgctctctgtgtcccatacgtccttgcaaggggcatcttcccgttgctgggttacccactcatcgtgaactcagcggtgtaccggtttgcctggcttggaagcctgatcttcagcgccctcttcttttggggcaagagatttcatgtctggttcaccaacctccacaactctatcagggatgaccgctatctgattgggcggaggctgcacaactttggcgaggactcacactcacctgagcggagtgaatctggagcaagtatagggtcagatgatcaggacagagatattgtactgcgagatcaggaagaggaagtggggttgaggatgaggcgcaataatatgcatgcaaaccaacaacctaggtttgctttataagtaggaagtagttttggacaaagagctcataaccatggtataagcttcggtctgcaggttctgcttgtgctttgtaatgggcgttgtagagtgagtttatgtgttagtgataggaaatagtctaaggactgttctacgataaagcctggagaaagctgaagtggctggtgattacaaaactggtggcaactcccattcctgtggtagtcctggctaactgtaaatatcgtttgacagagcattaccatgccaactcaatctgttgtgatcctcttgtaatgactagtgagttaaggtgaactgttgggtagatacgagatactagattattatcgcgttcactcttttttttttgggtcccatctttgtttttttagaaactgcaattgcattctgtttatatcatggagcatctagcggcttgaaatgaacaagaacaagatgcatgggcagtgggcagtattggttgtgggtaactgaaagcagg

SEQ ID NO: 203041 - DNA, 3779 bp, Zea Mays
ccctatccgcgtaccgccccccgggcgatcgatcgaacgcggctagcctcgccgccgacccgtcgaggcagccatggcggagatcgccgaacgggccgtcgcgggcgaggtgccggaggagccgcggccgccgcacggggaggaggacgacgaaggggaggaggagggggacgtgtgccggatctgccgtaaccatggcgacgaggatcacccactgcggtacccgtgcgcctgcagcggcagcatcaagttcgtgcaccaggactgcctcctccagtggctcgaccatagcaactcgcgccagtgcgagtgcaggtctgtaaacatgcattctccttctcacccgtgtacgctgataatgctccgacaagacttcctttccaggaactgatggttggtgttggaatgaaagcatgccatgtgtttcagttcatccttcggcttgcctttgttctctcagtttggctcatgattatcccattcataacctattggatatggcggttaacatttgtgagaagtctcagtgaagctcaaaggctgttcctcagtcacatcagcgctcagttgatccttagtgattgccttcatgggttccttctctcagctatcattgtccttatatttcttggagccacctcattacgagactacataaggcatttgcgtgaacttggtggacacgatgctgagagggatgatggtgggcgtgaaaggcatggtgctcgggctgttaggaggctagctggtcctaataatagggttcctgcagatggaaatgttgatgaattagcagaagcccaaggaatcggtgctggtgaacttctgaggagaaatgctgaaaatgttgctgctcgattagaacgacttgaggctcaggttgagcagatgcttgatggtctagatgatgcagatggtgcagaggacgttccttttgatgaacttgttggttttggccagcaatgctatattcctcattgttgtgatctttgttccattctcattgggaaggattatcctgtactatctatcctggtttttctcttcggcttctactcctatgctggcaaaagtgatgcccttcacagaaacagctatttctatagctaatgatacattaaagagcgcacttaatgttgtgaagaatttttcttctgacagtaataatgaaggtgttatcgggcatgtgattgaggttgttactcaatccttgaagataaatgccactggacttagtgtaattcaaggcactgggaagaacagtctgatgaaaggaacaacaattgcctcatcttatctttcagatctgacaactcttgctgttggatacatgttcatcttctgtcttgtgtttttgtatattggatcactggctttacttcgatatgccaggggagaacgttttaccattggaagactctacggtatagctactatattagaggccatcccttctctatgcagacagttctttgctggaatgaagcaccttatgactatggtcaaagttgcattccttctggtcattgagcttggtgtatttcctcttatgtgtggttggtggcttgatgtttgcactctaaagatgctgggcacaacaattgcgcagagagttgaattctttacaatgtcacccttggcgagctcatctatccattggctagttggtattgtgtatatgcttcaaataagcatatttgtgagccttcttcgaggggtgctgcgcaatggagttctttattttctgcgggaccctgctgatccaaattacaatccatttagggatttgattgatgaccctgtgcataaacatgcccgacgagttcttttgtcagttgcagtgtatggaagtttgattgtgatgttagtcttcttacctgtaaaagtggccatgagagtagctccttcaatgtttcctctggacataaccatatttgacccattcactgagattccagttgatgttcttctgttccaaatatgcatcccattcgctattgaacatttcaagcctcgtgcaaccattaaagctcttttacatcattggttttctgtggttggttggggccttggcttaaccgatttcttactgccaaaatctgaagaaaacggtgggcaggaaaatttgaatgcaagggcagaaagaagagacagaggacatggtgggagggaaatggtcgccccacaggttgaacaactcatgatacaacatgttgccgcagaagataatggcaggggggattcaaatgaagccaatgatgtaactgaggactctgatgtagatgaccagggagactctgagtatggctttgtgcttcggatcgtgctcttgcttgtactggcatggatgacattactaatattcaatgctggaatgatagtttttcctatctcacttggccgtctggtttttgaggctgttccccgcctgccaatcacacatggcatcaagtgcaatgatctgttctcctttagcattgggtgctatattctctggagtgtggcagctgggaccagatatgcgattgattacatcacatcacgacagctggggtttttggtacaacagatctgcaagtggtgctcaattgttttgaagagctctgttctcttgtcgatatggatctttgttattcctgtgctgattggactcctttttgagctgctggtcatcgtacccatgagggtgcctattgatgagagccctgtcttcctattgtatcaggattgggctctggggttaatattcttgaaaatatggactagactggttatgttggatcagatggcacctttggttgatgaaagctggaggtcaaagtttgagagagttagagacgatggcttctcccgtttaaagggtctgtgggtcctccatgaaattataatgccgatcgtgaccaagctccttactgctctctgtgtcccatacgtccttgcaaggggcatcttcccgttgctgggttacccactcatcgtgaactcagcggtgtaccggtttgcctggcttggaagcctgatcttcagcgccctcttcttttggggcaagagatttcatgtctggttcaccaacctccacaactctatcagggatgaccgctatctgattgggcggaggctgcacaactttggcgaggactcacactcacctgagcggagtgaatctggagcaagtatagggtcagatgatcaggacagagatattgtactgcgagatcaggaagaggaagtggggttgaggatgaggcgcaataatatgcatgcaaaccaacaacctaggtttgctttataagtaggaagtagttttggacaaagagctcataaccatggtataagcttcggtctgcaggttctgcttgtgctttgtaatgggcgttgtagagtgagtttatgtgttagtgataggaaatagtctaaggactgttctacgataaagcctggagaaagctgaagtggctggtgattacaaaactggtggcaactcccattcctgtggtagtcctggctaactgtaaatatcgtttgacagagcattaccatgccaactcaatctgttgtgatcctcttgtaatgactagtgagttaaggtgaactgttgggtagatacgagatactagattattatcgcgttcactcttttttttttgggtcccatctttgtttttttagaaactgcaattgcattctgtttatatcatggagcatctagcggcttgaaatgaacaagaacaagatgcatgggcagtgggcagtattggttgtgggtaactgaaagcagg

SEQ ID NO: 203042 - DNA, 4141 bp, Zea Mays
aagaaatagtaaatccaggacaaacatttaggaaaaatataatatatgctaaggaaaacaaaagaaaaacccccgacaacgtcgcaaattccagcgctgtttcgagcccttccccgcgccgccttcctctgtcgtctccccgaccctgcattctcctctctgggaagattcaaatcccccacgggccacggcccacgccacgccatctctacccagccacggcgagcgccaccggccccgccgcgccgcaagaactctaccgtaacgtaaccgagaaaccccgccgccggcgcgatggactggtactccgacgactcggaccccgacatcgacgaggacctgcgggaggacctcgacgcgctgcgccgctcctgcatcctctccggggccgacccggacgctgccgtagcgcaggtctcctccggcctcgcgggcccctccaccccagccctcgccgcggcgccgggggcggcggccgaccatcatcatcatgcctcctcttcggacgacgaggaggacgaggacctcgccctcgtccgcagcatacgcgccaacctccaccacctccataatagtaaggcctcgaccgtcctcccggacgccgcccccgcgccccgggacgacgacgacccgtcctcgcgcccgatctgcacgtggccgccgtccgacactgacgaggaagaggatgacctcgagacgctccgcgccatccagcgccgcttctcgcattaccagtcaagtacctccactgcatcgccaaagaccatgaaacctgaggcgtcacagggagtccacagtgacctttttgccgacaggtctggtgatgattttgctgtgcagaagcaaaatgcaattgttcctcatggagatgggtttccaaaggctgcgctattgttagtggatgctctcaagaagaacagagcataccagaagttcattagaagaaaaatggtaaacattgaagcgaaaattgaagaaaacaaagatctcagggatcgtgtaaaatgtcttttgggctatcagttaagctgccgaaaatcagtcagcagatctttaggacagaaggaggatcctcgtgtcaggttgatttcccccctgaaatcaactcagccgtgtacaaagaacaaatacaggaagattcctgcactatttctcggcccagctgagaacccacatgtttcaaagtatgaaatggcgctgaagcaatttccaatgtcatttaagaagcaaccatggtcagatgcggagaaagataaacttgccagaggaataaagcagcaataccaagaaacattgattttggattcgctgaataatggaagtgctgatggtgacttcagtgcacttgatatggcatatgcactgacaaatggtgctggtaattttgaggtgactccggaaaatcttagatcggttctaccattaataaactgggataagatttctgccatgtaccttcctggtcgatctggtgctgaatgtgaatcgaggtggctaaactgtgatgatccattgattaaccatgaagcctggactgcagacgaggaaacaagacttctactaattattcaagaaaagggaatgtgcaactggattgacattgcagtcacattgggtacttaccggactcctttccaatgtcttgttcgttatcaacgaagtttgaatccccacatactgaacaaggcctggacaaaggaggaagaccttcaactccaagcagctgttgagacctttggtcagaaatggcaacttgtatcggctagtctggatggtcgcactggcactcagtgctctaataggtggagaaaaaccttgcaccctgaaaagaccagtgtgggaagatggcttctggatgaggacaaacgcctcatggtcactgttaaactaattggacctggcaggtggagtttgattgctccgtttattcctggccgaacacaaacacaaatctttgagaggtggtgcaatattcttgatccagatctatatcttgatgactggcggcctgacgaagattccacattattggctgcagtatctgagtttgggccttgctggtcgaagatttctaaaacgataattcctggacgtaatgatagtatgtgctatagacgatggagaaaactttgtaaacatgaagtccagaaagctagagaagccagacaattgaagaaagctatttttcagaacaattttgttgatagagaaaaagagcggcctgcaatttgccctcgtgacctaatatcacttttaccctcgaaaggtgacggatgtgatgtggccattgtaaggggtggatctgaaaagcaaggggaagagaaccacctagctctgtccaatattgtcaacatttcatctggtcttgattgtgttgctgctaattctgttttgaatgctagctcaaggaggccaaggagagtatcgtcaggacgtagatcaaaaaagcataccgaagggaataatattgctgcgcctgatgatctcaatgcttcatccagcgcccctagcagttccataaagagaaaatctactactggtaacaatgtagctgcaaaaaagagatcgagggtatctatcagtgttaatgctgataacgaggtagagaaaaatagaataacagactctgtggctgttagtgaagaggggttagtcaaaaagagaacaaggcgtccaaaacctgttggcaatgagggggctgtcagaaagagaggaggctctaataatgaggtagggacaaatatcataacggaatctgtggctgttggtgaagagggagtagtcaaaaagagaacaagacgttcgaaacccgtagggaatgagggggctgataatgaggtaggaacatatagaataacgggctctgtggttgttggtgaagagggagtagtcaaaaagagaacaaggcgtagttcaaaacctgttgacaatgaggaggttgtcagaaagatgaggggctctatcaataattatgatgaggcaggaacaaatacaatgatgaattctgcgtttggggaggaggaagtagtcaaaaagaaaacgagacactcaaaacctgttggcactgaaggggctgcctctattggtggtgatggcatggtcaacaagagaaggacaggttctgtctccaccgagaatcttggtgctgtgagaaaaaggaagatagtgtcatcaaggaggaaattagctgaagttaatttgccaacagaggagggtgtaccgaatgctgtccctgacttggactttccttgtgcaatttctgaagaaagagctgttgatgttggaaatatggataaaggcagaagaaaatcaactccgagacccaagcagataaacatgcctgaagaggatgctgataaaaactccacattcacacgacttgtcaattgcctgtcgtttgcccgtatgaaaggaatcgacaggaacaaaagataattgaagttgagaaaccgtcgcttgaaaagggtttagtttcacctgtgatgatggttttgcgcgtggaggttgcagtcagtacgcgtggaatgcccaaaggatgacgctttttaagctggagtgtcatcaggcacattgccttgtgtgtgagcagctccacagtagattcccttacacaagacagaaccagggtcatctggatgtcatctgttgattcgaaaactggcaccacatatacagaggtcatttctatcttggatggggaacgaaatttgtacgacctgtttcgttggagacccggcagtttgtttccagttggtggtatataggtgttgggcatttaatgcgtcgatgacagttgacggcatccattgttttatccatactctgaaatttctgatcttgccccatcaattgatgaatcgctacctttatcagattcatgtcacgcagcagtgcaagaaattcattagcaacattgagaccaacaaatagctgaaaccaaagggtgcctagctccatctgttctccgcctgggcaaaaagaaccggaaccgaggaaccgaaccgaaccgaaataaccgagaaccggaaccgaactaaccgaaccgaaggaaccgttatgaatttcggttctggttttttgagaaccgaaataaatgagatattttcggttctgcactccaaagaaccgaaagaaccgaaaa

SEQ ID NO: 203043 - DNA, 985 bp, Zea Mays
acgccgcctctaaccctccacagtccctctcgccttccccttcacaagtcacagtcacagcacatctcgcggcggctgcgtcggcggcgacagaggcaggcggcggaggcagcgtcagccatggtgcacatggtaagactttcaagaaaccaaggcgtccttatgagaaggagcgtcttgatgctgagctgaaattggtgggtgagtatggcctgagatgcaagcgtgaactgtgccgtgtgcagtatgccctcagccgcatccgaaatgctgcaagggagctgctcacccttgatgagaagaaccccgccgtatccttgagggtgaggcactcctgcgccgcatgaaccgatatggtcttctcagtgagggccagaacaagcttgattacatgcttgcactcactgttgagaacttcctgcagcgccgccttcagaccattgtcttcaagaatggcatggcaaagtccatccatcatgcgtgtgctcatcaggcagcgccacattagagttgggaggcaacttgtcaacatcccctcattcatggtgaaacttgactcagagaagcacattgacttctcccttaccagcccgctcggtggtggcgaacctggaagggtgaagagaaagaaccaaaagaaggcttctggtggaggcggtgatgatgaggaggaagagtgatcgtgtgatgctaactctttgttttgttagagcctaattttgctggctttgataggacctaattttgttacatgaaaacaaaagttggctgtcgagtttttctctctctctgaaattgcaatttaaattcttgagaactgcaattgtcgactctcgttaccgaagttttaaatgtggaggtttctccgacgctcaatgggtccctctcgcgccggggcggaagcttctctcgacacagcagtgcagccggcacgacgcccctgaagttcgcgcggcgaaaggtggcggcggagggtgctatgcgg

SEQ ID NO: 203044 - DNA, 604 bp, Zea Mays
gtgggcactaggcctcactcagcccaccggcgcctatccccaaccctaggtcagcccatatatataaacccgatatttagggtttccttctctcacttgtgtagcccaacgagaagagcggcggcgcgggcggacaaggagcaggcggaggaggagctgtgccaagccacaatgggtatctcacgcgactcgatgcacaagcgccgtgccaccggtggaaagcagaaggcctggaggaagaagcgaaagtatgagcttggtcgccagccggccaacaccaagttgtcaagcaataagacagtgaggagggtccgtgttcgtggaggtaacgtgaagtggagggctcttcgccttgatactggtaactactcatggggaagtgaagctgttacccgcaagacccgtatcctcgacgtggtctacaatgcatcaaacaatgagcttgtgaggacacaaacccttgtgaagagtgccattgtgcaagttgatgctgccccattcaagcagtggtacctcactcactatggagttgacattggtaggaagaagaaaacccctgctgcaaagaaggataatgctgaggggttttcttcttcctaccaat

SEQ ID NO: 203045 - DNA, 4130 bp, Zea Mays
ctgaccggcctcgtgtgccccgtactcccaccgccgtcctgcacgcaaatcccaaaaatcagataaaaagactggtttttctccccgttctccttttccccccactaatcgatttaggttcttagttaggcgttcctgccgctcttcttcctcccgtgtcgtcagaggaagccgcgaaaagcatgcaggaatcaggcggtcttgaggacgaggagctacaggtgcaggatgcagttgccagtggttccaagaggagcaaagactccgccgccgccgccacacgcagcgccaatgtcagctcgccctctgtggttcactctcaccctgccatcctccctgctcccgcgcagcagattccagaggttaagcaagcagataccacacatatgcattctatgcctgccgcgcgctttacgtagctaacaagttgaattcatcatcaacatatccattgctcgagcttttcttcaagaaccaggtccaccacattccgtattacaatggttaaagtttttatatttgcttgattctctttttttatatgctaattgacttttttctcttctatattatccacttgtgtgggttggttatagcttgtgatttcacatttcatttgttagcggccaagatgtatttctgttagtttatgactaccactcaggaacttatgtgtccatcatttgagtagaataaaataggtgaacttactggtattatttcattgtgttctccctgcttccatttgaaaactataaattacctgatgattgtaattcactaggattttcctcttgagaaggcagtgttaggtataaatattgtagccttataagctacttaattgaatgtgcttgtttattccttaatcatgaattttttctcattcacattggagtagctttttgtgctcaataaaatgggctgacatctaattgtttgctgactgtataactattggttggtatgatgccaatttgccgaactcccttgctttgttagtaaatggttcatgaaatatgtacaaatacaaacagatgcaaagtcttgatagaaaatccgtttctcaaacaaaggagcattattttagaggaggtcaatgtggagtggactggatccgtgctggagagcgaagcaaattgagggaggacaagtggtggacaaataaggcttagtaatgataattaagtaataatttgaaaaatacaattgaagaatatcaaattctctaaaataaaataacagtagagcttgaatggatataaattatcactcagttggccatttacagtatgtataccatacggatttcatagattaaagagtttggagtattcaaagcttgtatctcagtgcctaaacactgaatggacagctaccatagggcaaagtgaagaaacggaagagttgagcaagatcacattagagaataaggatattcagcttgatatcaatataagagaagaatctcggagttcttcacaacaagggaactttgacacagaaggtaccagctccagtgaggctttcttgcttggaacggttgcttcagaaaagatgcttgagaaactgaaacataaatctggaagatgtgagcctgctttagaaaaggctattgtggaactggagcatggtataaacggtttgaagtactttgtttgccttgatccacggttgcaggtttgttccgccactgataccaggtgaagcttcacccttcagatccctgtcgtgacgaatggttcgtgggtgctggggagggattggatccgttggattcatgagatgtgtggattgttcctgccggatatcgtgacatgtttttagatctagcagacaaaaccatgaactgtctagggctcctccgttgcctagatctactagagtgagtgagcctacagagttgacctcatccaggctccagttccaccccacggtcatcgtcctctgttgctctacgtttcatgcttctcacctcctctcctcaatctcatcactagaggcggaaagcagatcagatgagatttttggtcttgcgtggttcttttaatctgctcacatgatacttcttattcattgccgtccagtgaaattaattgccctcggttgaattggttcctttgccattttacttaggaggataaaggagacactaccttggtacatgcctgttgccacaatggacaaaagaagattagtgttgtataattttatgtctgggctgaaggtcgtgtttgatcgagagaggaaggtcttgggctggaaaaactttgattgttacagcgtgggcaactcaagaagcaaccttccagtgaacccaaatccttctggtgttccccctgcccctggcttgggaccgaacagctacactcactcctgaagctaccaagggtgcctcaccgaatggcacccaagtcaatgtcttgcaaccttctgcaagtttttcgccgaagctgcattgcaacagaaacgtcctcgtcatcgctgctctgctgttcctcgtaatcctttgatcacctcaactccccatgacaatcttttcaaaaaccaaatcaacagatatgattgattttagttaaaacttggtttaccatgtattgagttacgtatagtgcgatagtatcacattcttttggcttgtgtctacagttccagtaggagttaggatagaacacaggatgagtccatagccctttttttgcacgttcataatgtactcataatgtacctggtgggtgtactgtgtacatattagatatgacttcaggatgtattgattttataagataattgaataatgatgctcgcatacacagatatatatacttcacatatgctcacgtgtaccaccatcgtcatctgtcatgtttttaatacagtcaagaggcatgatccgcccccacactcctccgtcgcaggcaacaccgcctcccctctgctccgcgattacggggaccaaggccgccatcaacgccctccatcgcaggcaacatcgccagtcatggaaggttgccgaggatccccaccctcctccccctctgctacgcgattacgggcctctgctacgcgattacggggatccaaggctcaacgcgaagcgccgcaggcggcaagaggagcgtctacctcgtagaccgcggtctgtatggggttgtgcgtccacgagcaaccctattgacgagatggaggacgcctccaccgtggccctgcgattcgccgacgtgccggtgcgcctgcatgccagccgccatgaccttgccagtctggacctcgacgtcgacgcactccgcctgtcgacacacatttttggcatcttctacggacacgacggtgtcgagtggccaactactgccgggagaggttccagaggctggatgatgaggtgtcaaggcaagcaagcaggcttgtccgtggcgtccatgagccatggccggtggccgccaagaacgtgggctcaaatgcggttgtcaccagtttgctcatcccatgctgtggttgccaactgcggggattcacatgtcgttctccgccgtggaaaggagacaatagagtcatcgattgatcgcacgtctgacattaaggatgagcaggcgaggattgaggcgttgggactgggatgcaaggtcatccaatggaatggctatcgagtctccggtatacttgctgtggtggactggtgtactagaagtacttcggaaaaggaacttgtaaggaagcaggtctttgtccttggccgaatgggaaatgctaaggaagctctttcgacaattataaacaaactggaagtcatgcagatgcaggaggttgttgaaattgttacggagcagcacgatgacgaactgtgggaggaactgattagacaatgccacaagaagcctgaaatgttaaggaagattaactttggatctgatcaatgttattctgattgctatgatcctatctaccaatgtggacatggttgttcaaaatccacaattcttattcatcgattatttccttccagtaacaatttcttctacttattcatggatcattttggttttagctggttgagcactttttctcaatctccagtgaacacatctaggatgactcttcacatccgtcagttgtggggctgtgctacttaa

SEQ ID NO: 203046 - DNA, 3524 bp, Zea Mays
atgttctgcctccgcaccctccgatcgcccgccgcgtccgattcccctgaccccgcctcgcccgcaatctccgccgccgcgcccgcgacatccatcacccccacccgcgacatcccgcctcgcacgccatcaactcgcagcggcccttctccgaacgtggtttgttttttcgtttgctcgagcagccagccgactcgtctccagcaatgcggccggggtcggctcgctggaggtgggcgtcgccgccgacacctccaacgcctccaggcagggattaggtgagccgtcggctaatcactcgtcattgggaggatctcctcctcccgttcagatttgggcaagaaaggcccgggcgcgatgtccatggccgaggaggggagtgaggccgaggaggggagtgaggccgaggcgctcgagaaagacggcagcaaggcttcttcaccttcggggccagccagtcgactcgtctccagcaatgcggccggggtcggctcgctggaggtgggcgccgccaccgacacctccaacgcctccaggcagggattagatttgggcaagaaaggcccgggcgcgatgtccatggccgaggaggggagtgaggccgaggaggggagtgaggccgaggcgctcgagaaagacggcagcaaggcttcttcaccttcggggccagccagccgactcgtctccagcaatgcggccggggtcggctcgctggaggtgggcgccgccgccgacacctccaacgcctccaggcagggattagatttgggcaagaaaggcccgggcgcgatgtccatggccgaggaggggagtgaggccgaggaggggagtgaggctgaggcgctcgagaaagacggcagcaaggcttcttcaccttcggggccaagcggtcttgaggacgaggagctacaggtgcaggatgcagttgccagtggttccaagaggagcaaagactccgccgccgccgccacacgcagcgccaatgtcagctcgccctctgtggttcactctcaccctgccatcctccctgctcccgcgcagcagattccagaggttaagcaagcagataccacacatatgcattctatgcctgccgcgcgctttacgtagctaacaagttgaattcatcatcaacatatccattgctcgagcttttcttcaagaaccaggtccaccacattccgtattacaatggttaaagtttttatatttgcttgattctctttttttatatgctaattgacttttttctcttctatattatccacttgtgtgggttggttatagcttgtgatttcacatttcatttgttagcggccaagatgtatttctgttagtttatgactaccactcaggaacttatgtgtccatcatttgagtagaataaaataggtgaacttactggtattatttcattgtgttctccctgcttccatttgaaaactataaattacctgatgattgtaattcactaggattttcctcttgagaaggcagtgttaggtataaatattgtagccttataagctacttaattgaatgtgcttgtttattccttaatcatgaattttttctcattcacattggagtagctttttgtgctcaataaaatgggctgacatctaattgtttgctgactgtataactattggttggtatgatgccaatttgccgaactcccttgctttgttagtaaatggttcatgaaatatgtacaaatacaaacagatgcaaagtcttgatagaaaatccgtttctcaaacaaaggagcattattttagaggaggtcaatgtggagtggactggatccgtgctggagagcgaagcaaattgagggaggacaagtggtggacaaataaggcttagtaatgataattaagtaataatttgaaaaatacaattgaagaatatcaaattctctaaaataaaataacagtagagcttgaatggatataaattatcactcagttggccatttacagtatgtataccatacggatttcatagattaaagagtttggagtattcaaagcttgtatctcagtgcctaaacactgaatggacagctaccatagggcaaagtgaagaaacggaagagttgagcaagatcacattagagaataaggatattcagcttgatatcaatataagagaagaatctcggagttcttcacaacaagggaactttgacacagaaggtaccagctccagtgaggctttcttgcttggaacggttgcttcagaaaagatgcttgagaaactgaaacataaatctggaagatgtgagcctgctttagaaaaggctattgtggaactggagcatggtataaacggtttgaagtactttgtttgccttgatccacggttgcaggtttgttccgccactgataccaggtgaagcttcacccttcagatccctgtcgtgacgaatggttcgtgggtgctggggagggattggatccgttggattcatgagatgtgtggattgttcctgccggatatcgtgacatgtttttagatctagcagacaaaaccatgaactgtctagggctcctccgttgcctagatctactagagtgagtgagcctacagagttgacctcatccaggctccagttccaccccacggtcatcgtcctctgttgctctacgtttcatgcttctcacctcctctcctcaatctcatcactagaggcggaaagcagatcagatgagatttttggtcttgcgtggttcttttaatctgctcacatgatacttcttattcattgccgtccagtgaaattaattgccctcggttgaattggttcctttgccattttacttaggaggataaaggagacactaccttggtacatgcctgttgccacaatggacaaaagaagattagtgttgtataattttatgtctgggctgaaggtcgtgtttgatcgagagaggaaggtcttgggctggaaaaactttgattgttacagcgtgggcaactcaagaagcaaccttccagtgaacccaaatccttctggtgttccccctgcccctggcttgggaccgaacagctacactcactcctgaagctaccaagggtgcctcaccgaatggcacccaagtcaatgtcttgcaaccttctgcaagtttttcgccgaagctgcattgcaacagaaacgtcctcgtcatcgctgctctgctgttcctcgaccttcggcgaaaatttccagatacccgtactcttttcatatggcataacacactagcattaagtcttatgagagaccttgctaaagaattagtgcttggaggggaagaatgacctagaactgaagatggatgagctgatgtgaaaaatgaggggaagaatgacctagaactgaagatggaggagctcaggtgaaaaatgaacttgttcattgtgtgttttctgaccttttttggaattgtattaaaatatactgtaatgaattggtgtaagaatgtgttggaagtagcaaagaacctgatgccttttgcaatgagaatgtctttctggca

SEQ ID NO: 203047 - DNA, 1215 bp, Zea Mays
tcacaagcaaaaatcgtccagtgttttttttttcgttctttgccgtttctgcacacaagcacccatggcgacggcggtggaggttcccgtggaggcgccggtgaggacagtgaaggtcaccaatgtctctcttagtgcaactgtgcaagacattaaggagttcttttccttttcaggagatattgatcatgtggagatgcagagtggtgatgagtggtcccaagttgcatatgtcactttcaaagatgcacaaggcgcagaaacagcacttcttctttcgggtgccacaatagttgatctttctgtcatcattgcacctgctccagagtatcagccacctcctactgcctctgctccaccaatgagtggaaccagagttccagttggtggtggagacaacaacgttgttcacaaagccgaggacgttgtgagcactatgcttgccaagggtttcgtgctaggcaaagacgcggttggcaaggccaaagcattcgatgagaagcatggcttcacatccacagccggtgctacagtggcctcaattgacaagaagattgggctgactgataagatcacgacaggcacttccttggttagcgggaaggtgaaggagatggaccagaagttccaggtctccgacaagaccaagtctgcactcgctgccgccgagcagaaggtgagcagtgccgggtctgccatcatgaagaacaggtacgtcttcaccggcgcgtcatgggtcaccagcgcgttcaacaaggtcgccaagaccgccacggacgtcgggacgatgaccaaggagaagatggccgccgaggagcatcacaagggctctggcccgtcttctggcggccactcgtacacgcccatccgatgattcatgcattggcttgctgttacgtgcctcactcaaacggtgttgtactgcatattggtggatgtaaaacatggtcttttagtcccaactcttattatgttgtggttagctagagttgaaacctaatagaaaccacaagttaaggttcaagcacatgaatacctattttccatacacatatatttaaagttaaattttgtactcttatcattttaagtcttctttatcgtctttccacatattaaagttggtatttctctatatctctttccatagctgtcgcgctttaggatactactatgtacgagtgcttctagcactctgaaggtctcttaaccggc

SEQ ID NO: 203048 - DNA, 1226 bp, Zea Mays
cgttctttgccgtttctgcacacaagtactagtcgtctcctagtcctctcctctgtactagtcgtcgagtctgcttccattctgttcaagttagcgccgctaatccgctccctattcaccatccaatccaatcggcttcccccaggcacccatggcgacggcggtggaggttcccgtggaggcgccggagatattgatcatgtggagatgcagagtggtgatgagtggtcccaagttgcatatgtcactttcaaagatgcacaaggcgcagaaacagcacttcttctttcgggtgccacaatagttgatctttctgtcatcattgcacctgctccagagtatcagccacctcctactgcctctgctccaccaatgagtggaaccagagttccagttggtggtggagacaacaacgttgttcacaaagccgaggacgttgtgagcactatgcttgccaagggtttcgtgctaggcaaagacgcggttggcaaggccaaagcattcgatgagaagcatggcttcacatccacagccggtgctacagtggcctcaattgacaagaagattgggctgactgataagatcacgacaggcacttccttggttagcgggaaggtgaaggagatggaccagaagttccaggtctccgacaagaccaagtctgcactcgctgccgccgagcagaaggtgagcagtgccgggtctgccatcatgaagaacaggtacgtcttcaccggcgcgtcatgggtcaccagcgcgttcaacaaggtcgccaagaccgccacggacgtcgggacgatgaccaaggagaagatggccgccgaggagcatcacaagggctctggcccgtcttctggcggccactcgtacacgcccatccgatgattcatgcattggcttgctgttacgtgcctcactcaaacggtgttgtactgcatattggtggatgtaaaacatggtcttttagtcccaactcttattatgttgtggttagctagagttgaaacctaatagaaaccacaagttaaggttcaagcacatgaatacctattttccatacacatatatttaaagttaaattttgtactcttatcattttaagtcttctttatcgtctttccacatattaaagttggtatttctctatatctctttccatagctgtcgcgctttaggatactactatgtacgagtgcttctagcactctgaaggtctcttaaccggc

SEQ ID NO: 203049 - DNA, 1165 bp, Zea Mays
atccggttcgcctcatgccggtgcgggggcgccgacgcaccctaccgcccgtgaggacagtgaaggtcaccaatgtctctcttagtgcaactgtgcaagacattaaggagttcttttccttttcaggagatattgatcatgtggagatgcagagtggtgatgagtggtcccaagttgcatatgtcactttcaaagatgcacaaggcgcagaaacagcacttcttctttcgggtgccacaatagttgatctttctgtcatcattgcacctgctccagagtatcagccacctcctactgcctctgctccaccaatgagtggaaccagagttccagttggtggtggagacaacaacgttgttcacaaagccgaggacgttgtgagcactatgcttgccaagggtttcgtgctaggcaaagacgcggttggcaaggccaaagcattcgatgagaagcatggcttcacatccacagccggtgctacagtggcctcaattgacaagaagattgggctgactgataagatcacgacaggcacttccttggttagcgggaaggtgaaggagatggaccagaagttccaggtctccgacaagaccaagtctgcactcgctgccgccgagcagaaggtgagcagtgccgggtctgccatcatgaagaacaggtacgtcttcaccggcgcgtcatgggtcaccagcgcgttcaacaaggtcgccaagaccgccacggacgtcgggacgatgaccaaggagaagatggccgccgaggagcatcacaagggctctggcccgtcttctggcggccactcgtacacgcccatccgatgattcatgcattggcttgctgttacgtgcctcactcaaacggtgttgtactgcatattggtggatgtaaaacatggtcttttagtcccaactcttattatgttgtggttagctagagttgaaacctaatagaaaccacaagttaaggttcaagcacatgaatacctattttccatacacatatatttaaagttaaattttgtactcttatcattttaagtcttctttatcgtctttccacatattaaagttggtatttctctatatctctttccatagctgtcgcgctttaggatactactatgtacgagtgcttctagcactctgaaggtctcttaaccggc

SEQ ID NO: 203050 - DNA, 1163 bp, Zea Mays
aaaaaagtcaatgagatctagctcatgagctttacaggcatcccaatggtgaggacagtgaaggtcaccaatgtctctcttagtgcaactgtgcaagacattaaggagttcttttccttttcaggagatattgatcatgtggagatgcagagtggtgatgagtggtcccaagttgcatatgtcactttcaaagatgcacaaggcgcagaaacagcacttcttctttcgggtgccacaatagttgatctttctgtcatcattgcacctgctccagagtatcagccacctcctactgcctctgctccaccaatgagtggaaccagagttccagttggtggtggagacaacaacgttgttcacaaagccgaggacgttgtgagcactatgcttgccaagggtttcgtgctaggcaaagacgcggttggcaaggccaaagcattcgatgagaagcatggcttcacatccacagccggtgctacagtggcctcaattgacaagaagattgggctgactgataagatcacgacaggcacttccttggttagcgggaaggtgaaggagatggaccagaagttccaggtctccgacaagaccaagtctgcactcgctgccgccgagcagaaggtgagcagtgccgggtctgccatcatgaagaacaggtacgtcttcaccggcgcgtcatgggtcaccagcgcgttcaacaaggtcgccaagaccgccacggacgtcgggacgatgaccaaggagaagatggccgccgaggagcatcacaagggctctggcccgtcttctggcggccactcgtacacgcccatccgatgattcatgcattggcttgctgttacgtgcctcactcaaacggtgttgtactgcatattggtggatgtaaaacatggtcttttagtcccaactcttattatgttgtggttagctagagttgaaacctaatagaaaccacaagttaaggttcaagcacatgaatacctattttccatacacatatatttaaagttaaattttgtactcttatcattttaagtcttctttatcgtctttccacatattaaagttggtatttctctatatctctttccatagctgtcgcgctttaggatactactatgtacgagtgcttctagcactctgaaggtctcttaaccggc

SEQ ID NO: 203051 - DNA, 2747 bp, Zea Mays
gcgccgtgcagagcagccgaccagaaagtggcggacctccttttcacaggacaggccggcggccgggtaggaaaagcccaaaacctctcttcctgctgcccctcgctgttcgctgcctcccctccactctccactgttcactcccagtccccaccagcaccaggcacagatcactcgcttccccactcgctcacgccaaaaccaccgcgccgaatccgaatcgagtcgagcacgagcgagcaagcaaggagctagcgcacgcatctaggctaggcgagagcaccaaaggaggcgccgcgggtggcggcggaatgggagggcccctcggcgcgatcatcggccgctacccgtcggcggccggcggcgacgagcagctgggaggcggcgccggaggcggcattatacgccacgaccgcaggtgccgcgacatcgccgttctcgtgctcttcgccgccttctgggtcgccatgattgtcaactccagcttcggcttcaaccagggcaacccgctcaggctgacttatgaactggactacaaagggaacgtttgtggcgataagcatggcaacccaaatttgcaggagctggatgttagatactggatgaatccgaatcaagtctaccaaagtggactcaagaacagcaaggttaacctggctgatgccaaagccatctgcctgatggagtgcccaaatccagctgtagatggattgaactatatttgtgattatccagaagggaacatagacctctctgttgatgattggatcaatagggactatgactattatgagtttctcacaccagacatgaagaatagctcacttcaactccagggtccatgctaccctataatatttccaactgtaaatgcactggcatgagacgggtggtgtcagcattgatgaaaatatcctcattgataaaacagtgcacaaggccatcgattctagatctgctgtattaaagagatatattgcagacattgggaagtcctggcctgtgttcatcgtttgtggtggaattctccctgttttcctgtcagttatctggttgcttatgattcgttatttcgttgctgccatgacttggattacagtagtcctcttcaatgcccttgttatatctgtaacgatgttcttttacatcaaagctggctggataggcaatgaccccttaactgttgtcattggtgaaagtgatccatatgttcacataagtggacgggaaataagtcaccttcatactattacaatcctaatgacagcagtaatgatcattgctttcctgtcctcaatagctattgtccgccgtatactgatagcaacacctgtcttaaaggttgctgcaaaggtcattggtgaagttcaggcactgatagcttttccacttttgccgtgcctgatcctttctatcttgtatatgttctggttttctgctacactccatctcttcagctctggtcaagttgtccgaaatgattgcaatactgattgttgttcatatgatctgaagctgggaaaagtaaattgtgacaactgctgtgggtacagcatccattacacccctcatatcagcattgccattctatttcacttatttggttgctactgggcgactcaattcattctcgcatgctcttcaactgtggttgcgggatcagttgcttcatactactgggcgcgtggtgaaatatcacatgatataccatttctcactgtagtctcttcactgaagcgactgatgcgctacagccttggatctgttgctctgggttcacttgttgtatctgttgttgaatgggtgcggtttatactagaatgccttcgtcgcaagttgaagctagttgattctgcccgagagagctgctttggaaaagcgacgtcctcctcttctgaatgctgcctgggttgcatagactggaccctcaagtcagtaaatcgaaatgcctacattatgattgccatcaccgggaaaggtttcttcaaagcttcagtgctcgcaactggattaataatgaagaacattctgcgcatcggaaaagtcaacgtcattggagatgtcatcctcttcctgggaaaactctgtgtgagcctattctgtgcgcttttcgcctttctgatgttagacacccacaagtacaagtccgcacacaacaagatatcctctccagttatccctgtcctggtaacatgggccctcggctacgtagtcgcgaagcttttctttgcggtggttgagatgtcgatcgacaccataatcctctcgttctgccaggacgccgaggagcaccaggggaacgcgcagtatgcgcccccagctctgatggaaactctggacgaacagggcgaactgcagagactaactcaagggccttgactgtcttttcctcttggtagtagcatggaaacttagcggcagcctaatgttttgttaccccgttccgttctcttggcttgtgaagaggtttgccatttttgcttgctattccatgtacaagtctgaatctgacatgttctcctggcccaattggcatgtgtaggcagcttatctatatatgtgtgcagtgtgctattgctgatacggcgttggtgaaatactccctccgtttccaacttccaacatcataaatttaaccaaatttatatagtaaaacaatagcatttatgatacctaaataactattattggattcttcattagttagctatttgatgtcatagatctttgtgtgtgtgttttttttt

SEQ ID NO: 203052 - DNA, 2840 bp, Zea Mays
cgctccccgcactccacgctatctgtggcggcaacagtaccccctccaagcgttcaccggtgcacgctccctcctcctcaaccgcgcgtgtagcttctctctcacactacatggagagtgagtgccgggagacgctaccattggcaggcgccgctctccctctctccactcccgcgcgtgaagactccagaggtgccgagttgctcggtgcgactccttcgtcgccgtccacggaagcggaggccggcgaccaacctccccgcgcggcgaagggtacaggcggccggatccgttgggcctcacgcgaggagagccacgcgaacggattcgacgaccgaggagtccggatcgaagctcccactggccgacttcatcgccgccgccgccgttcaaccctgtccgccggcgattcaacgaggctccttccccggctgggtgtccgccgatccagaactcgagctcccgtccatcgatctgcttcttccgatctgcacatctaccgtgtaattccgtatgttcatttgaacgcgtggactactaagcattgaggttctacctccttttcattctctttccgatgcttgattcattgttctatctttggatatattatttactctacatacttcaagcgtgttgtttttgattctgccatggtactgcagagtcaggttttatagccttgaagtcttatttcataactatgcatatagtagttctttcacaacatacttgaaatggtagttggcgtcctattcaaaccttaatactttgcattgtgatatgtaactagcaaactagtcactatcctaaacatttaactacagatggatggccaagatgccaaagtgttgcaaacagatctcctcaaccttgtctcctcggttgataaagctggttccaaaattagggacttgatagaagatgccttcttgcacttgggtgatgagcactatctcatcaattgtctccttgctatcaaacaagaggcagagttgctggagcacgatggaattgagtccaaagcacgctctgacccggagatggagaggatggattttcaagtgaaacaaatggaggtcgagcacgtagatacacgttttacaaccccatcgccacccgaatcgtggtccgctagtgatgttgactctgtagaatccgacaggtctactaggtataacatttggaaccaggtttaaacttgcccagtagcagtgtggaactctgtttgcaaataaacaaccactatggttctggagtgacttattatgcactgtttgtgttagttcagggtctatttgatgccagctccatggcctgctgccttttaatggctgagaacaatgataacatgcagtttccccctcatggtcctccacacacatcagctcctcaaggaatgcccccctatgtggaatccacagtactggcagcctaatccctacgactttcctagtggatctaatatccaatttagcagcagccaccttacaattcccagtttatcacaacaacaaaatgaagtaggaggttttgcaaataggggcccatggaatcatttcgttggtatgatgaatcctagttatccttgcccacctcccccgcttgctgctggccaaatgcaaccacctagccattttgtcacactgcctaacaactcttcgaaccctatggacccaatatttttggagtccgaggcagagcacagcgcacaggaggttaacagccccagcaaagaaggtggtacacctggtaaagggaagaaaatgaaagaacaaaactttacgccagaagaggatttgttgctatgcacaacttggctagaaattagttgtgatccagtaattagcactggccagaggaaggaaggactttgggcaagaattgataaacggtataacgaaatgagaggtgagtatcctaagagagttatcagggctttaacaagtcgatgggacaaaattaaggctgattgtgggaagtatgcttcgttgtatgcaagagtcctcagggaaaatcaaagtggtttaactgattatgataagacttcaatggctaccacactgtttacaaccgaaaataagagagggttccccttcatgcattgttggactaaactcaagaacgaacccaaatggcaagctattgttcaaggcacttcactacgaggggcagcagggatgtcaccggttggcagtgccacaccaactgcaagtgtaaacgatttggatagcgattctctaggtttaactgggaaaaggccattaggccgagactccacaaaggcatcaaggaagaaggccatgtccacgtcgtcccagtccatgaagtatttgaccagaattcatgacctgcaaatggcccggttgaaacaaagtgaagacaaagtggagaagaaagaagcacattatgaggttttcaaggatctcgaatataagaagctgcaagttcaacaagaacaaattgaagtggagaaaacaaaactgaagtttcaagaacgcaaagagaagaacgatgagttgaaggaagcaatggctgtggatttggaggacatagccgaagatttgaggcctgctttcatagcaaagaggaaagcacttgtggactggtttgtcaacaatccaaactgagttgttcgtttagtgaaaattgtggaccacggttttcactagttgagtttctgttttagtaatgcgtgctgtaataatcacattttttgaagtgtgactttggactgcgttagtgtcttcatttcagttgaagaactcaagattatgttatgtttgtaaacttattctcgtcacttatggttatgaattgtcagtttgaacttgtccact

SEQ ID NO: 203053 - DNA, 1232 bp, Zea Mays
caaataaactttatagctcattgaggtttgctttattgcgcaatttggtcagtctgttgttcgagcagactatcttatcctccgcaagggttttataatgacccacaatcttccgccaacatatgatttccacaattacatgatacgctcaatggaagaggagtttgagaagattgtcggagtgagtggactgttgtggggcttcgttgttgcttttatgttatttaatgtagacggatccaacctgtacttttggatagcaattcttcctgtaactcttgttcttctggtgggtgcaaagctgcagcatgtgattgcgactctaacagcagagggcgcaaagatgagcacctacgggccaaggatacagccaagggatgatctcttttggttcaagaaaccagagtttctcctttggttgatacacttcgttctctttcagaatgccttcgagttggcttcgttcttctggttctggtggcaatttggttatgattcatgcttcatcaaaaaccaccttttggtatattgccgccttatactggggtttgctggacagttcctgtgcagttacagtacattacctgtatatgcgctggtcactcagatggggtccaagtacaaggctgcgctgatcccgcggaggatcagggagaccatacatgggtggggaaaagcgacgaggaagaagcgccggcgccgccgcggcgacgactcgacggtccgcacggagacgagcacggtgtgctcgctcacggacgacgacgaagacttcgaagacgacgacgaccaccaccaccacggaccgtcgtacgataccccgagagccgggggccgcccgccgtacctgaagatcgagacgcatcgtcagtcgggcagcgggcacgacggccccaggcccggcggcaccccgtgcttccaccccagcggcagcggcagcgggcacgccatgctcctgcggcaggcctccgtctccgcgccgtcgtcgccgtcgtaccgcggaggcaataacgtgacaaggtcggcgtccatgcccgggatcgccgcgctgaggacaacgggctccggcacgccgacgcgcgtgagccatgaggagcctacttgatgcgcgcccgtgcatgccatggatggcttgctagtgcagacgtactgaggactgagctgctagtgtagcaccggatttgaaggtatatcgatatatatatacacacgaaaagatttggggtgacaaa

SEQ ID NO: 203054 - DNA, 2689 bp, Zea Mays
tcttgctcctcgtaattgtttaagcgcaggagcgaagtggttcgttgttccaccagatcccctcttttggccgatctctcttccgttccgttccgctctgccgcagccaattgcttctgctgtgtccttttcctcccagcgagcaccttaccttacctctctctcctcgttgttgtgttgttgattgatcctggaagccgcagctccacaagctcccaaaaagcaacaacctttacctcgttgttcattgtatcttcctttcttccctgcttctggctccgccgccgccgcatctcttctgaagctgaacccgcgacagctaaccgccattgtttgcaggggagacaggagcgagcgagagagagagagagagagagagagagagagctcgcgacaaggttttgcccgcaccatatcgtcctctccccgcaagctccaaaagccaggtccagggactaaatagagcaaaggaagcctttcatcatcgtcgtcatacactaatcgaacgggagaatcggagggagggacatacatcacgtttttgtgctcctccgagtccgtccttctccaagatcccccattttccttctcgtttccaacctcctcctccttcctgaccgaccgatggcgatggtgtgacgccgccgcccgtccccgacaccgctgcgacctcagcatttccacaccgtctcggtctgggtctggtcttcgtctccgcctgcgccttcgttttgatccttaagctgagcttcccttccccgagcgccacctccgcccgtcctaccatggcgctggcttcaatgtgatacgcggaggtgcggtcggtcggtcgtgactcgtgaggaataggaagagggtaggagaggagaagaagagccagcgccggcgggaggggagatggcgggcggcgagggggagatgcggtcgctggcgctcacgcccacgtggtccgtcgccaccgtgctcaccctcctcgtcgcgggctcgctcctcatcgagcgctccatccaccgcctcagcaattggctgaagaaaactcatcggaatccactttacaaagcaatggagaagatgaaagaagaaatgatgctgcttgggttcatatctctgcttctggctgcgacgtcaagaatcatctcggggatctgcatcgactccaagtactacaacagcagattctccccgtgcaccaaagaagaggtccaagaatcgataaatgcagagcatgccattgctcacgcgcgcaagcatctactggaggtcatcctgcaccattcaccgaggagaaatctgaaaactagttaccataaccatgaaggctgccgtgagggatatgagtcatttgtttcgcatgaaggtttggagcagctgcaccggtttatatttgtaatggctgtgactcatgtgacttatagctgcctgacgatgttactagcaatactcaagatccataaatggagaaaatgggaggatgaagcattcagggataatcatgaatcattttctcagatcgcatatgagtcagcaactagaaggcaaccagcacttaccaaatcctattcattccgctcttggagccaaaataatgtggtcatgtggcttgtttgctttattgcgcaatttggtcagtctgttgttcgagcagactatcttatcctccgcaagggttttataatgacccacaatcttccgccaacatatgatttccacaattacatgatacgctcaatggaagaggagtttgagaagattgtcggactgcagcatgtgattgcgactctaacagcagagggcgcaaagatgagcacctacgggccaaggatacagccaagggatgatctcttttggttcaagaaaccagagtttctcctttggttgatacacttcgttctctttcagaatgccttcgagttggcttcgttcttctggttctggtggcaatttggttatgattcatgcttcatcaaaaaccaccttttggtatattgccgccttatactggggtttgctggacagttcctgtgcagttacagtacattacctgtatatgcgctggtcactcagatggggtccaagtacaaggctgcgctgatcccgcggaggatcagggagaccatacatgggtggggaaaagcgacgaggaagaagcgccggcgccgccgcggcgacgactcgacggtccgcacggagacgagcacggtgtgctcgctcacggacgacgacgaagacttcgaagacgacgacgaccaccaccaccacggaccgtcgtacgataccccgagagccgggggccgcccgccgtacctgaagatcgagacgcatcgtcagtcgggcagcgggcacgacggccccaggcccggcggcaccccgtgcttccaccccagcggcagcggcagcgggcacgccatgctcctgcggcaggcctccgtctccgcgccgtcgtcgccgtcgtaccgcggaggcaataacgtgacaaggtcggcgtccatgcccgggatcgccgcgctgaggacaacgggctccggcacgccgacgcgcgtgagccatgaggagcctacttgatgcgcgcccgtgcatgccatggatggcttgctagtgcagacgtactgaggactgagctgctagtgtagcaccggatttgaaggtatatcgatatatatatacacacgaaaagatttggggtgacaaa

SEQ ID NO: 203055 - DNA, 1222 bp, Zea Mays
gtacttgcagagcagccatgtggctgaagaaaactcatcggaatccactttacaaagcaatggagaagatgaaagaagaaatgatgctgcttgggttcatatctctgcttctggctgcgacgtcaagaatcatctcggggatctgcatcgactccaagtactacaacagcagattctccccgtgcaccaaagaagaggtccaagaatcgataaatgcagagcatgccattgctcacgcgcgcaagcatctactggaggtcatcctgcaccattcaccgaggagaaatctgaaaactagttaccataaccatgaaggctgccgtgagggatatgagtcatttgtttcgcatgaaggtttggagcagctgcaccggtttatatttgtaatggctgtgactcatgtgacttatagctgcctgacgatgttactagcaatactcaagatccataaatggagaaaatgggaggatgaagcattcagggataatcatgaatcattttctcagatcgcatatgagtcagcaactagaaggcaaccagcacttaccaaatcctattcattccgctcttggagccaaaataatgtggtcatgtggcttgtttgctttattgcgcaatttggtcagtctgttgttcgagcagactatcttatcctccgcaagggttttataatgacccacaatcttccgccaacatatgatttccacaattacatgatacgctcaatggaagaggagtttgagaagattgtcggagtgagtggactgttgtggggcttcgttgttgcttttatgttatttaatgtagacggatccaacctgtacttttggatagcaattcttcctgtaactcttgttcttctggtgggtgcaaagctgcagcatgtgattgcgactctaacagcagagggcgcaaagatgagcacctacgggccaaggatacagccaagggatgatctcttttggttcaagaaaccagagtttctcctttggttgatacacttcgttctctttcagaatgccttcgagttggcttcgttcttctggttctggtggcaatttggttatgattcatgcttcatcaaaaaccaccttttggtatattgccgccttatactggggtttgctggacagttcctgtgcagttacagtacattacctgtatatgcgctggtcactcagtacatacaagaaggattggttatgcatgttgctaaatggcg

SEQ ID NO: 203056 - DNA, 1981 bp, Zea Mays
aatccacgacgcccatttccgattcttgccgttttcgggcaggcagccagtccctttaaagcaccactaggcaggcactaggccggtagtatataaaataatgtcctactcctaccccgccaccacgccgcggcagcacaagcccctctccgcccccagccagccctcctcagatctcaatcccggcgctccctccctccctcctcgcctcgggacagcgagcgccgccgtccgccgtccatggagcacgacgccgaggcgcgccgcgggttcgccaggatgggcttcgggtgcaagcactaccggaggcggtgccggatccgcgcgccctgctgcggcgacgtcttccactgccgccattgccacaacgagtccacgaaagacgggcacgagctggatcggcacgacgtccaatcggttatctgcctcgtctgtgacaccgagcagccgatcgcgcaggtgtgctgcaactgcggcgtctgcatgggggagtacttctgcgcagcctgcaacttcttggacgatgacgttgacaaggagcagttccattgcgacgattgcggcatctgcaggtgcgtgcgtgcgtgtgtctgtccctctttttttgtttcttgttttcttttcttccttccattgcggtcactgagttacaggatctgagtcgccgcgcacaaatcgcgattttagtaggaacccccccctctgattaactaactaagctactactacctattgatgatgatccaacaaagctgacagaaactgtggtgcatttgcatttgttcgaacagagtaggaggaaaggagaacttcttccactgccaaaagtgtggtaaagaaataaacaaatccatcaccagccatattcaccacacccgaggatgttctggctccccatcaccagccatacatcatcctgttgttttttttttgtttgcacacgcaggatcctgctactcgacgacccttcgcgacaggcactgctgcatcgagaactcgatgaagaacaactgccccatctgctacgagtacctgttcgattcgctgagggagacgtcggtgctccgctgcggccacaccatgcacctgcagtgcttccacgagatgttgaagcacgacaagttctcgtgccccatatgcgccacgcccatcttcgacatggacaagttcttcaaggccctcgacgcagagatggaggcaagctacttgtacacgggaaaggtcagtgcgccttactgccagcctgatgctgtcctgtatgacccaatgcaaccaaccttcccagttctggtctattcttcccttcttctgtagaacaaagtagccctctcgtcttctcgtataaatggcacagatccagagagaggagacttggaagcggccggcgccggccccggcccccagacgccaagacgctcggcaacaagatccgccgtgtcagtggctcagtgcccgtgctgatcgatgctcgtgtgtgtgtgtgtgctggtgcagggatgggtcgtgtgcaacgactgcagggacacgacgcaggtcttctccggcatggcgggccacaagtgctgccactgccagtcccacaacacctgccgggtggcaccccccgtcctcccgtagccaccaccaccaccacatcattgttgttggaattggatgcagccagccaagatacccccggccccagcagctacgctattattaccagtagcgcctgcgcttttacgcaccgctccgttccagtccatgatgaactgcataatttcgtgccatgcaggtatgtacgtacactgttattggagatcggaagatttatccgactcgggacgcattatttgtaccacaacaaaacacgtgttacactattgtaataccagatctggatacgaaactattttttaggatgcttgaacgagtggtatttccttggagtgtgtataacatttatttattagctcaaatctctctctctctctttgtgatg

SEQ ID NO: 203057 - DNA, 869 bp, Zea Mays
gcgatgcagcagataatcagcgcctgcaagctgcctcacacgcaacgggccgccgcgttcctgccgccgaggccatcgctcaggcgccttccagtcccagcaggaggtgcgccgccgccgcggcgattggtggtcaggaggagatgccaggaagagaataagcagcagcaagaggccgaggagggaagcggcgctgacgagcaggagcagcagaagagaacgttcctgagcctggaggaggccgggctggtggagatgtccggactcagcacgcacgagcgcttcctctgccgcctcaccatatcgtctctgaacctcctgagagtgatctcggagcaggagggcgtcccgatagaggagctcaacgccgggcgcgtctgcgactggttcctcaaggacaagctcaagagagagcagaacgtcggcaccgccgtcttgcagtgggacgaccctggcttctagctagttccagcttcgttctgagccaatgatcatgctattctacactgcagcgcacgcaggggctatatatttcagggcttcaggcccttcacgggatgagcaaccaatgccacatgttcagtaatctcagaatttcagtttcaagaatgggcgcatcaatcctggccattccatttatatatctttcggtttggtttcatctttacaaattttctgtagcgacgaacatttttcctgtgcggaaaatgggaaaggaatttacgggtaaactgattttgggagatagatcgagtttcttgcaaataaattctgtcagctccaatttatctcctctgatcgttaatccggttattcaatcgaaaccaaagccggttaaagttctctataaccggtacgaataatctgaa

SEQ ID NO: 203058 - DNA, 866 bp, Zea Mays
gcgatgcagcagataatcagcgcctgcaagctgcctcacacgcaacgggccgccgcgttcctgccgccgaggccatcgctcaggcgccttccagtcccaggaggtgcgccgccgccgcggcgattggtggtcaggaggagatgccaggaagagaataagcagcagcaagaggccgaggagggaagcggcgctgacgagcaggagcagcagaagagaacgttcctgagcctggaggaggccgggctggtggagatgtccggactcagcacgcacgagcgcttcctctgccgcctcaccatatcgtctctgaacctcctgagagtgatctcggagcaggagggcgtcccgatagaggagctcaacgccgggcgcgtctgcgactggttcctcaaggacaagctcaagagagagcagaacgtcggcaccgccgtcttgcagtgggacgaccctggcttctagctagttccagcttcgttctgagccaatgatcatgctattctacactgcagcgcacgcaggggctatatatttcagggcttcaggcccttcacgggatgagcaaccaatgccacatgttcagtaatctcagaatttcagtttcaagaatgggcgcatcaatcctggccattccatttatatatctttcggtttggtttcatctttacaaattttctgtagcgacgaacatttttcctgtgcggaaaatgggaaaggaatttacgggtaaactgattttgggagatagatcgagtttcttgcaaataaattctgtcagctccaatttatctcctctgatcgttaatccggttattcaatcgaaaccaaagccggttaaagttctctataaccggtacgaataatctgaa

SEQ ID NO: 203059 - DNA, 1393 bp, Zea Mays
aaactgttgagagtgagaaggccgaggccgacgtgccacgctcggatctcacaactagtcacaagctgcttctccatattccacaatccacacatccggaccgagcgcgaccccacctcccagatctcatctgcgacgacctcctccctcccgatcccgctccgtctccccccaccgccaccgctgccgctgccgcctcccccaccgaggtcttgtcttcggcgatccagccggagcccgcggcggcgacgatgtacgggtgggagatgctgtcgttcaacatacacgatgggttcctggaggccatcgtgcggggcaaccgctcgggcctcctcaccgccgccgactacaacaacctctgccagtgcgagaccctcgacgacatcaagatgcacctcaccgccaccgagtacgggccctacctccagaacgaaccttcacccttgcacacaacgacaattgtggagaagtgcactcttaaactagtcgatgagtacaagcacatgctgtgccaggccactgaaccactatctacgtttttgcagtatataacttatggccacatgattgacaatgttgtccttattgtaactgggacactgcatgagagagatgttaacgaacttttggagaaatgccacccattgggcatgtttgacagcattgcatcacttgctgttgctcaaaacatgcgtgagctttatagattggttctagtcgatacaccactggccccttacttctcagagtgcattacatctgaggatttggatgacatgaatattgagattatgaggaacactctctacaaagcatatcttgaggacttctacaaattttgccagaaactaggtggtgcaacagctgagatcatgtgtgatctcctttcatttgaagctgacagaagagctgttaacattacaataaatagtattggtactgagttgacaagagatgaccgcaggaagctgtactccaactttggtttattgtatccatatggccacgaagaattggccgtttgtgaagatgttgaccaggttcgtggtgcaatggagaagtacccaccataccagtctatattttccaggatttcatatggagaaagtcagatgttggataaggcattttatgaggaggaagtcaagaggctatgcttgtcctttgagcagcagttccactacgctgttttcttcgcttacatcaggctccgcgagcaggagatcaggaacctgatgtggatctctgaatgtgtcgctcagaaccagaagtcccgggtccatgacagtgtcgtcttcatattctgagaacccccgccactatatatacgccggcgtaaaaaatgccagacctggagttgatgtattatttgttttgtagtcaaataaaggtg

SEQ ID NO: 203060 - DNA, 850 bp, Zea Mays
aaaacggtcatcgcccttgtcttcttcttcttcttcttcatctcaccaacctttcccttcccgtcccaaccgccgtccgcctgctcccttccgctcacctgcttcatctgttttgaagaaaaaaaggaaaacagaaggaagagagtaaaagaggcctgcgctgccctgcgccccaggttggaaaacattgatgaagttttgagatatgcacggctttctggctatctctacattagaagtcgatggacccaactccctggtgaaccacctatattagatgatgctgatgtggatgactggcttcctcgctttgttgttctacaagggcagtgtttatactattatctgaaatgtacagatctgagcccacaggaatctacactcttatgtgatgttgttgaagtagggcagcttccagactttgtgccagaagatgaaaagacgagatatgcgttttacctgttgacccgtcaagggttgaggtttgaatgctccagtacctccgaaatacaggttgattcatgggtaagagcactgtcaagtgactgcaaattgcaggatggcgctggtgatgataagatgatgaatacgaggagtagccaagtagaagctgggtcatcatggtagacgatgtatggagtgctgtacagtacaatagtcaatgaaatgtacatacattacatgcatgtaaagggagcaacatagtagacgcattcaacacgagatgacatgttgctcgtggtatttttcaacttttagggagcacacaaatgatgtatttctgtagcaaaaaatccgtcgtccgtttgagtttgatagaccgtaagagcaactccagcagttctctaaa

SEQ ID NO: 203061 - DNA, 2222 bp, Zea Mays
ctcggacttacgaaagtggaggtcacatttccattccaccaatgcatgtagattttggttcagacttccatcagtgaatgaaaaaaaaggaaaagcaagagagaatagcaagtacttatatcagtataaaaatataccaatgggtagtgagcctgcaacgttgtgtacgtatacatggggaaaatatttggtttgtggcttgtgtgaaaggacaatttaggtttgtattctatatctgagaaccattcatagctttaagattttgttataattgtcatcccatggttttgctcggaatagctgaccttctctttgtgttttttggttgatattagtgtaagatgatgagtccacattagtttgatgtgcacctaacaattaggttcttccttcttaatactacatgcattgttttagattctagcctatatgtttagttgcaggtcaagtctcttaacaaatttggttttgctggttgtttaaactattccagtttgttgtggcaattcaagtgacaggtccagaaaaaaacatatctctagctattcgttatttcatattgaattttcctcatattgtagagaaatctcagctaatctgttcacatcttgaaaatacaatcacaatttctctttacacatgaaatgtccctgaagtgttcgcatatacataatggtgattgtgacagaagagtcatgctatctggagtcctttattcagtatttcggacaaatgactatcacattttatttagcaaggaaatataaggtgcaaaatattatattagtgaacctatgagcagttgagcatactcaatctcatgcctcatatctgatctttgtggaccaagtgcggtttgaaattccctcgcctatcttgggctgacttaaagacaatcagatttagcatttagtcagatgaaaagatggataatagggatgatcccacttggatcctaggcacaagattgagtgtgcaattgtgcatttttcattataatcgtatgcacctgttacttcctattattcacattatcaaatattgttcatgtagtgtcttgcactcttgcccgttcctgaatagacagttagggaacagggtaaagatggtgtttgtagactttttggctgggaatacaaatgttaagatgtaaccgcataaggatatgtcatgtgcccaagattctcgaacagaagttacctcaataatcgatagttcaataaatagattagtttgtatgattaatttactatgttgttcttacacaactggtacataaattcagctacatctaaacttagtcaatgacatatgctaacttttgttgtttttcacagtggcacagaacacttctttgcatgaattccttgatagttatctacaattcaggcacaggtggtatgattctccaggatttttttgggactggtcattgcgggcatgttgagggtatttagttaagcaattttgttattattttagattgagtacatcagctcgctggttgcttacattttcttggtccctagagctactcacctcgctggttgtttacatttccttgttcctgggatccactttcctaaaatgaatctgttttaatcttgtaactggaactggtggatattttgatagggaaattacgatgattgatttctagatttgagtttcagattttttttgcttgtactggcctcttgagattggaagactggcgttgttgtgggcttgtggcataggcttcctttgtgggtctttttctcatctgatgtaaacaatattttttagtctggtaacggtgcaaaggcaaatggggcatcatcacatatctaggtcgtattttcgacagacagatataaaacggagtgggaatgcctcgattgatatcatgtccaagttcttcaagctgatggtggaagaggcctttgcccaagtgtattgtctatggcaagcccaagcaccagggtatcacccaactcaagttccagaggtacaagaggtgtgtcgctgagagagctatacgcaagcttggtggactgagggttcttatgttatgaaataaagtatgtcatgaactttttgcaatttgactgtattatcggactacgaatggagagtgataaaatgttgcatgctgttgtggactacatgattggttagtgatcaaaaaagggagtttgcatattaatgtattttatcatattaatcattattcatataat

SEQ ID NO: 203062 - DNA, 1527 bp, Zea Mays
cgtcgcttgctgccgcatctaccttaggtccgagtctgagcctggtgagcccccacccacacaagttcagaattaccagattcatctgttgcagtcctcttactttccctgctcattttggtagtaaatgatggcaccattctgcctccaaggcacactaatcacaaccactaatccactatttcgaggaataattctgaaccatcaactcaacagtaagacaagccaacagttgctttcccttctggacatggctttgttgggctcgcatgtctctcaccgatggtaggcatccgatttggtaggaaatctgggcgctgatagatccattggcagatttattgggtaatgaaaacagtgattggtgagaacatgtcatgtaacctcatgtcaggtggggtgctatctgtttggtaggattaaaaaataattgttctgtcttcatcctaggtatatcgcaagttcttcggcgggtactgcaactgctcataccatgtggcacagaacacttctttgcatgaattccttgatagttatctacaattcaggcacaggtggtatgattctccaggatttttttgggactggtcattgcgggcatgttgagggtatttagttaagcaattttgttattattttagattgagtacatcagctcgctggttgcttacattttcttggtccctagagctactcacctcgctggttgtttacatttccttgttcctgggatccactttcctaaaatgaatctgttttaatcttgtaactggaactggtggatattttgatagggaaattacgatgattgatttctagatttgagtttcagattttttttgcttgtactggcctcttgagattggaagactggcgttgttgtgggcttgtggcataggcttcctttgtgggtctttttctcatctgatgtaaacaatattttttagtctggtaacggtgcaaaggcaaatggggcatcatcacatatctaggtcgtattttcgacagacagatataaaacggagtgggaatgcctcgattgatatcatgtccaagttcttcaagctgatggtggtaggtgttttgctttgctactttctcattgttgaagttgtctccatgttgtattcactaaagaacccctatattatttattttggaacaaacctttttaatggtggattagactgattcggtgaggtagctgtgcttttatggattgaggttggtttggtttggatctaagcccattagcagctctcattttgtgctgacaggttgccaaattacaatttaaagtacctgattagctgatttgctatgtactatgacatttaagtatttaacgtatcgataagaaattggttgttttattagttagtagtacttggattgattcacatgcaacattaataccatcatgtttaatgttctgtaacttcctgccatcatgtctgaaatagaaaataatctccatggggcttttagatcgtcaaaccaagtttggaaacaagaactccagtttgg

SEQ ID NO: 203063 - DNA, 4297 bp, Zea Mays
atggggcacagctctagaaagaaaaagaagcgcggcgcggccggccgcaaggcagccaaggaccacgccgcgcagctcgaaggagacgagaccgccctcgacgaggagctcacggccctggcttcaattttaggggaggacttcaaagtaacatcagaatcacctcatacacgatgtaatatatgtattaggccttattcggatgacatgggctttgaagatctaaatatttcagctattcttattgtgatatgttttcctggttacccccacaagtgtccaaagttgcggatcctgcctgaaaaaaacttgtctaaagaagatacagatcggctcctttcgcttcttattgaccaggcaaacatttattcccgagaaggacgtgttatgattttcaatttgtttgaggctgcgcaagagtttctatctgagattgctccagctcgtgtttcagtgagcactgcttctttcttgggtttgagctcaactactgatgacaatgtggaagttggctttgacagtgatccttacctgggaatctcttacatatataactccttcgatctatatagtcagttatatgatgatacttattggagtcgacaaggttcagatctgacaacagatagtggcaggaaaaatattgtatctcaagttcaatccaatgttagaagcaagaggaagaccatcattgaaaaatcccacatctcagctgataaggtcaataatgctaaagagtcatctggtgataaagctgaacagcaacatgccacaaagcatggtgccatacgggaggcagctccaactttacatgttgtggatgaggaaactgaaatttacggcaaaagtttgtctgctagcaatacaggaaatacatcagatactcctgaaaggggttttagcagtctaaatgaacctgaggacactgaccttgcagatgaatcttggaatgaacaagattgtgattcggacttcagctcttcaaatgcactaccttatgtttcatacatgttagatgatgcttcacgaaacaagaaaagggatttagttctggtacatctgcttcggatagcctgtgcgtcgaaggattctctttcaagtgctttgccaacaatatcagcagagttgtgcaacataggggttctttccgaatgggctaaggatttaatttctgattctcctgctgtttttggagaaactttcagtcatgtttttgggcaacaaatgatctcttcagagtgttctctattttggagacctgataattcatcatctaagccaaattctcgttatttgaatgattttgaggagctccgttcacttggtcaggggggctttggtcgtgttgcattatgcaaaaacaagctagatgggcgccaatatgctgttaaaaagatacgtctgaaggatagaagtcctcaattgaatgagaagattttaagagaggtagccacactttcaagattgcaacatcaacatgttgtccgttattaccaggcatggattgaaactgaatacggtcatcataatattttgaatgctggcgggtcctgcactgctgagagctctatctttagttatgatgaagtcagcctatcggatgcaggtggtgggaataagcaggaatccacgtacttgtacattcaaatggagtattgtcctaggactttgcggcaggattttgagacatacatctcgtcttttgatgttgaccatgcctggcacctgtttcgacaaattgtggaaggtctagctcatgtccatagtcaaggaatcctacacagagacctgacacccagcaacatattttttgatgtccgcaatgatattaaaattggagattttggtttagccaaatttctgaagctggagcagctagatcatgaccaatatcttcctactgaagcactgggtgtatcaatggatggaacaggtcaagttggtacatatttttatactgcaccagaggtagagcagaaatggccacagattaatgaaaaggttgacatgtacagtttgggagtaatattttttgagctttggcatccatttgccacagcgatggaaaggcatcttgttctttccgatcttaagcagaagggagacccgccattgtcatgggaatcaaaatttcctcgtcagtcagtcctgttaagaagcttgctgtcaccaagcccgtctaaccgtccatctgctgtcgaggtcttgcaaaatgaactgcctcctcggatggaagatgagtggctaaatgatgtacttagaatgatacggacaccagaagacacatatgtttatgaccgggttatatctacaatatttaatgaggacaggttcgccaaaatgcaaggccaacatgatagcagcaaaaagtccactggtaacattgataacagtgaacttttggataccatcgttgaggttgccaaggaggttttcaagcggcattgtgctaaaaggttccaaatatcacctttgcatactttggagtggaattttaccaaaaacaggggaaacacagtgaaaatcttaactcaaggaggagagatgctagaactttgctatgaactgcgaacaccatttgttatgtcaattgcttctaatcagacatcatcattcaaacgttatgaaatatcatgggttcatagaagagccgttggccattcaactccttatcgttttcttcagggtgattttgacattattggcggtacttcaccgattccagaggctgaaatcatcaaggtggctttggacctggggacccgcttttatgattccaagacgctagtcatacgtctgaatcacggtaaacttgctgaagcaatttgctcttgggcaggggtttctcaggatcaaagacaaaatgttgctgagtattggccaaatgaagctgaccgcaagtcacagtggagtttgattagggggcaacttttacaggatcttcgtctttctgaagaagttgttgagaagctacataaagcagatcagcggttttgtggctctgcagatctagtacttgctagattaagagggaccctgttttatgatgaatctgcttgcaaggctcttgatgatctatccgcgcttctgagatgtttgagagtatggtcggtagaacaaccaattactactattgatgtactcatgcctccgtcagaatgttactatacaaatttgtttttccaggtatactcaaaagaaggtaatcatggaccgggtttccatgaaaagttgctggcagttggtggacgatatgattggttggtggaacaagcttgggatgagacatctaaatctaaacccccaggtgctgttggtgtgagcattgcacttgagaaatttcttcctaacaatccttcatctgatctgggattgcgaagggttgaacctagcatcagtgtacttgtctgttcaaggggtggtggcggtctgttgactgaacgcatggaacttgtcgcagagctttggaaagctaacataatggctcagtttgttcctcaggaagatccaagtcttcaagaacagtatgaatatgccagtgaacatgatattaaatgccttgcaattatgactgaatcaggcctgtcacaaacagaccttgtgaaggtccggcatcttgattttaaaaaggagaaggatgttgaaagagagggactaataaagttcctgtctgatgcaatgtgttcacaatacaaaaatcctacgatctggagctgaccaacggccctcccaagtgcttagtgtatttgttttcaggttctagcagagcatcaaaaaatgtgtctttcgaacttccgggtgaaagcaatgtttgctgttcgaacatgtgaaggcaatcatgcgtgttggcttccgtgcatacggtgaggcagctgttggctctctgcaggttgttgccaaacgttacgccctggtctttactgaagatgggcgccgacgtgcggtgattggccaattggtataatcctggacctcttgattgttctcctgaggaccaatgccatgcaacaaggttgcttcagacacaaggtggcgtgtagttggtgcaattctgcagttttggggctgttggtattatatggatctgaaggtgcgcggttttctactacaacagatcctccgtttttgcctgtgttctctttcttgtgcatgtgattttctttttcttttccataggactaccttgtacatagttcgtttggcgtgagccatcatgtacatgcaaaatttttacattgttgggttactgacaatgaaatgctgaattttgcaactccctgatttaggacaaaacaag

SEQ ID NO: 203064 - DNA, 1886 bp, Zea Mays
  misc_feature (1885)..(1886): n is a, c, g, or t
gtcggactagcagcttactcgtaacggtaaagccaccgacccaactggtctcgtagccgaactgcaagagggaagagaagcatcgcatctctgagtctgaaaccctagccgcctgtctccctgtccggtctccactcgtccgggcgacgagacgacgacggagggtttctgcgggggatttgtttgtcgctgactcgccggcgaccaagatgaggccggttttcgtggggaacctagactatgatacccgccactcggagctcgaccacctcttctaccgctatggcagggtcgagcgcatcgacatgaagtcaggttgcccgcccttgcttttgcccacccctcgttttgtcgtcgtgttcggtcgatttaggttcgatctgatcttattgtgtacctagtcagctgttatatcttgatgtttgaatttcattgaattgaaggaaaaaaagtgagggaattcccccattctgtataaaaaaataaaaaatgagggaatgagcacgtttgtacagtaattgttttgataagattcatcatccaatagtgctgtattagttgttccagttattcttggttgattagctaatgatattgttgaaatgattcgtcatctaagttttgaacacgttataccactaggaaatcttttgccgtacagaacttggatagatgtgtttttaaactgggattgaagttgaaatgagtaagatactctgatactttgcagctgtgctgtactcgtgttacatctacttcataaagagcacagacttgcatgtgtgtgctgctccatgctaactggagttgcagtttgtgtaatagtaggcacagaagttttaatttttactctggcgcaggaactaccagggcaaaacatagctccccagggctcctcaactcctgaaatttcttccattcactgacctggccacctttttttcatttgaaaccatctgttcatgtgccctgatgcccactgttatgtctgctcgagcatgtttagcgggattgtgattcatgctatgtcatcagcaccatcatgccttaccatgtcacgatagaagtatcaccaacatgacaacatgctatgttactacattgataagcaagagagttctatttatggtgaagcatgttcaatgtctccggtcataatttcttactttggatataagttgttgaacaccattcttagccctcatcatgaatggagtctaccacactagtgctcttcatgccatcagaattatgcaggctttgcttttgtctactttgaggatgaacgtgatggcagtgatgccatacgtgctcttgatggttatccatttggccctggcagacgcaggctttcagtagagtggtcacggggtgatcgagctgctagacgtgatggcaacaaaccagaagtaaatactaagccaactaaaacattgtttgtcattaactttgatccaatggacacaagagtcagtgatatcgaaagacactttgcaccatttgggaacatatcaagtgttaggataaggaagaactttgcttttgtccggtttgaaacactagaagaagcccgtaaggctcttgaagctactcatgctaccatgcttttggatagggtgatttctgttgagtatgcctttagggatgatgatgaacggagtgataggtacgacagcccaagaagaggtggtggatatggtaggcggggggatagcccagcgtacagatcacgtcctagtccagactatggtcgcccagcaagtcctgtatatggttcgtatggcaggagcagaagtcctgttcgtgaccgctatcggaggtaatgccctaggattattttcattggtttgcatgttgtcttgttgtccatgtcatatgatcatann

SEQ ID NO: 203065 - DNA, 1180 bp, Zea Mays
  misc_feature (1179)..(1180): n is a, c, g, or t
gcagcttactcgtaacggtaaagccaccgacccaactggtctcgtagccgaactgcaagagggaagagaagcatcgcatctctgagtctgaaaccctagccgcctgtctccctgtccggtctccactcgtccgggcgacgagacgacgacggaggaactaccagggcaaaacatagctccccagggctcctcaactcctgaaatttcttccattcactgacctggccacctttttttcatttgaaaccatctgttcatgtgccctgatgcccactgttatgtctgctcgagcatgtttagcgggattgtgattcatgctatgtcatcagcaccatcatgccttaccatgtcacgatagaagtatcaccaacatgacaacatgctatgttactacattgataagcaagagagttctatttatggtgaagcatgttcaatgtctccggtcataatttcttactttggatataagttgttgaacaccattcttagccctcatcatgaatggagtctaccacactagtgctcttcatgccatcagaattatgcaggctttgcttttgtctactttgaggatgaacgtgatggcagtgatgccatacgtgctcttgatggttatccatttggccctggcagacgcaggctttcagtagagtggtcacggggtgatcgagctgctagacgtgatggcaacaaaccagaagtaaatactaagccaactaaaacattgtttgtcattaactttgatccaatggacacaagagtcagtgatatcgaaagacactttgcaccatttgggaacatatcaagtgttaggataaggaagaactttgcttttgtccggtttgaaacactagaagaagcccgtaaggctcttgaagctactcatgctaccatgcttttggatagggtgatttctgttgagtatgcctttagggatgatgatgaacggagtgataggtacgacagcccaagaagaggtggtggatatggtaggcggggggatagcccagcgtacagatcacgtcctagtccagactatggtcgcccagcaagtcctgtatatggttcgtatggcaggagcagaagtcctgttcgtgaccgctatcggaggtaatgccctaggattattttcattggtttgcatgttgtcttgttgtccatgtcatatgatcatann

SEQ ID NO: 203066 - DNA, 727 bp, Zea Mays
gatgaatatcgtcaccatatgctccaagctgaaatatttcacatagcgtcatcctgtttaccttttccagaaccaaattcatcagaaacgcctcagaagaagaggaaccatattcctctcctgtcacgagagacagagccttcttacgaggagcgcatatcgaaagtcaaagcgaagctggctgataatctcaagtagagccaccgttttcaattgttacaccaatacttggaagagaacttatggaactgtagaaggaggcaatccctctttatgccggtcttcgccttcttaagcttggcaggtttatgacgtgcgctttttttatggcaaaattggatctgttaacatgtggagatggaaattacccggaaacatgagcttagcgtggattttaccattttgaggtgttagaaaagcgtgctgcctattttagactagatatacagactaaaacatatggagccccacatttcgggtattgtcaagttgtgcgtttcactttcaaaatagtgtaagggccttgtgttttttttcttcttctgaatttgttgtaaaatagtctagcatcccttgcaaagagggggtaatgttgttgtcacatgatggtgtgtaccaaagtgtagtaaagcatcccttgcaaagagggggtggtagtgtcctgtatgtttttttaagcaaatgtgacaaactatataagaaatgaatatttcatgtgagttatgta

SEQ ID NO: 203067 - DNA, 1076 bp, Zea Mays
aaaaatcaaaaatagaaaaagtctcttgcccccgcggccgtgccgagccggcatcccctcccccagcaacgatcgcgacgacccaaaccggcaagggtgaccagcggctggccgccgccgcggcagacgagtcccatgggagacaacaagtctccgctgagcctgagcccgatgggcgggcgcgaccgggaccgggagctcctcatcccggtctccggcggcggctcggcgcccggcgtcgatgacgaggacgctgacagggcctcctccgcctccgcggcgctctcctcctccggccgcgaggctttccataaggtcgtccgcagttgggcttcaaagaagttcatgactggatggtcttggcttcatcacatctgttactttcatatttttgatcggagtctttatgtcatcttgggttggggcatctgtccttagccttggcgagtggattattaagcgcatgccccttgttcgtcatatctacaatgcatcgaagcaaattagtgctgcaatatcaccagatcagaacaaacaggcattcaaggaagcggtcatcataaggcatcctcgtgttggagaatatgcgtttggtttcatcacatcagttattccggtcaagaagatctttactgtgtctatgtcccaacgaaccatctttacattggcgatatcttcatggtgaattcaaaggatgtcataaggccaaacctttccgtgcgtgaaggcatcgaaatcgttgtgtctggtggtatgtcaatgccccagattctgtcaaccctcgacccggagatgatccttggtgacagaaccggaccaagcagaagctgaagctgccacgagccctttgtgtaacttttgtagtggtttgctagtaacattttcatacaggctaccaagagtacggcgaactgaacttggagcacaagtatctctgtattaagggttgagctgtgccttttttttgttttgaaaaagctgctgtgagttatgtgttatacaatagctgttgtgagttgtgaaaggaaaaaaaatcatttggtggaacaactgtgtcttctagaaaagctagtgag

SEQ ID NO: 203068 - DNA, 1120 bp, Zea Mays
aaaaatcaaaaatagaaaaagtctcttgcccccgcggccgtgccgagccggcatcccctcccccagcaacgatcgcgacgacccaaaccggcaagggtgaccagcggctggccgccgccgcggcagacgagtcccatgggagacaacaagtctccgctgagcctgagcccgatgggcgggcgcgaccgggaccgggagctcctcatcccggtctccggcggcggctcggcgcccggcgtcgatgacgaggacgctgacagggcctcctccgcctccgcggcgctctcctcctccggccgcgaggctttccataaggtcgtccgcagttgggcttcaaagaagttcatgactggatgtgtaattctcttccccatagcaataacgttctacatcacctggtggttcattcattttgttgatggattcttctctccaatatatgcacaactaggaatcaacatatttgccttggcgagtggattattaagcgcatgccccttgttcgtcatatctacaatgcatcgaagcaaattagtgctgcaatatcaccagatcagaacaaacaggcattcaaggaagcggtcatcataaggcatcctcgtgttggagaatatgcgtttggtttcatcacatcgtcagtatctctccagagttattccggtcaagaagatctttactgtgtctatgtcccaacgaaccatctttacattggcgatatcttcatggtgaattcaaaggatgtcataaggccaaacctttccgtgcgtgaaggcatcgaaatcgttgtgtctggtggtatgtcaatgccccagattctgtcaaccctcgacccggagatgatccttggtgacagaaccggaccaagcagaagctgaagctgccacgagccctttgtgtaacttttgtagtggtttgctagtaacattttcatacaggctaccaagagtacggcgaactgaacttggagcacaagtatctctgtattaagggttgagctgtgccttttttttgttttgaaaaagctgctgtgagttatgtgttatacaatagctgttgtgagttgtgaaaggaaaaaaaatcatttggtggaacaactgtgtcttctagaaaagctagtgag

SEQ ID NO: 203069 - DNA, 2370 bp, Zea Mays
gaccaaagcgtgacagggggccccacaggcgcatggaagcccaaaagagccagcgatcgttcccaacattcccggccggcgctgtcgcttccctacctcgtcgagagaatccgctgccacctacgcctacgcggccgcggtcatgagttccaccgccgctgtggcccttaatcgccgcactcgcagccgcccgccgtcggccgcatcctcccgcaggtccgatgatcccacggccgccgtcgccagtaccgccaacggcaacggcaatgtccccaccaaggccgcctcccccgatcacgcctcaggggagaggacggtcaagaagctgcggctgtccaaggcgctgacgatcccggaggggaccacgatctcggaggcgtgccggcggatggcagcgaggcgggtcgatgccgtgctgctcaccgacgccggtggcctgctctccggcatcgtcaccgacaaggacatagctacaagggtcattgccgaggggttgcgggttgagcaaacaatcatctccaagattatgacaaggaaccctttatatgtcatgggggacacacctgctattgaggcactgcagaaaatgatccaaggtaaatttagacaccttccagttgtagaaaatggtgaggttattgcgatgttggacattacaaaatgcctctatgatgcaatatcaagactggaaaaggcagcagagcaagaaagtgcactggcagctgctgtagaaggggttgagcgacagttaggtggcaacttctcagctccacacaatctcatagagactatgagagaacggatgtttaaaccttctttgtcaaccattatcacagagaacacaaaagtagcaactgtttccctttcagatccagtttgtgtagcagcacggaaaatgcgtgagttacaagttaattcagtcattattactgctggaaatttgcttcatgggatctttaccccaagggatgtgctgatgcgtgttgtggcccaaaatctttctcctgagttaactctagtagaaaaggtaatgactgcacaccctgactgtgctacattggacacaacaatccttgatgcactacatatcatgcatgatggcaaattcttgcatattcctgttcttgatggagatgggcgggttgctgcttgtttggacgttctgcaacttacccatgctgcgatttcaatggttgaaggaggtcctggtgctgcaactgatgtggcaaacacgataatgcagaaattctgggaatctgcacttgctctagagcaacctccagaggaggattttgatagtcacagtgaattacctttagtgatgccatcagatgccagggatggcagtagtagtatttatcgtcctgctgttgataatttatttgtctttaagcttcaggacaagaagggacgcatgcatagattcacttgtggctctgaaagtttagatgagctgatatcgtctgtaatccaaaggttaggcatggttgatgagaagagggtgattcaactgttgtatgaagatgacgaaggcgacaaggtgctgttgacaaccaattctgatcttactggtgctgtgttttgtgcgaaatcatctggattgaaggtcttgaggttgcatattgacaactcagattccagcaatgaagtagtaacacagccattgccagagctggcatcatcccagggaagtcagtcgatgcatgttcattatggttatggattgatggcttgcgcgattgctctgacgggggtagctgtgatagtttacttgagacactcgaaagcgtgatgaacttctggaggatcaacaaagaattttgcatagcttatatatacgactaatacgcatagaaggatcacacacttcttcggctcatgagaaagttaagtaatcatgggccgatgacgaagattacattggtggtccaagaaaaatatgctgactgactgtcatgttctccagttacctgacgaagtcggttcttatggtggcagggaagcctatgatatggttcttatggttggcaaccatgaattcagtgatgtctcaagtaaccatgtatatgcatctctgagcatgaaaaccaagaatgaatcacatatcccaagtcgagattcttctttaacttttcactatttattgatcagtggcggtgctgcatgtaaaataacatgcatcgactgacttccctgaggttgccctgctggatactggatccgctccgaagatgagccgatcaggtgcaagatagaattagaaagctagctagcgtcgcttgcactcgagacccgcagagccgatcgatgagaatggaacaaattcaaaaaaaacatgaaggatgaattgacttttttttttgattgggg

SEQ ID NO: 203070 - DNA, 1869 bp, Zea Mays
ttgcaatctgaagcaccctgttcgcaaaacctctcctgctcctgccgccgccgccatggagagtgcgccgcaaacccccaccatggcggccgccggcgatgtccttcgcgtggccgacctcccgggacgaggtcgcggtctcgtggccgcccgcaacgtccgcgagggtgaggtgctcctctccgagcctcccgtcctcctctacccgtcgaccctctcctccctccgctcatactgctccgcctgcttccgctccctcccccccgccgccacgattccctgcgtttcctgccgcgccgctgccttctgctccccggcctgcgccgccgcttcgcacccgcacctcctctgtgccgcgctctcccacggcggcggcgctggcctcgccgccgccgctcccaccgaggcgatccaagagccgctcctcttccttctctccgcctactccctcccggagtcaaccatgcgctccatgctctctctctcctcggcgccgcccccgcccccgggcgcgcaggacgccgcggggctccatgctgctgtggcagccctagcgccgccgcacatgcttccccagggattgtcgccagacctaacggcggctctcctcgccaaggaccggggcaacagcttcgccatcatggagccgtaccgacacgggatgtcgctcgagctcctgaaggcgcgggcctacgcagtctacccccgtgcttcgctgttcaaccatgactgcctgcccaatgcgtgccatttcgattaccccgacaggcctgggccagggaacactgacattgtggtgcgtgcactccatgacatacccgaggggagggaggtctgcatcagctactttgcggctaattggaggtatgctgataggcagcgcaggctgctggaggattatgggttccggtgcgagtgtgatcgctgtcaggtggagagtcagtggaaggatgatgatgataacaatggagatgatggggatgacaccatggaagaggagggtgaggatgatgttggagatagaggtgatgatgggattgaggaggaagagggggatggtgctaccaatggcggtgatgatgatttcccacatgcctacttctttgtcaggtacttatgtgacaatgagggttgttggggtatgcttgctccattgccaccctcaccaaacggcgacctgtcccatgtgtttgaatgcaatctctgtgggaagctgaggaaggaagaggatgtcattcctgatgagggcacttctggcatggtccattagtttgatgaaaacatactgatccgtgtgctgcttcttttagtggagtatgaacttacgacatgagcctttcaatcaaaggggagaaagttggaagatgatgtctagccatgtaaagagaatgagaattggccaatgtccataactcttccaagatttgagccagagggcagggggtgggggtggagttaaagagttcattgctggcaaaccatttagccttaggggatgatcattgctgctaatctccaccttaatttagtagtgttcatgttaattaggctacaaatcctgtggcgaaggtctaacacaagcttggataagtaagagaagtgagtgtcaaaatggcacattatttcatttttagtttcatggagatacccagtttgagcagtatctaggtacgaggagttacaaatttgtttatgttatgtattgtgctcttgcgtcatactgataagagaaccgtgatgacaaaatccacctgttttggtgtttaccttgagccttgtaaaggttttcattaacatttcatcatgcttcacaatcagatgtgtttcattttcaaggaaaatgactacattacatattttacatgattg

SEQ ID NO: 203071 - DNA, 2391 bp, Zea Mays
gcaatctgaagcaccctgttcgcaaaacctctcctgctcctgccgccgccgccatggagagtgcgccgcaaacccccaccatggcggccgccggcgatgtccttcgcgtggccgacctcccgggacgaggtcgcggtctcgtggccgcccgcaacgtccgcgagggtgaggtgctcctctccgagcctcccgtcctcctctacccgtcgaccctctcctccctccgctcatactgctccgcctgcttccgctccctcccccccgccgccacgattccctgcgtttcctgccgcgccgctgccttctgctccccggcctgcgccgccgcttcgcacccgcacctcctctgtgccgcgctctcccacggcggcggcgctggcctcgccgccgccgctcccaccgaggcgatccaagagccgctcctcttccttctctccgcctactccctcccggagtcaaccatgcgctccatgctctctctctcctcggcgccgcccccgcccccgggcgcgcaggacgccgcggggctccatgctgctgtggcagccctagcgccgccgcacatgcttccccagggattgtcgccagacctaacggcggctctcctcgccaaggaccggggcaacagcttcgccatcatggagccgtaccgacacgggatgtcgctcgagctcctgaaggcgcgggcctacgcagtctacccccgtgcttcgctgttcaaccatgactgcctgcccaatgcgtgccatttcgattaccccgacaggcctgggccagggaacactgacattgtggtgcgtgcactccatgacatacccgaggggagggaggtctgcatcagctactttgcggctaattggaggtatgctgataggcagcgcaggctgctggaggattatgggttccggtgcgagtgtgatcgctgtcaggtggagagtcagtggaaggatgatgatgataacaatggagatgatggggatgacaccatggaagaggagggtgaggatgatgttggagatagaggtgatgatgggattgaggaggaagagggggatggtgctaccaatggcggtgatgatgatttcccacatgcctacttctttgtcaggtacttatgtgacaatgagggttgttggggtatgcttgctccattgccaccctcaccaaacggcgacctgtcccatgtgtttgaatgcaatctctgtgggaagctgaggaaggaagaggatgtcattcctgatgagggcacttctggcatggtccattagtttgatgaaaacatactgatccgtgtgctgcttcttttagtgggagtcagggaagtctgttgtttaaatctactgactgaagtatcccagctccaatgagaggccgcataataaaaaatccaaaaggttaagagtgagtatggtcctaataaggcatcaaaatgtctttttttgtagagaagatagccatatgcagactgtaatagcttgaaactagtttccaaagaaggataattatgactcaattttaattaatgaatccctttatgttcatatacttggatgatcaactctgcagattactaattcttcatgggggactgtttatttatttactatgccgatgctggcaatagggcgaatttaaaatgttgatgaagccctaagcagtctactctcctgttgttattagttaatgtttgttttagatcaaatacataatctatgtccctagcatgagagaaacactactgtagtttatttattagctaatgatgatctattatacctttggtggcgacatcatttttcctgcttaaacaaggcattgtacggatccctgtgcagagtatgaacttacgacatgagcctttcaatcaaaggggagaaagttggaagatgatgtctagccatgtaaagagaatgagaattggccaatgtccataactcttccaagatttgagccagagggcagggggtgggggtggagttaaagagttcattgctggcaaaccatttagccttaggggatgatcattgctgctaatctccaccttaatttagtagtgttcatgttaattaggctacaaatcctgtggcgaaggtctaacacaagcttggataagtaagagaagtgagtgtcaaaatggcacattatttcatttttagtttcatggagatacccagtttgagcagtatctaggtacgaggagttacaaatttgtttatgttatgtattgtgctcttgcgtcatactgataagagaaccgtgatgacaaaatccacctgttttggtgtttaccttgagccttgtaaaggttttcattaacatttcatcatgcttcacaatcagatgtgtttcattttcaaggaaaatgactacattacatattttacatgattg

SEQ ID NO: 203072 - DNA, 1957 bp, Zea Mays
gcaatctgaagcaccctgttcgcaaaacctctcctgctcctgccgccgccgccatggagagtgcgccgcaaacccccaccatggcggccgccggcgatgtccttcgcgtggccgacctcccgggacgaggtcgcggtctcgtggccgcccgcaacgtccgcgagggtgaggtgctcctctccgagcctcccgtcctcctctacccgtcgaccctctcctccctccgctcatactgctccgcctgcttccgctccctcccccccgccgccacgattccctgcgtttcctgccgcgccgctgccttctgctccccggcctgcgccgccgcttcgcacccgcacctcctctgtgccgcgctctcccacggcggcggcgctggcctcgccgccgccgctcccaccgaggcgatccaagagccgctcctcttccttctctccgcctactccctcccggagtcaaccatgcgctccatgctctctctctcctcggcgccgcccccgcccccgggcgcgcaggacgccgcggggctccatgctgctgtggcagccctagcgccgccgcacatgcttccccagggattgtcgccagacctaacggcggctctcctcgccaaggaccggggcaacagcttcgccatcatggagccgtaccgacacgggatgtcgctcgagctcctgaaggcgcgggcctacgcagtctacccccgtgcttcgctgttcaaccatgactgcctgcccaatgcgtgccatttcgattaccccgacaggcctgggccagggaacactgacattgtggtgcgtgcactccatgacatacccgaggggagggaggtctgcatcagctactttgcggctaattggaggtatgctgataggcagcgcaggctgctggaggattatgggttccggtgcgagtgtgatcgctgtcaggtggagagtcagtggaaggatgatgatgataacaatggagatgatggggatgacaccatggaagaggagggtgaggatgatgttggagatagaggtgatgatgggattgaggaggaagagggggatggtgctaccaatggcggtgatgatgatttcccacatgcctacttctttgtcaggtacttatgtgacaatgagggttgttggggtatgcttgctccattgccaccctcaccaaacggcgacctgtcccatgtgtttgaatgcaatctctgtgggaagctgaggaaggaagaggatgtcattcctgatgagggcacttctggcatggtccattagtttgatgaaaacatactgatccgtgtgctgcttcttttagtgggagtcagggaagtctgttgtttaaatctactgactgaagtatcccagctccaatgagaggccgcataataaaaaatccaaaaggttaagaagtatgaacttacgacatgagcctttcaatcaaaggggagaaagttggaagatgatgtctagccatgtaaagagaatgagaattggccaatgtccataactcttccaagatttgagccagagggcagggggtgggggtggagttaaagagttcattgctggcaaaccatttagccttaggggatgatcattgctgctaatctccaccttaatttagtagtgttcatgttaattaggctacaaatcctgtggcgaaggtctaacacaagcttggataagtaagagaagtgagtgtcaaaatggcacattatttcatttttagtttcatggagatacccagtttgagcagtatctaggtacgaggagttacaaatttgtttatgttatgtattgtgctcttgcgtcatactgataagagaaccgtgatgacaaaatccacctgttttggtgtttaccttgagccttgtaaaggttttcattaacatttcatcatgcttcacaatcagatgtgtttcattttcaaggaaaatgactacattacatattttacatgattg

SEQ ID NO: 203073 - DNA, 3786 bp, Zea Mays
ggggacgctcatcatcactgccatctctctctgactctgtgtccgtctctaaactctagtctgtgcgaatctgctgccagcagcgaggaacagaacagtagccaatttgccatctcacagttgcgttcctccgattccccgtcccccgatggacctgtctcccagctcgtcggcgccatccgcgccgccggtgccgtgcgagtggtccggcgccgggctcggctccgcggcgtgcggcctcgcctgcagggtgctctgcgccgtcgccacctgcgtcttcgcggccggtgcgtacgctggcgagtagaaacccgcgccgcgcgagccgctggcggtggggtcgctggtcggggcggtgacggggtccatggtggggctggcgaccgagagcgggatgctgcgcggcgccggcatcggggccatctccggcgccgtcttctccatcgaggtcgccgagtcgtcccgcgacctctggcactcgggcgactccggcgtctggaccctcctctacatggtacgctacgcacattgatctgcgtccattccatcgtactctgccaaactggtcactggcacttcgggtcgtgtagtttggttgcaaatcgcagagagtacttgcccgcccgagcacaccacactcgtttccgcggcctgatggggggcttcagcttgatgttgaccaagacgattaggttaggtgtgccccatggattccgtgggggatggcctcattccgttcgtaaaagataaaatgattttcccccatttattatcttggcgcgctatccaaatggatgtgaaaatatcgtgttcttcacctgcatctgtgttgaatgtgctgaggtaggagtagctccggttttgctcggtgcctgtctctgacgtctgaccccaagtgtttttttgcgctctgcttctgtgcacgcaggtggacatcatctccagtctcttgagcggcaggctggtccgggagaaggtggggccggctgttcagagcgccgtgcagagccaggtagccaccccccacccaacctcactcatctgatgaaataaactgagcgtgatctgatcagactttttttttatatctctgacgctctgatcctccttctggtgccgattgcttatgcttaatgcactgcaaaatcctaaatttggtctcggttggtccattggctggctctatcgatcaacaacaagtttaggtagcagcagcatactaaacaaacaaaggatatacatatggagatgcttgtgcgcataatctgactgagtggtggttagtccatgtcctccatgcattgccctgccctgaagccaacgcgtcgatttcttcctagatggagtaacaccagcaattcaaaggcgcgcgcgccctctttttagacctttaatacccttgttagttatagaagggagcaagaattgttaccttaaaaaatggggctgtgctggtgcctgccttctagatcactttcagagaggccatcaggctcaagtaaattaaagacacttcggcatcgatgacaaatgagatgacgtgtctcagttaattgcccccacctgctctcccgacccaaccgcgtgtattgcactgccagtgccagcaacgcaggagagaagctcatggtcagcgtcagcctgctgtaagcatgtaactgacctgtttcttccgtctgtttgtcgtggacgcacgcagatcagcgccatcagctcgccgttcgaggagacgagcgacctgttcgagaccggcagcgtgaggggcctccccgaggccgcggtgcgccggctgccggtgacggtggtcgcggaggacggcgccgtggacgcggcgggccaggcgctgtgctgctcggtgtgcctgcaggacttccgggtgggcgaccgcgcgcggaggctgcccggttgccgccacctgttccacgtgccctgcatcgactgctggctcctcaggcacggctcctgcccgctgtgccggcgagacatctgaaactcggtcgtctgctctgtgaaccgccacccacgtcgccggaaacgtggtgtagtgttgctgctttggacgagatggtcagttagttgagtagggttcctactttgtaggacggcaccctgatgcccgtaagggaaatggtgcgctctgacgctctgttaactaaaaaagaagaagagagaaaacagcccctcagcttcaaagaatcaaaaggggaaaaaaaccataatagtgaacaaacgttcaacgacaaaacggcacaactgacggtcgcatgcaggttcaggccgagcttatctgcggattcagaattattcgtagttagctatagttggagaatgaaaccctaatcagggtgattagggttgatagtgaatatatatagctgagtgttatgggtcaaagctaattaacgaaggtatatacagagacgtaaacaatactctaaaacccccgtagtctcaattatatcatgtacaagtgtcgataccggagcgaaactcagcgaaaacactcgacaacagtctcttggtggagatatcgtgaactctaaaacccccgtagtctcaattatattctgtacaggtgtcaataccggagctatatcctgtacaggtgtcaataccggagcgaaactcagcgaaaacactcgacgactgccccttggtgaagatatcgtgaactgtatggtggggatgctgagaacacgaacatcatcggcggcgacacggtcgtatgcgaagtgcaggttgatctccacgtgcttcgtgccctgatgctgaacgggattagtagagaggtagatcatgctaacgttgtcgcagtagacgagagtgatccactgaagagggttgtggagctcctcgagaagctggcgcacctaggaggtctccgccacgctgttgaccacatcgtagtacttagcctccgcgttgtagctgagagacgataggctgacgcttggcaatctaagagacaaggttgatggccagaaacatgtcataacagtaagtaagattgggtgtcagtgttgctttggacgagatggtcagtagggtttgtactttgtaggacggcaccctgttgctttggacgagatggtcggtagggtttgtactttgtaggacggcaccctgatgcccgttagggaaatggtgcgctctgttaactgaaaaacagagagaaagcagccccctcaaataacgaaaagaaaaaaaatatactccacaactgacggtcgcatgcaggttcaggccgcgcttatctgaggattcagaatttattcgtagttagctacacacctacacattcttcaagttacctacacctgaacaagcttgctattccagctgattggttagctggacgagtgcacccacgttctctcgatccaggctgaccggaaacgagtatttttggcgtaggagtggatgcagccaaagagactcaaaataatttgttttgcatccactcgtgcaacttatactccagatatgcaggcaaccaaacaaatactaacataaagtcaatacacgcagtgacgcaggatgagacgatacgaccaaccaatcagacatattgtgtctgccgacgagctggtttggagaaactgttagctcggttcaggtggcctggtgccgtgcccgattattaagggcttgtttgacatagcttccctccaatagagtgattttgagtaaatctctagcagaagtaaatctatttaacgaaaactgtttaggctgtaaagtgattcctgaggggttagagagtttggagtaggttgggagcggtgg

SEQ ID NO: 203074 - DNA, 3099 bp, Zea Mays
ggggacgctcatcatcactgccatctctctctgactctgtgtccgtctctaaactctagtctgtgcgaatctgctgccagcagcgaggaacagaacagtagccaatttgccatctcacagttgcgttcctccgattccccgtcccccgatggacctgtctcccagctcgtcggcgccatccgcgccgccggtgccgtgcgagtggtccggcgccgggctcggctccgcggcgtgcggcctcgcctgcagggtgctctgcgccgtcgccacctgcgtcttcgcggccggtgcgtacgctggcgagtagaaacccgcgccgcgcgagccgctggcggtggggtcgctggtcggggcggtgacggggtccatggtggggctggcgaccgagagcgggatgctgcgcggcgccggcatcggggccatctccggcgccgtcttctccatcgaggtcgccgagtcgtcccgcgacctctggcactcgggcgactccggcgtctggaccctcctctacatggtacgctacgcacattgatctgcgtccattccatcgtactctgccaaactggtcactggcacttcgggtcgtgtagtttggttgcaaatcgcagagagtacttgcccgcccgagcacaccacactcgtttccgcggcctgatggggggcttcagcttgatgttgaccaagacgattaggttaggtgtgccccatggattccgtgggggatggcctcattccgttcgtaaaagataaaatgattttcccccatttattatcttggcgcgctatccaaatggatgtgaaaatatcgtgttcttcacctgcatctgtgttgaatgtgctgaggtaggagtagctccggttttgctcggtgcctgtctctgacgtctgaccccaagtgtttttttgcgctctgcttctgtgcacgcaggtggacatcatctccagtctcttgagcggcaggctggtccgggagaaggtggggccggctgttcagagcgccgtgcagagccagatcagcgccatcagctcgccgttcgaggagacgagcgacctgttcgagaccggcagcgtgaggggcctccccgaggccgcggtgcgccggctgccggtgacggtggtcgcggaggacggcgccgtggacgcggcgggccaggcgctgtgctgctcggtgtgcctgcaggacttccgggtgggcgaccgcgcgcggaggctgcccggttgccgccacctgttccacgtgccctgcatcgactgctggctcctcaggcacggctcctgcccgctgtgccggcgagacatctgaaactcggtcgtctgctctgtgaaccgccacccacgtcgccggaaacgtggtgtagtgttgctgctttggacgagatggtcagttagttgagtagggttcctactttgtaggacggcaccctgatgcccgtaagggaaatggtgcgctctgacgctctgttaactaaaaaagaagaagagagaaaacagcccctcagcttcaaagaatcaaaaggggaaaaaaaccataatagtgaacaaacgttcaacgacaaaacggcacaactgacggtcgcatgcaggttcaggccgagcttatctgcggattcagaattattcgtagttagctatagttggagaatgaaaccctaatcagggtgattagggttgatagtgaatatatatagctgagtgttatgggtcaaagctaattaacgaaggtatatacagagacgtaaacaatactctaaaacccccgtagtctcaattatatcatgtacaagtgtcgataccggagcgaaactcagcgaaaacactcgacaacagtctcttggtggagatatcgtgaactctaaaacccccgtagtctcaattatattctgtacaggtgtcaataccggagctatatcctgtacaggtgtcaataccggagcgaaactcagcgaaaacactcgacgactgccccttggtgaagatatcgtgaactgtatggtggggatgctgagaacacgaacatcatcggcggcgacacggtcgtatgcgaagtgcaggttgatctccacgtgcttcgtgccctgatgctgaacgggattagtagagaggtagatcatgctaacgttgtcgcagtagacgagagtgatccactgaagagggttgtggagctcctcgagaagctggcgcacctaggaggtctccgccacgctgttgaccacatcgtagtacttagcctccgcgttgtagctgagagacgataggctgacgcttggcaatctaagagacaaggttgatggccagaaacatgtcataacagtaagtaagattgggtgtcagtgttgctttggacgagatggtcagtagggtttgtactttgtaggacggcaccctgttgctttggacgagatggtcggtagggtttgtactttgtaggacggcaccctgatgcccgttagggaaatggtgcgctctgttaactgaaaaacagagagaaagcagccccctcaaataacgaaaagaaaaaaaatatactccacaactgacggtcgcatgcaggttcaggccgcgcttatctgaggattcagaatttattcgtagttagctacacacctacacattcttcaagttacctacacctgaacaagcttgctattccagctgattggttagctggacgagtgcacccacgttctctcgatccaggctgaccggaaacgagtatttttggcgtaggagtggatgcagccaaagagactcaaaataatttgttttgcatccactcgtgcaacttatactccagatatgcaggcaaccaaacaaatactaacataaagtcaatacacgcagtgacgcaggatgagacgatacgaccaaccaatcagacatattgtgtctgccgacgagctggtttggagaaactgttagctcggttcaggtggcctggtgccgtgcccgattattaagggcttgtttgacatagcttccctccaatagagtgattttgagtaaatctctagcagaagtaaatctatttaacgaaaactgtttaggctgtaaagtgattcctgaggggttagagagtttggagtaggttgggagcggtgg

SEQ ID NO: 203075 - DNA, 3196 bp, Zea Mays
gcagtattctttcccttcctgctcgatgcatccctttcttctctagcctcgcaaagtcgcactctttgggtgttctcgcctcctcctcgggcgacgctgccgccggcggaggtgcactccctgtctccctctgactccctccccctctttccctcgccattaatttgccgcctgccatcccggccgcgcttcagtacgcctgaaagttcggttttggctcccatgggcggtggacgcaactagcatttctttcttggcggttcttggtgtcttgtggttgtgggggtgggcaccgagcagcttcataggaatgggggtggcgcggagggaggagcaccgggcggccgccgccgcgttcctgtacgcgctgacggttcttggggtgttggcgggcggcgccggcgtccgcgctttcgaggacggcactgcggtgtacattgtcaccatgaagcaggcgccggtttcccacaggcgacttaacttggagaagttcgggagcagcaaggctgctactgccgtcggccgcggcggcagcggaggaggaggaggaggagacaccccgaccaccagcgtcctcaggaagccgagacagagttcacccaaacctatgaattatggctcatatattgttcacctccaaaaatcactattgaagaggactctaaggggagagcattatgtaaagctgtatagctaccgctacttgattaatggttttgctgttgtcattactcctcggcaggcagacaagctatccgggagaaaagaagtagcgaatgtgatgctggattactcagttaggacagcaacaactcatacccctgaatttcttggactgccacaaggagcctgggttcaagaaggtggtccacaattcgcgggacagggtgttgtcattggcctcatcgacacaggaatagatccaacccaccctagctttgcagatgatctatcgactgatagttatccagtacctgctcactactctggcatttgtgaggttacaaatgattttccatctggatcttgcaatagaaagctcgtgggggctcagcattttgcagcatctgcaataactagaggagtcttcaacgcatctcaggatcttgcttcaccatctgatagtgatggccatgggacgcatacagcatccattgctgctggcaatcatggaattcctgttgttgtggctgggcatcaatttggaaatgcaagcggcatggctcctcgtgcacacattgctgtctataaagctctttacaaaagctttggtggttttgctgctgatgttgtggctgcaatagatcaggcagctgaagataatgttgacattatcagcttgtccattactcctaatcggaggcctcctggactcgcaacattcttcaatccaatagacatggcactcttgtcagctgtaaaagctggcatatttgtggtgcaagctgcaggaaatactggtccttcccctaaaagcatgtcttcctacagtccctggatatttactgttggagcttctgcccatgacagggtatacagtaactatgttgtgcttggcaacaatttgaccattcaaggagttggccttgctcctggaacggatggtgatcccatgtataatttagttgctgcaccacatgcactgaagaacaatacagccagttgtaatgaaatgtcccttggggagtgccaagattcgagtcacctagatgcagatttgataagaggaaagatactagtgtgcagctattctataagatttgtgcttggtctttcttctgtgaaacaagctctagatacagccaatgatgtcagcgccgcaggagttatattctatttagacccatttgttcttgggtttcaactgaacccaactccaatgcacatgcctgggcttataataccatcatctgatgactcaaaggtatttctcacttactacaatgactccctagtgagagatgggacatcaggtcaagttgttagctttggcggagttgctaaaatattagggggtctaaatccaaattatggaaattctgctccgaaagtaatgttctattctgctaggggtcctgaccctgaggacaacacactgtcaaatgctgatatcttgaaaccaaatctagtagcaccgggaagttccatttggggtgcttggagttcagttggattggattctgctgaatttgctggtgaaagtttcgcaatgctctctggcacaagtatggctgcgccccatgtcgctggcctcgccgctctaatcaagcagaagtttccttcttttagcccagcagctatagcttctgcactgtccacaaccacaactcttagtgacaggcaagggaaaccaatcatggcacagcgaacatacagcaacccagacttgacgcagtctccagcgacatcttttgatatggggaatggctttgtcaacgccaccgctgctttagacccggggctcataattgattgcagctatgatgatttcttctcctttctttgcggcataaatgggtctagcccagtcgtgaaaaactacactggcaacagctgcgtggcctccaccatgacaggagcagatctaaacctaccatcaatcaccatagccgtgctcaaccaaacaagaaccataacgagaacggtgatcaacgtggccgctgacgagagctactctgtcaattacagtgcccctaatggaactgcagtttccgtggtgccgacgcaatttttcattccaagcggacagaagcagctcgtgacctttgttgtgaacgccaccataaacagctccactgcgagcttcgggaacgttgggttccagggtaacaaaggccaccgggcgatcatcccattctcggtgatctccaaggttgtatacagttcctgatgactgatgagccgagctgatgcagtggatgcaatgcaaatgcaaatgcaaaccagggcctgactgatccagcgtatgcagtgatgacttgactgcatggaggtggagcttgcctttgactagagaaattttttgttggttgtggcgtgtacattctgaagcatgttgatgtaagtagctgagtgattaaccagtaactgtaaagagaatgtactgccagatatccagaatgggaaatccttgtgcaaccagaatgttaaatagcactctgttggggtttgatttaccgatatgatgttcgtgcga

SEQ ID NO: 203076 - DNA, 2745 bp, Zea Mays
gggagggcaggggagcattggtagcagcagtattctttcccttcctgctcgatgcatccctttcttctctagcctcgcaaagtcgcactctttgggtgttctcgcctcctcctcgggcgacgctgccgccggcggagacagagttcacccaaacctatgaattatggctcatatattgttcacctccaaaaatcactattgaagaggactctaaggggagagcattatgtaaagctgtatagctaccgctacttgattaatggttttgctgttgtcattactcctcggcaggcagacaagctatccgggagaaaagaagtagcgaatgtgatgctggattactcagttaggacagcaacaactcatacccctgaatttcttggactgccacaaggagcctgggttcaagaaggtggtccacaattcgcgggacagggtgttgtcattggcctcatcgacacaggaatagatccaacccaccctagctttgcagatgatctatcgactgatagttatccagtacctgctcactactctggcatttgtgaggttacaaatgattttccatctggatcttgcaatagaaagctcgtgggggctcagcattttgcagcatctgcaataactagaggagtcttcaacgcatctcaggatcttgcttcaccatctgatagtgatggccatgggacgcatacagcatccattgctgctggcaatcatggaattcctgttgttgtggctgggcatcaatttggaaatgcaagcggcatggctcctcgtgcacacattgctgtctataaagctctttacaaaagctttggtggttttgctgctgatgttgtggctgcaatagatcaggcagctgaagataatgttgacattatcagcttgtccattactcctaatcggaggcctcctggactcgcaacattcttcaatccaatagacatggcactcttgtcagctgtaaaagctggcatatttgtggtgcaagctgcaggaaatactggtccttcccctaaaagcatgtcttcctacagtccctggatatttactgttggagcttctgcccatgacagggtatacagtaactatgttgtgcttggcaacaatttgaccattcaaggagttggccttgctcctggaacggatggtgatcccatgtataatttagttgctgcaccacatgcactgaagaacaatacagccagttgtaatgaaatgtcccttggggagtgccaagattcgagtcacctagatgcagatttgataagaggaaagatactagtgtgcagctattctataagatttgtgcttggtctttcttctgtgaaacaagctctagatacagccaatgatgtcagcgccgcaggagttatattctatttagacccatttgttcttgggtttcaactgaacccaactccaatgcacatgcctgggcttataataccatcatctgatgactcaaaggtatttctcacttactacaatgactccctagtgagagatgggacatcaggtcaagttgttagctttggcggagttgctaaaatattagggggtctaaatccaaattatggaaattctgctccgaaagtaatgttctattctgctaggggtcctgaccctgaggacaacacactgtcaaatgctgatatcttgaaaccaaatctagtagcaccgggaagttccatttggggtgcttggagttcagttggattggattctgctgaatttgctggtgaaagtttcgcaatgctctctggcacaagtatggctgcgccccatgtcgctggcctcgccgctctaatcaagcagaagtttccttcttttagcccagcagctatagcttctgcactgtccacaaccacaactcttagtgacaggcaagggaaaccaatcatggcacagcgaacatacagcaacccagacttgacgcagtctccagcgacatcttttgatatggggaatggctttgtcaacgccaccgctgctttagacccggggctcataattgattgcagctatgatgatttcttctcctttctttgcggcataaatgggtctagcccagtcgtgaaaaactacactggcaacagctgcgtggcctccaccatgacaggagcagatctaaacctaccatcaatcaccatagccgtgctcaaccaaacaagaaccataacgagaacggtgatcaacgtggccgctgacgagagctactctgtcaattacagtgcccctaatggaactgcagtttccgtggtgccgacgcaatttttcattccaagcggacagaagcagctcgtgacctttgttgtgaacgccaccataaacagctccactgcgagcttcgggaacgttgggttccagggtaacaaaggccaccgggcgatcatcccattctcggtgatctccaaggttgtatacagttcctgatgactgatgagccgagctgatgcagtggatgcaatgcaaatgcaaatgcaaaccagggcctgactgatccagcgtatgcagtgatgacttgactgcatggaggtggagcttgcctttgactagagaaattttttgttggttgtggcgtgtacattctgaagcatgttgatgtaagtagctgagtgattaaccagtaactgtaaagagaatgtactgccagatatccagaatgggaaatccttgtgcaaccagaatgttaaatagcactctgttggggtttgatttaccgatatgatgttcgtgcga

SEQ ID NO: 203077 - DNA, 531 bp, Zea Mays
atatgatacactcgacccgaaatggacacttgaatgaaacccgattcacaaaaccctagcgacctcgattcctcaccagcatggccgtcggcctctactctctcggcctctctccgccgccgcggcttgataccatcctcttcccacagctgcggcctcacctacgccgccgcgtgcccgctcgggttgctgcagccggcaccagctggtctcccgccgccggtgactccgaagacggggtcggcggctggtggtttcccgagtacgagaaatcgatgaaacaggcgagggggaggattgggtttaagagagctgtcgtggttgggttgggagcttctgcggcgatcgccttggctgggctggcgtggcgcttcccatcttcccagaagccagctaatatcaagtggatatgtggacactggacaggaacatgacctagttgttggagttctggtctgcaaggaacctttgatgtgtgtagcaggaacctttgatgtgtgtagcaggaaacataggatgtgcacacaggtg

SEQ ID NO: 203078 - DNA, 459 bp, Zea Mays
atatgatacactcgacccgaaatggacacttgaatgaaacccgattcacaaaaccctagcgacctcgattcctcaccagcatggccgtcggcctctactctctcggcctctctccgccgccgcggcttgataccatcctcttcccacagctgcggcctcacctacgccgccgcgtgcccgctcgggttgctgcagccggcaccagctggtctcccgccgccggtgactccgaagacggggtcggcggctggtggtttcccgagtacgagaaatcgatgaaacaggcgagggggaggattgggtttaagagagctgtcgtggttgggttgggagcttctgcggcgatcgccttggctgggctggcgtggcgcttcccatcttcccagaagcgaacctttgatgtgtgtagcaggaacctttgatgtgtgtagcaggaaacataggatgtgcacacaggtg

SEQ ID NO: 203079 - DNA, 426 bp, Zea Mays
aaaaaagtcgtatatgatacactcgacccgaaatggacacttgaatgaaacccgattcacaaaaccctagcgacctcgattcctcaccagcatggccgtcggcctctactctctcggcctctctccgccgccgcggcttgataccatcctcttcccacagctgcggcctcacctacgccgccgcgtgcccgctcgggttgctgcagccggcaccagctggtctcccgccgccggtgactccgaagacggggtcggcggctggtggtttcccgagtacgagaaatcgatgaaacaggcgagggggaggattgggtttaagagagctgtcgtggttgggttgggagcttctgcggcgatcgccttggctgggctggcgtggcgcttcccatcttcccagaagcttaggttttgtagtgggatgtaaag

SEQ ID NO: 203080 - DNA, 1953 bp, Zea Mays
tcatttatcatgcttttagcacgttgcaaggattctaatgaaaaccgtttctcagttggcatccgggaaacagcctgttggcacaatggcctacatgggcaaagtgcagtatttgatgcaatgcaaatctgctgtcagttcagctgaagattggcttaaccctgatgccatacaagaggcatttgaagcaagagcgctcagaatggcggtaaactgtgcccagaacataagccaagctgcaagccaagaggaaggctagtatttattttacacagattggactactctgggagacaggctcaatgacgatctcattccctgcagctgcaggtttctatgagcggtccccagatttgcttgaggctgcggtagctcacatccagctgattatcgtgaccaagttcattgagaaggtgcatcaggagattcctggacacggagtgaaggaacagctccaggccctctgcaacgtgtacgcgctgtacatcctccacaagcacctgggcgacttcttggcgactgggtgcatcacgcccaggcagggagcgctggcaaacgagcagctgggcaagctgtacgcgcaggtgcgtccgaacgctgtggcgctggtggatgcgttcaactacacggaccactacctggggtctgtgctggggcggtacgacggcgacgtgtaccctgcgctctacgaggaggcgtggaaggacccgctgaacgagacggtggtgccggaggggtaccacgagtacctccgcccactcatcaagcagcagcagctcaagctctcgaggctctgaagtctgaatcctctctctctctctctctctctctctctctctctgatgtggaagccagccaagatgtgtgtacgttagacatgtgtggtgggtttcagttgatacacgagggagtgagtaataaagagcgagcgagagatgaaacaaagaactgaatttgtatcgtacaacaaagaactttgccgtttggttcacatatttataacgtaatgggtaattgataacgttaaatcatgtttgttttagtccaaccgtaatcagataccacactaaaatttgataccagcttattcaaatttgttaccaccagtaatcgagcgtaaaccattaccatttatgttacatttcttgaaccaaacagcatcttaatttgttgttactgaccacgtgattggttgttaggaacagcagatcctggtcgaagcctagatgcaggctgggcttagcctgtatgcattgatgcaaaccaaaataaattctcttgtttggttgtttgtcctcaattagccaggttcagtacaacccttgtctggtttgctgttttaggtaagttacatggatttagctctaagttacacaactcaactacatttctaaaattacaatgttataaattacacaaatccaaatttatgcaattatatattacaataacttatcctttacatatcctttacaaaattataaaatacaattataatattgatactgaggcacaagaacactttacaaaattgtagtttacaagtatgcattagcagtttaccagcgtccattgcagccacccattctgttctcagttctcaaacaccaaaaacactttaaacaaaacagctcagttctcgattcaatttacaaaaacaccaaaaacacccgatcaagtgtacaatcaaaatacttgtaaacaaaatagctctctgtttagcaaatacttgtaaacaaaatagaccaaaaacaacttggttgtttgatggcaaagtaaatataaaaaattcatgaagagaaggtacaccacttccatttaaatgtgtcacgagcttcgaatcaggaagatatgcactcagcacgttaacacggacgagtttctgacatcaagaaactcgaatggctgcctcgagtggctaggtgaattattcaggaaatctccggtgcacat

SEQ ID NO: 203081 - DNA, 374 bp, Zea Mays
ggccctctcccttgcaccgtcgacacgattatcggtgagctttgtcgatgtcggaagcgaagctgggaagcaggcgtcgatagtcgagctggtctggggaagggctgctcgcattggacggtttccctctgcgaatcaacaaggagccaggagcatcggatgccatgagtgccaccaagcaccggcgacctacaacatgtgcccttcgtcccaagatcgccaacgacaaatgtattcaactcgtccattgcaagatccaagctcgaaatagagagaagcaaacgaatcgcatcgttggtgtcgtcctcgtctttgattcgaccgagagccccagattgaagtcttgtcaggcaggtgcttggtgtcccatggag

SEQ ID NO: 203082 - DNA, 1864 bp, Zea Mays
tcaactgtgcatctttctttaaactgtttctgagtcgcaatggaattgaatgcaatgatattgaagaattattcatcaaagaccaatcactgagtaatgaaaatgtggacaagattgttggatacgcagtgagttatcaccttaagcacaataaaattgaaacctccaactcgaaggataataaacttgtactcacaagtgaaagccttaagcatgggctcaacatgctgcaaagcatgcaaagtgataacaagagctcgaaaaaatcactgaaggatgttgtcacagagaatgaatttgagaaaaggcttttggtggatgttataccacctaatgacattggagttacctttgatgatattggagccttggagaatgtaaaggacacattaaaggagctggtgatgctccctttacaaagacctgaattgttctgcaaagggcagctaacaaagccttgcaagggaatattgcttttcggacctcctggcactgggaaaactatgcttgccaaagcagtagcaactgaagcaggtgctaatttcatcaatatatcaatgtcgagcattacgtcgaagtggtttggtgaaggggagaagtatgtaaaggctgttttctcactagcaagtaaaatagcccccagtgttatatttatcgatgaggtcgatagtatgctaggaaggagagaaaatccaggggagcatgaagcgatgcgcaagatgaagaatgaatttatggtaaattgggatggactgcgcactaaagataaggagcgtgtgcttgttcttggtgctacaaatagaccttttgacctggacgaggctgtgattaggaggttcccccgcaggttaatggtaaacttgcctgatgcatcaaatagagagaaaattctgaaagtaattttggcaaaagaagagctgggatcggatgttgatctcgactcacttgccaatatgactgatggttattcaggaagcgacctgaagaatctgtgtgtgaccgcagcgcattaccccattcgagaaatcctagagaaggaaaagaaggagaagagtttggctaaaacagaaggtaggccagagcccgcattgtatggaagcgagcacatccgtcctcttagcatagacgacttcaaatccgcccatgagcaggtttgcgcgagcgtttcatccgactcggcaaacatgaacgagcttctccaatggaacgacctgtacggtgaaggcgggtcgaggaagaggaaagcgctgagctacttcatgtgacggcgagagacataaaaccagaaggatcacaaccgcgccataaagccagaaggtatcgcagttgcgccatattgtacagccgccatagtacttcccccctccctggccctaaatccagccagggttttcctcctccctcctgggtagccgtggccgcctgtagtccctccctcgtgtaattagaaccgtgtaccgagtcgagttcatttacccactgtttgaggttccagagagttgagatttaaattttaagtggcgccattgcccttcctttcttcctcccctcctaagtattaactttgttgcggccattgttgtcgtgactctggccatagatccttttatgtacatgcgaaatgtaaccaagggatatggaataagaacatgttcatcctgttgtagacagcatggtggtacaggaattctttttatttttcatagttgattggtgatgaactggatcggtgccagcataagaattatgataaggtaccttttctgccgctgaattttttggtgtatgtcgatttgtcgagtggatttagtattgagatgaatgatatgacatcacatggatttttatgcgtctcatgttgtta

SEQ ID NO: 203083 - DNA, 4277 bp, Zea Mays
aaccaaccaagccgaaagaactctcgctcgaggggtggaaaagaagcggaaggagagacgagacgagaggaaaccctcgcctccgccacacgccatggtggagactcgccggagctcggccgctgcgaagcgcccgtccccgtcgccgtcctcttcgtccgtacctcccccgaagcggcccaaggcggagtctccggggtcaccgacggcctccgcgcccgcgagagcggaggaggattccgtggcgggagcggcacccgcgaggagcgacggctcggccgacgacgcggcggcggcggttgcacagaaagatcaaggagcggataagccttcttccgccgcggccgagagttcaaagaggagaaaggagccggagcaacagcaacccgcagcgccatgggcaaagctgctctcgcagtgctcacagttttctgttggtcaaagcaaaaactgtaatttgtggctgaaagaccagcctgttagcaaggtgctttgcaagctgcggcgccttgagcatggaggtccatgtgagttagaagttcttggaaagaagggtatggtccaattaaatggaaggtccataagttcaggcacaaaagttccccttacaggaggggatgaagtcatattcaattcatgcggcaagcatgcttatatttttcagcatcctttgagtgacaaagctcctaaaacggtgccatcatctgctgttagtcttatagaacctccggttgctagcgtaaagcgcatccgtacagataagagaacaggagacacttctgctattgctggtacagagatgttgccatctacatctaatcaggcaaaggatgtagcagcagcacctcccgcgttcgccggagagaacagccaaagagtaatgctgccaatggcatcatctgcgtctgataaatcaaaagggcacactgtgagccctgataaggaatttgagaatggggaaaatgctaatgaggttaattctaacattgaagactctccaatggatgctgctgcagcccccatatctcctgatgctgctgcgaacgatgcatgtcaacaaaatggctttttgcctgatgctcatcttggtgcggaaatcgctcttgaagatcagagggatctcatcagggatcttaacgcttcagccagtgtgcctccgagtagatgtcaagcctttaaggatgggatgaaacaaggaattattaatccaagtgatattgatgttacctttgaggattttccttattatgtcagtgagaacacaaagaatgtgctcttgtcatgtgcattcatacacttggaaaagaaggagttcatcaagcagtttgctgagatttcatcaataaaccaacgaattttgttatccggtcccgcaggttctgagatttatcaggaaacattggtaaaggcacttgcgaaacattttggtgctagacttcttgtcgtggattcacttttgctacctggggcacctttgaaggatgcagagtcccagaaagatgttgggaaggggtgataaatcaggggataagggaactgctgagaagtttgcaatatatcagaagcatcgttcttcgttggcagacactgttcagttcaggaggcccagctgctccaacttccagtgtgaatgctgatattgtgggaacatccactctgcagtctgcatctctaccgaaacaagaatcctcaacagctacatccaagagctatactttcagagaaggtgatagggtgcgttacgttggtccagctcagctatcctcattgtcacaaaggggaccaagttatggttatcgaggcagagtgatgcttgcttttgaagataatggatcctcaaaaattggagtccgatttgacaagcagatccctgatggtaatgatcttggtggtttgtgcgaggaagatcatggcttcttctgctctgctgaatcacttcgcccagacttttctgctggtgaagaagttgagaggctagctatgaccgagttaatagaggtcatttcagaagagaacaaatctggacctctgattgtgttacttaaggatgtagagaaatcattcactggagttaccgagtcactttcatctttgcggagcaaatttgaatcgcttccatctggtgttcttattataggatcccacactcagatggacagccgcaaagaaaaggcgcatcctggaggttttcttttcacaaagtttgccagtagcagccagacactttttgaccttttcccggatagctttggtagcaggtggttgcatgaaagaagcaaagaaagtccaaaggcaatgaaacatctgaataagcttttcccaaacaagatttcgattcagcttccgcaggatgaagctctacttacagattggaagcagcagttggatcgtgatgttgaaacccttaaagccaaatcaaacattggtagcattcgcacgtttctgagtcgcaatggaattgaatgcaatgatattgaagaattattcatcaaagaccaatcactgagtaatgaaaatgtggacaagattgttggatacgcagtgagttatcaccttaagcacaataaaattgaaacctccaactcgaaggataataaacttgtactcacaagtgaaagccttaagcatgggctcaacatgctgcaaagcatgcaaagtgataacaagagctcgaaaaaatcactgaaggatgttgtcacagagaatgaatttgagaaaaggcttttggtggatgttataccacctaatgacattggagttacctttgatgatattggagccttggagaatgtaaaggacacattaaaggagctggtgatgctccctttacaaagacctgaattgttctgcaaagggcagctaacaaagccttgcaagggaatattgcttttcggacctcctggcactgggaaaactatgcttgccaaagcagtagcaactgaagcaggtgctaatttcatcaatatatcaatgtcgagcattacgtcgaagtggtttggtgaaggggagaagtatgtaaaggctgttttctcactagcaagtaaaatagcccccagtgttatatttatcgatgaggtcgatagtatgctaggaaggagagaaaatccaggggagcatgaagcgatgcgcaagatgaagaatgaatttatggtaaattgggatggactgcgcactaaagataaggagcgtgtgcttgttcttggtgctacaaatagaccttttgacctggacgaggctgtgattaggaggttcccccgcaggttaatggtaaacttgcctgatgcatcaaatagagagaaaattctgaaagtaattttggcaaaagaagagctgggatcggatgttgatctcgactcacttgccaatatgactgatggttattcaggaagcgacctgaagaatctgtgtgtgaccgcagcgcattaccccattcgagaaatcctagagaaggaaaagaaggagaagagtttggctaaaacagaaggtaggccagagcccgcattgtatggaagcgagcacatccgtcctcttagcatagacgacttcaaatccgcccatgagcaggtttgcgcgagcgtttcatccgactcggcaaacatgaacgagcttctccaatggaacgacctgtacggtgaaggcgggtcgaggaagaggaaagcgctgagctacttcatgtgacggcgagagacataaaaccagaaggatcacaaccgcgccataaagccagaaggtatcgcagttgcgccatattgtacagccgccatagtacttcccccctccctggccctaaatccagccagggttttcctcctccctcctgggtagccgtggccgcctgtagtccctccctcgtgtaattagaaccgtgtaccgagtcgagttcatttacccactgtttgaggttccagagagttgagatttaaattttaagtggcgccattgcccttcctttcttcctcccctcctaagtattaactttgttgcggccattgttgtcgtgactctggccatagatccttttatgtacatgcgaaatgtaaccaagggatatggaataagaacatgttcatcctgttgtagacagcatggtggtacaggaattctttttatttttcatagttgattggtgatgaactggatcggtgccagcataagaattatgataaggtaccttttctgccgctgaattttttggtgtatgtcgatttgtcgagtggatttagtattgagatgaatgatatgacatcacatggatttttatgcgtctcatgttgtta

SEQ ID NO: 203084 - DNA, 4141 bp, Zea Mays
cccaacccaaaccaaccaagccgaaagaactctcgctcgaggggtggaaaagaagcggaaggagagacgagacgagaggaaaccctcgcctccgccacacgccatggtggagactcgccggagctcggccgctgcgaagcgcccgtccccgtcgccgtcctcttcgtccgtacctcccccgaagcggcccaaggcggagtctccggggtcaccgacggcctccgcgcccgcgagagcggaggaggattccgtggcgggagcggcacccgcgaggagcgacggctcggccgacgacgcggcggcggcggttgcacagaaagatcaaggagcggataagccttcttccgccgcggccgagagttcaaagaggagaaaggagccggagcaacagcaacccgcagcgccatgggcaaagctgctctcgcagtgctcacagactcctcactatcccatcattgccgctcagttttctgttggtcaaagcaaaaactgtaatttgtggctgaaagaccagcctgttagcaaggtgctttgcaagctgcggcgccttgagcatggaggtccatgtgagttagaagttcttggaaagaagggtatggtccaattaaatggaaggtccataagttcaggcacaaaagttccccttacaggaggggatgaagtcatattcaattcatgcggcaagcatgcttatatttttcagcatcctttgagtgacaaagctcctaaaacggtgccatcatctgctgttagtcttatagaacctccggttgctagcgtaaagcgcatccgtacagataagagaacaggagacacttctgctattgctggtacagagatgttgccatctacatctaatcaggcaaaggatgtagcagcagcacctcccgcgttcgccggagagaacagccaaagagtaatgctgccaatggcatcatctgcgtctgataaatcaaaagggcacactgtgagccctgataaggaatttgagaatggggaaaatgctaatgaggttaattctaacattgaagactctccaatggatgctgctgcagcccccatatctcctgatgctgctgcgaacgatgcatgtcaacaaaatggctttttgcctgatgctcatcttggtgcggaaatcggtaagattgcaacctataagataaggccagttctgaggatgattacaggatcaactatatccgagttcgatttgactggagttcatcaagcagtttgctgagatttcatcaataaaccaacgaattttgttatccggtcccgcaggttctgagatttatcaggaaacattggtaaaggcacttgcgaaacattttggtgctagacttcttgtcgtggattcacttttgctacctggggcacctttgaaggatgcagagtcccagaaagatgttgggaaggggtgataaatcaggggataagggaactgctgagaagtttgcaatatatcagaagcatcgttcttcgttggcagacactgttcagttcaggaggcccagctgctccaacttccagtgtgaatgctgatattgtgggaacatccactctgcagtctgcatctctaccgaaacaagaatcctcaacagctacatccaagagctatactttcagagaaggtgatagggtgcgttacgttggtccagctcagctatcctcattgtcacaaaggggaccaagttatggttatcgaggcagagtgatgcttgcttttgaagataatggatcctcaaaaattggagtccgatttgacaagcagatccctgatggtaatgatcttggtggtttgtgcgaggaagatcatggcttcttctgctctgctgaatcacttcgcccagacttttctgctggtgaagaagttgagaggctagctatgaccgagttaatagaggtcatttcagaagagaacaaatctggacctctgattgtgttacttaaggatgtagagaaatcattcactggagttaccgagtcactttcatctttgcggagcaaatttgaatcgcttccatctggtgttcttattataggatcccacactcagatggacagccgcaaagaaaaggcgcatcctggaggttttcttttcacaaagtttgccagtagcagccagacactttttgaccttttcccggatagctttggtagcaggtggttgcatgaaagaagcaaagaaagtccaaaggcaatgaaacatctgaataagcttttcccaaacaagatttcgattcagcttccgcaggatgaagctctacttacagattggaagcagcagttggatcgtgatgttgaaacccttaaagccaaatcaaacattggtagcattcgcacgtttctgagtcgcaatggaattgaatgcaatgatattgaagaattattcatcaaagaccaatcactgagtaatgaaaatgtggacaagattgttggatacgcagtgagttatcaccttaagcacaataaaattgaaacctccaactcgaaggataataaacttgtactcacaagtgaaagccttaagcatgggctcaacatgctgcaaagcatgcaaagtgataacaagagctcgaaaaaatcactgaaggatgttgtcacagagaatgaatttgagaaaaggcttttggtggatgttataccacctaatgacattggagttacctttgatgatattggagccttggagaatgtaaaggacacattaaaggagctggtgatgctccctttacaaagacctgaattgttctgcaaagggcagctaacaaagccttgcaagggaatattgcttttcggacctcctggcactgggaaaactatgcttgccaaagcagtagcaactgaagcagtggtttggtgaaggggagaagtatgtaaaggctgttttctcactagcaagtaaaatagcccccagtgttatatttatcgatgaggtcgatagtatgctaggaaggagagaaaatccaggggagcatgaagcgatgcgcaagatgaagaatgaatttatggtaaattgggatggactgcgcactaaagataaggagcgtgtgcttgttcttggtgctacaaatagaccttttgacctggacgaggctgtgattaggaggttcccccgcaggttaatggtaaacttgcctgatgcatcaaatagagagaaaattctgaaagtaattttggcaaaagaagagctgggatcggatgttgatctcgactcacttgccaatatgactgatggttattcaggaagcgacctgaagaatctgtgtgtgaccgcagcgcattaccccattcgagaaatcctagagaaggaaaagaaggagaagagtttggctaaaacagaaggtaggccagagcccgcattgtatggaagcgagcacatccgtcctcttagcatagacgacttcaaatccgcccatgagcaggtttgcgcgagcgtttcatccgactcggcaaacatgaacgagcttctccaatggaacgacctgtacggtgaaggcgggtcgaggaagaggaaagcgctgagctacttcatgtgacggcgagagacataaaaccagaaggatcacaaccgcgccataaagccagaaggtatcgcagttgcgccatattgtacagccgccatagtacttcccccctccctggccctaaatccagccagggttttcctcctccctcctgggtagccgtggccgcctgtagtccctccctcgtgtaattagaaccgtgtaccgagtcgagttcatttacccactgtttgaggttccagagagttgagatttaaattttaagtggcgccattgcccttcctttcttcctcccctcctaagtattaactttgttgcggccattgttgtcgtgactctggccatagatccttttatgtacatgcgaaatgtaaccaagggatatggaataagaacatgttcatcctgttgtagacagcatggtggtacaggaattctttttatttttcatagttgattggtgatgaactggatcggtgccagcataagaattatgataaggtaccttttctgccgctgaattttttggtgtatgtcgatttgtcgagtggatttagtattgagatgaatgatatgacatcacatggatttttatgcgtctcatgttgtta

SEQ ID NO: 203085 - DNA, 4303 bp, Zea Mays
ccccaccccaacccaaaccaaccaagccgaaagaactctcgctcgaggggtggaaaagaagcggaaggagagacgagacgagaggaaaccctcgcctccgccacacgccatggtggagactcgccggagctcggccgctgcgaagcgcccgtccccgtcgccgtcctcttcgtccgtacctcccccgaagcggcccaaggcggagtctccggggtcaccgacggcctccgcgcccgcgagagcggaggaggattccgtggcgggagcggcacccgcgaggagcgacggctcggccgacgacgcggcggcggcggttgcacagaaagatcaaggagcggataagccttcttccgccgcggccgagagttcaaagaggagaaaggagccggagcaacagcaacccgcagcgccatgggcaaagctgctctcgcagtgctcacagactcctcactatcccatcattgccgctcagttttctgttggtcaaagcaaaaactgtaatttgtggctgaaagaccagcctgttagcaaggtgctttgcaagctgcggcgccttgagcatggaggtccatgtgagttagaagttcttggaaagaagggtatggtccaattaaatggaaggtccataagttcaggcacaaaagttccccttacaggaggggatgaagtcatattcaattcatgcggcaagcatgcttatatttttcagcatcctttgagtgacaaagctcctaaaacggtgccatcatctgctgttagtcttatagaacctccggttgctagcgtaaagcgcatccgtacagataagagaacaggagacacttctgctattgctggtacagagatgttgccatctacatctaatcaggcaaaggatgtagcagcagcacctcccgcgttcgccggagagaacagccaaagagtaatgctgccaatggcatcatctgcgtctgataaatcaaaagggcacactgtgagccctgataaggaatttgagaatggggaaaatgctaatgaggttaattctaacattgaagactctccaatggatgctgctgcagcccccatatctcctgatgctgctgcgaacgatgcatgtcaacaaaatggctttttgcctgatgctcatcttggtgcggaaatcgctcttgaagatcagagggatctcatcagggatcttaacgcttcagccagtgtgcctccgagtagatgtcaagcctttaaggatgggatgaaacaaggaattattaatccaagtgatattgatgttacctttgaggattttccttattatgtcagtgagaacacaaagaatgtgctcttgtcatgtgcattcatacacttggaaaagaaggagttcatcaagcagtttgctgagatttcatcaataaaccaacgaattttgttatccggtcccgcaggttctgagatttatcaggaaacattggtaaaggcacttgcgaaacattttggtgctagacttcttgtcgtggattcacttttgctacctggggcacctttgaaggatgcagagtcccagaaagatgttgggaaggggtgataaatcaggggataagggaactgctgagaagtttgcaatatatcagaagcatcgttcttcgttggcagacactgttcagttcaggaggcccagctgctccaacttccagtgtgaatgctgatattgtgggaacatccactctgcagtctgcatctctaccgaaacaagaatcctcaacagctacatccaagagctatactttcagagaaggtgatagggtgcgttacgttggtccagctcagctatcctcattgtcacaaaggggaccaagttatggttatcgaggcagagtgatgcttgcttttgaagataatggatcctcaaaaattggagtccgatttgacaagcagatccctgatggtaatgatcttggtggtttgtgcgaggaagatcatggcttcttctgctctgctgaatcacttcgcccagacttttctgctggtgaagaagttgagaggctagctatgaccgagttaatagaggtcatttcagaagagaacaaatctggacctctgattgtgttacttaaggatgtagagaaatcattcactggagttaccgagtcactttcatctttgcggagcaaatttgaatcgcttccatctggtgttcttattataggatcccacactcagatggacagccgcaaagaaaaggcgcatcctggaggttttcttttcacaaagtttgccagtagcagccagacactttttgaccttttcccggatagctttggtagcaggtggttgcatgaaagaagcaaagaaagtccaaaggcaatgaaacatctgaataagcttttcccaaacaagatttcgattcagcttccgcagattggaagcagcagttggatcgtgatgttgaaacccttaaagccaaatcaaacattggtagcattcgcacgtttctgagtcgcaatggaattgaatgcaatgatattgaagaattattcatcaaagaccaatcactgagtaatgaaaatgtggacaagattgttggatacgcagtgagttatcaccttaagcacaataaaattgaaacctccaactcgaaggataataaacttgtactcacaagtgaaagccttaagcatgggctcaacatgctgcaaagcatgcaaagtgataacaagagctcgaaaaaatcactgaaggatgttgtcacagagaatgaatttgagaaaaggcttttggtggatgttataccacctaatgacattggagttacctttgatgatattggagccttggagaatgtaaaggacacattaaaggagctggtgatgctccctttacaaagacctgaattgttctgcaaagggcagctaacaaagccttgcaagggaatattgcttttcggacctcctggcactgggaaaactatgcttgccaaagcagtagcaactgaagcaggtgctaatttcatcaatatatcaatgtcgagcattacgtcgaagtggtttggtgaaggggagaagtatgtaaaggctgttttctcactagcaagtaaaatagcccccagtgttatatttatcgatgaggtcgatagtatgctaggaaggagagaaaatccaggggagcatgaagcgatgcgcaagatgaagaatgaatttatggtaaattgggatggactgcgcactaaagataaggagcgtgtgcttgttcttggtgctacaaatagaccttttgacctggacgaggctgtgattaggaggttcccccgcaggttaatggtaaacttgcctgatgcatcaaatagagagaaaattctgaaagtaattttggcaaaagaagagctgggatcggatgttgatctcgactcacttgccaatatgactgatggttattcaggaagcgacctgaagaatctgtgtgtgaccgcagcgcattaccccattcgagaaatcctagagaaggaaaagaaggagaagagtttggctaaaacagaaggtaggccagagcccgcattgtatggaagcgagcacatccgtcctcttagcatagacgacttcaaatccgcccatgagcaggtttgcgcgagcgtttcatccgactcggcaaacatgaacgagcttctccaatggaacgacctgtacggtgaaggcgggtcgaggaagaggaaagcgctgagctacttcatgtgacggcgagagacataaaaccagaaggatcacaaccgcgccataaagccagaaggtatcgcagttgcgccatattgtacagccgccatagtacttcccccctccctggccctaaatccagccagggttttcctcctccctcctgggtagccgtggccgcctgtagtccctccctcgtgtaattagaaccgtgtaccgagtcgagttcatttacccactgtttgaggttccagagagttgagatttaaattttaagtggcgccattgcccttcctttcttcctcccctcctaagtattaactttgttgcggccattgttgtcgtgactctggccatagatccttttatgtacatgcgaaatgtaaccaagggatatggaataagaacatgttcatcctgttgtagacagcatggtggtacaggaattctttttatttttcatagttgattggtgatgaactggatcggtgccagcataagaattatgataaggtaccttttctgccgctgaattttttggtgtatgtcgatttgtcgagtggatttagtattgagatgaatgatatgacatcacatggatttttatgcgtctcatgttgtta

SEQ ID NO: 203086 - DNA, 4749 bp, Zea Mays
ccccaccccaacccaaaccaaccaagccgaaagaactctcgctcgaggggtggaaaagaagcggaaggagagacgagacgagaggaaaccctcgcctccgccacacgccatggtggagactcgccggagctcggccgctgcgaagcgcccgtccccgtcgccgtcctcttcgtccgtacctcccccgaagcggcccaaggcggagtctccggggtcaccgacggcctccgcgcccgcgagagcggaggaggattccgtggcgggagcggcacccgcgaggagcgacggctcggccgacgacgcggcggcggcggttgcacagaaagatcaaggagcggataagccttcttccgccgcggccgagagttcaaagaggagaaaggagccggagcaacagcaacccgcagcgccatgggcaaagctgctctcgcagtgctcacagactcctcactatcccatcattgccgctcagttttctgttggtcaaagcaaaaactgtaatttgtggctgaaagaccagcctgttagcaaggtgctttgcaagctgcggcgccttgagcatggaggtccatgtgagttagaagttcttggaaagaagggtatggtccaattaaatggaaggtccataagttcaggcacaaaagttccccttacaggaggggatgaagtcatattcaattcatgcggcaagcatgcttatatttttcagcatcctttgagtgacaaagctcctaaaacggtgccatcatctgctgttagtcttatagaacctccggttgctagcgtaaagcgcatccgtacagataagagaacaggagacacttctgctattgctggtacagagatgttgccatctacatctaatcaggcaaaggatgtagcagcagcacctcccgcgttcgccggagagaacagccaaagagtaatgctgccaatggcatcatctgcgtctgataaatcaaaagggcacactgtgagccctgataaggaatttgagaatggggaaaatgctaatgaggttaattctaacattgaagactctccaatggatgctgctgcagcccccatatctcctgatgctgctgcgaacgatgcatgtcaacaaaatggctttttgcctgatgctcatcttggtgcggaaatcggtaagattgcaacctataagataaggccagttctgaggatgattacaggatcaactatatccgagttcgatttgactggtgatctttttaaagctcttgaagatcagagggatctcatcagggatcttaacgcttcagccagtgtgcctccgagtagatgtcaagcctttaaggatgggatgaaacaaggaattattaatccaagtgatattgatgttacctttgaggattttccttattatgtcaggtgatatgctttggattcatgttccctcgctgctttgaaattattctgtttttgcaagattcttatcatgctatctatttgaagttttgcatatgcatctgttatttatacactacataaaaatctaatgcaacttgtctattcttcttcggttagttttgaggttgccaacaatggtgtatgcttagttcttagattatagaaattggttggttaagtttttcttaattctatgtaaggggctgtctgcagtccaaccttggaatgcaacttgatatttctttttagtttcatgtccatatctttgtattttatcagttctcatctgatgcagtgagaacacaaagaatgtgctcttgtcatgtgcattcatacacttggaaaagaaggagttcatcaagcagtttgctgagatttcatcaataaaccaacgaattttgttatccggtcccgcaggttctgagatttatcaggaaacattggtaaaggcacttgcgaaacattttggtgctagacttcttgtcgtggattcacttttgctacctggggcacctttgaaggatgcagagtcccagaaagatgttgggaaggggtgataaatcaggggataagggaactgctgagaagtttgcaatatatcagaagcatcgttcttcgttggcagacactgttcagttcaggaggcccagctgctccaacttccagtgtgaatgctgatattgtgggaacatccactctgcagtctgcatctctaccgaaacaagaatcctcaacagctacatccaagagctatactttcagagaaggtgatagggtgcgttacgttggtccagctcagctatcctcattgtcacaaaggggaccaagttatggttatcgaggcagagtgatgcttgcttttgaagataatggatcctcaaaaattggagtccgatttgacaagcagatccctgatggtaatgatcttggtggtttgtgcgaggaagatcatggcttcttctgctctgctgaatcacttcgcccagacttttctgctggtgaagaagttgagaggctagctatgaccgagttaatagaggtcatttcagaagagaacaaatctggacctctgattgtgttacttaaggatgtagagaaatcattcactggagttaccgagtcactttcatctttgcggagcaaatttgaatcgcttccatctggtgttcttattataggatcccacactcagatggacagccgcaaagaaaaggcgcatcctggaggttttcttttcacaaagtttgccagtagcagccagacactttttgaccttttcccggatagctttggtagcaggtggttgcatgaaagaagcaaagaaagtccaaaggcaatgaaacatctgaataagcttttcccaaacaagatttcgattcagcttccgcaggatgaagctctacttacagattggaagcagcagttggatcgtgatgttgaaacccttaaagccaaatcaaacattggtagcattcgcacgtttctgagtcgcaatggaattgaatgcaatgatattgaagaattattcatcaaagaccaatcactgagtaatgaaaatgtggacaagattgttggatacgcagtgagttatcaccttaagcacaataaaattgaaacctccaactcgaaggataataaacttgtactcacaagtgaaagccttaagcatgggctcaacatgctgcaaagcatgcaaagtgataacaagagctcgaaaaaatcactgaaggatgttgtcacagagaatgaatttgagaaaaggcttttggtggatgttataccacctaatgacattggagttacctttgatgatattggagccttggagaatgtaaaggacacattaaaggagctggtgatgctccctttacaaagacctgaattgttctgcaaagggcagctaacaaagccttgcaagggaatattgcttttcggacctcctggcactgggaaaactatgcttgccaaagcagtagcaactgaagcaggtgctaatttcatcaatatatcaatgtcgagcattacgtcgaagtggtttggtgaaggggagaagtatgtaaaggctgttttctcactagcaagtaaaatagcccccagtgttatatttatcgatgaggtcgatagtatgctaggaaggagagaaaatccaggggagcatgaagcgatgcgcaagatgaagaatgaatttatggtaaattgggatggactgcgcactaaagataaggagcgtgtgcttgttcttggtgctacaaatagaccttttgacctggacgaggctgtgattaggaggttcccccgcaggttaatggtaaacttgcctgatgcatcaaatagagagaaaattctgaaagtaattttggcaaaagaagagctgggatcggatgttgatctcgactcacttgccaatatgactgatggttattcaggaagcgacctgaagaatctgtgtgtgaccgcagcgcattaccccattcgagaaatcctagagaaggaaaagaaggagaagagtttggctaaaacagaaggtaggccagagcccgcattgtatggaagcgagcacatccgtcctcttagcatagacgacttcaaatccgcccatgagcaggtttgcgcgagcgtttcatccgactcggcaaacatgaacgagcttctccaatggaacgacctgtacggtgaaggcgggtcgaggaagaggaaagcgctgagctacttcatgtgacggcgagagacataaaaccagaaggatcacaaccgcgccataaagccagaaggtatcgcagttgcgccatattgtacagccgccatagtacttcccccctccctggccctaaatccagccagggttttcctcctccctcctgggtagccgtggccgcctgtagtccctccctcgtgtaattagaaccgtgtaccgagtcgagttcatttacccactgtttgaggttccagagagttgagatttaaattttaagtggcgccattgcccttcctttcttcctcccctcctaagtattaactttgttgcggccattgttgtcgtgactctggccatagatccttttatgtacatgcgaaatgtaaccaagggatatggaataagaacatgttcatcctgttgtagacagcatggtggtacaggaattctttttatttttcatagttgattggtgatgaactggatcggtgccagcataagaattatgataaggtaccttttctgccgctgaattttttggtgtatgtcgatttgtcgagtggatttagtattgagatgaatgatatgacatcacatggatttttatgcgtctcatgttgtta

SEQ ID NO: 203087 - DNA, 2452 bp, Zea Mays
gccgcatcccgcccgaggccttccttcaatggcgcatggaaggtcgtctgttattaattggtgcggccacggacgacaccatggctccgcccgacgccccctctccccgcaactcgcaagcccgagattgtcggcgttctcgcacccaccgatttggcctgcttcccccaggattgccgacgttctcccccctccccgtcgcgccgcgcgatgccagtcgtgattcccgcgtccgcccgccccacatctacaaacttgctctgcagatgccctcccgcccatcgtcatccatcccctgtcgccgccacggacgaccttcctcggccgccaccagggggcttctgtaagcgagcgcgcaaggggagttgtaggcgagcgcgcaggggggcccgcacacgacgacgcccgcgaggatgctggaggacgaagagctgcagcgcggacaaccatgaatccgagaacaccgcgagcacggagagctgcggcgggcgcggtggcgccgtcttggggctcttgttcacggggaagacggaggggtggatggacgcgagcaatgcggcggcctcgttgtacgcctggttgggccgcttccgcggcgcgcgagcccacttgagcgacaccgacgtctccgacgatgatgaggcgttggacacctctgacgacagcgtcgacgacggcaacgagtagtgcgtcgggcacaacggtgacgagtgcgcgcccaccggtgacgccgccgccttcaccatgtccaggtccagccgcaggccggtcggtatgcaggaagacgactttgcaccgcctcaggcacgcaacagaaacggaggaggcgatgcggcgccgtctcgcccgtcaaccgacggtcgcaccaatgagttccacgccgccacgctgcaccttcctcatcgtcggtgtcctcctcgaacctgggcacttgacatctaagagtgatgtttatagcttcggagttgtgctactcgagatgttgactgggagaagatcaatggacaagaagcggcctacgggggagcagaacctggttgcatgggcaaggccttacctaaatgatcggcgaaggctctatcagcttgtagatcctcgcttggggctgaactactctgtcaaaggggtgcaaaaggtcgctcagatctgccactactgccttacccgtgatagtaagtctcgcccatcaatggatgaagttgtcaagcaactcacaccattacaagatctaaacgacatggcatctgcatcgccaaggcctcgctcaactcagcgcggaaaggtgcatcgatgacaacctggttctgttgtaagaagagcagtgtggtcctggttgcttgatgcttgtttggtttaattgtatagcaaaattaggtgttgatctcttttgtttgatgccaactggtggtggaaagtccatgtgctatcaaatttcagctctgcatttattatgcagatgtctatattaacagttccttgatttgaaaaaactgctaaccggcactgatggagaaccagattgccagcttgaaaaataaagggactatagctgaattcctctcttcaacataggcatctcacactaaacaaagggtatggtccccacatggtacaaagtaatgctctgctgggatagctcaattgatgcgtaaattttggaccctcctgtaatcatttcaactgacatcatagccccaacttgtaccaactgatactctgagatttagaatttttacttttgtttctgaactagccacgtcatgtgtgacgtggcgctgcagaaggacctgcttagggagattgccaagaaagaagagcatcgatgagatgatgcaattccctggttgcattgttctcatcattagcctcctgaaaccagagtccattcctgcctacaaaagcagccacaagtctcctgcgtaacattacgtcagttcacatatatagagtggagcaatggaagaaatcattagccttcactgtaaatgtacaataatccctgaggcagctattttctgggtcaagcatggagtttgatttgatgggacctatcatgacacattctcgggatctaataatcagaggcatgatcgttttgattggatgctttattttttcctcatatagctttgtgggtttgtatgttggagttagctgaaaatattaatgattttaccatgtatttggccatttgttctgtcagatgggctcacatattctataaggattcttctcgagttggcaatcagaaactgtgataatttccttggactgggagagaagtgcactgaaacaagtcaaaatctcattcaagcgcgcctgtatcctctaggttgctaggcattgtggatgatgatcatgttgaattgaataaccttcatcgacagttgggacacatgactcatccattgatgtgctgcactaaaaaatatggggatggcgttcaccggcc

SEQ ID NO: 203088 - DNA, 1897 bp, Zea Mays
attggtgcggccacggacgacaccatggctccgcccgacgccccctctccccgcaactcgcaagcccgagattgtcggcgttctcgcacccaccgatttggcctgcttcccccaggattgccgacgttctcccccctccccgtcgcgccgcgcgatgccagtcgtgattcccgcgtccgcccgccccacatctacaaacttgctctgcagatgccctcccgcccatcgtcatccatcccctgtcgccgccacggacgaccttcctcggccgccaccagggggcttctgtaagcgagcgcgcaaggggagttgtaggcgagcgcgcaggggggcccgcacacgacgacgcccgcgaggatgctggaggacgaagagctgcagcgcggacaaccatgaatccgagaacaccgcgagcacggagagctgcggcgggcgcggtggcgccgtcttggggctcttgttcacggggaagacggaggggtggatggacgcgagcaatgcggcggcctcgttgtacgcctggttgggccgcttccgcggcgcgcgagcccacttgagcgacaccgacgtctccgacgatgatgaggcgttggacacctctgacgacagcgtcgacgacggcaacgagtagtgcgtcgggcacaacggtgacgagtgcgcgcccaccggtgacgccgccgccttcaccatgtccaggtccagccgcaggccggtcggtatgcaggaagacgactttgcaccgcctcaggcacgcaacagggcacttgacatctaagagtgatgtttatagcttcggagttgtgctactcgagatgttgactgggagaagatcaatggacaagaagcggcctacgggggagcagaacctggttgcatgggcaaggccttacctaaatgatcggcgaaggctctatcagcttgtagatcctcgcttggggctgaactactctgtcaaaggggtgcaaaaggtcgctcagatctgccactactgccttacccgtgatagtaagtctcgcccatcaatggatgaagttgtcaagcaactcacaccattacaagatctaaacgacatggcatctgcatcgccaaggcctcgctcaactcagcgcggaaaggtgcatcgatgacaacctggttctgttgtaagaagagcagtgtggtcctggttgcttgatgcttgtttggtttaattgtatagcaaaattaggtgttgatctcttttgtttgatgccaactggtggtggaaagtccatgtgctatcaaatttcagctctgcatttattatgcagatgtctatattaacagttccttgatttgaaaaaactgctaaccggcactgatggtaagatttattagctatagttccccttctgttcatcttcatatgtcatggaacattagctctgcatatgaaattttcaggagaaccagattgccagcttgaaaaataaagggactatagctgaattcctctcttcaacataggcatctcacactaaacaaaggatgggctcacatattctataaggattcttctcgagttggcaatcagaaactgtgataatttccttggactgggagagaagtgcactgaaacaagtcaaaatctcattcaagcgcgcctgtatcctctaggttgctaggcattgtggatgatgatcatgttgaattgaataaccttcatcgacaggctgcttggatcctaagaacttcatgaagttaaaacttgttgaaaagaaacaattaagttataattttgccaggatcaaattcactcttccaactccaagttctatattgggccttccaatcgatcaacatatcagttgcagttgggacacatgactcatccattgatgtgctgcactaaaaaatatggggatggcgttcaccggcc

SEQ ID NO: 203089 - DNA, 1013 bp, Zea Mays
gctgcaccttcctcatcgtcggtgtcctcctcgaacctgggcacttgacatctaagagtgatgtttatagcttcggagttgtgctactcgagatgttgactgggagaagatcaatggacaagaagcggcctacgggggagcagaacctggttgcatgggcaaggccttacctaaatgatcggcgaaggctctatcagcttgtagatcctcgcttggggctgaactactctgtcaaaggggtgcaaaaggtcgctcagatctgccactactgccttacccgtgatagtaagtctcgcccatcaatggatgaagttgtcaagcaactcacaccattacaagatctaaacgacatggcatctgcatcgccaaggcctcgctcaactcagcgcggaaaggtgcatcgatgacaacctggttctgttgtaagaagagcagtgtggtcctggttgcttgatgcttgtttggtttaattgtatagcaaaattaggtgttgatctcttttgtttgatgccaactggtggtggaaagtccatgtgctatcaaatttcagctctggtgaaaacatgcattgttcttgtcatttcatctatgataggtcacaggttgctaggcattgtggatgatgatcatgttgaattgaataaccttcatcgacaggtccatgataaattagcttgtattgttgagatggagaaaaagaatgcaagtttggtgtgggtgtccacagggtgcgccatgcctccgccccctgtccgcgacgctgaccgtgacccaggattctcgcttctccgtccacgtccaatctaagtccttttcatttatcctcaacatggctgaagattacattcatgtttttttctttcctgattacagtagttgatattggtctgcttggaggtacttccagtcattttgcaaactatgatccccccatatgaagttgaggctactgaaagattctatgttttctaaagctcagacaaccataaaaaactacgggtttatgcaatatg

SEQ ID NO: 203090 - DNA, 3004 bp, Zea Mays
gttgattggcgatgggacgatggaatcgaaactgtcgtcgtgggtgatcgttcaatacatccaaaataggaggagcgacgtgggaaagcgccccgcgtcctcctctccatttcgctctgtcgtccagggacagggaggcagggaagggatgctgctctccgtccctccctcccccgccacctgagcccgcccccccaaaaaaaagttttaaccaaccaaacccaccaccacctgcctgcgcgattcccatcccaccccaattaacccggaagaagagctcgcaacgcccccggtgggatcgccggacacctacgcgggcctcgccttgaaatccctgttggaaaccgaggaggatcatgtcgcgggtggcgtcgttgtcgccgtccttatcgggcgacgaggtggaggtggaggaggaagacgacgagggcgtcgacgggtaccgcaagggcggctaccacgccgtacgccccggggaccagttcgccgccggccgctacgtcgctcagcggaagctcggatggggcaacttctccaccgtctggctcgccttcgacgtccaatcacagagatacgtggccctgaagatccaaaagagtgcgcctgagtttgcgcaagctgctcttcatgaaatcgagttcctatcagagatcaccaagagggacccgttgaactgcaaatgcaccattcagctgatagatcacttcaagcacacggggccgaacgggcagcatatctgcctcgtctttgagttactgggagatagcttgcttaagctggtacagtacaaccggtacaaaggcatcgggttcgatagggtgaggcaaatatgcaagtcgattttggtaggtcttgattacttgcacaatgagcttggcatcatccattcagatttgaagcttgagaacattctccttgtctccacaattgatccctccaaggaccccattcgctctgggcttaaacctaaccttgagaggcctgaggggtaccctaacggtgaggctggtcttaacgcgattgagaataagctaaagatgagagcaaggagggtgcttgcaaagcttgctgagaaaagaaaatcagctgtggaatcttcacgctcagaaaggagcttggatggaattgatctgacatgcaagattgtggactttgggaatgcttgctgggctgacaagcaatttacagattttattcagacaaggcagtatcgggcgccagagatcattctaggtgcaggatactcgttttctgttgacatgtggtccttcgcatgtattgcttttgagctcgcaacaggagaaatactatttacacccaaggaaggccatggatacagtgaagatgaggatcacttggctttaatgatggaactacttggcaagatgccgaagaagattgcaaccatgggaacacgatcaaaggaatattttgaccgccatggagatctgaagcggatacgaaggctgaaattgtcatccattgaacgtgttctcgttgacaaatacaaaatttctgaatctgatgcccgggaattcgccaattttctttgccctttactcgactttgcaccagagaagaggccaacagctttagattgcctaaagcatccatggcttaaacatgacgaggataaaacatgtgggtctcttaacaataatgatgccaagagcattgatctggtccaaagcacagggagtatcaccaccgttgactgtacaaatattgatttgacgagcaaaaaaggcagctccactggaacttgtgataagactgttgatgcaaaatacaacacaagaagcattaccagcaatgctaccatgaacacttatgtacaacccacttctggaagttttgccaacagacttgcgaaaaatgttgatgtaaatccgaacattggatccatcagtaatagagatgccaagagttctgatatgaaggcccacatgggaagcaacaccatcagtgacgccaaaagctctattgtaaagctagatacaggtaacatcactgatagaaatgccaaacctgtcgatataaaacccaactctgacaacatctccagcagagatgacaagagcagtaatgtggatactaccacttcctgtgttgtaaagaaagacgtgaagcacagcattagaagtgttgttaattcttatatcaagaactttgatgcaaaatgcaacactgcaagcactgctaacagtgatgctagtaactcatcagaaataaaacccagcactagaatttttaccagtactgataatgccaagtgtatggacataaaaccgatcagcgaaagtgctaagagcaatgacaccagtgctaagagcaatgacaccatcaatgctaatgtgaaatccaacactggaattgttgcaaacactgatgccaagagcactgatgaacagactaacactggaagtgttgacagcagcggtgattacagcgctgactcaaaacaaaacattggccgggttgctgcaagcatacagaggttggagagcagcatgagtaaagtgcaaatcgggaaatacagattgaggatctggcaggtaccagctggcgttattgtatatctctctattcccgctaactgtacaaaactttgtatttgcacacagaatgtacacggagtggtagagaatatcgctgttccttttatggtggatgcactggaaagggaagaattgtactctgaccagccacagcatctcttttgatcatgtccatattctgctgtcagtgaaaaaagagatttcattatgtcatttaacacggatcaccaattatgtgagcaggggtgtctgacattttttgtttggtttatggtttgagatttgcatgtaaaaagtgggacatgtgttgtataaaactattctttgatgttcatttcatggtgaacgatcatatagatggaaacttttcactttagccttgttcggttacaagggatgaaatcccaccatggatttaatctaggtctagatggagtaaatccata

SEQ ID NO: 203091 - DNA, 3706 bp, Zea Mays
gcctctctcccgcacgcccccgccccgaagacctcgcgacgccaaaaaggaggagagaccgccacccccacgcccgcacggcccactcagcgctctccacccccgtcccctcgcggcggcggcggagcccgagcctgagtcctgcccccccgggctaggttggtctccgcctccgccctccagtctctttggcacaacctgcagccgctggcgcaggtggacatggatctgccaagcctcgccgtcgtgctgcgcgccgcgctcagtcacgttcctgaggagcgcaaagctgcagaggagagtctcaaccagttccagttcacaccacagcatttggtgagattgttacagatcattgtcgatggaagttgtgatatggctgtaagacaggttgcaagcattcatttcaagaattttattgcgaaaaactggtcacccaatgatccagatgagtctccgaaagttttggaaagtgacaaggccatggttcgtgaaaacgtacttggttttattgttcaagtgccccctttgttaagagcccagcttggagaaagtatcaaaacaattattcattctgattatcctgagcagtggccaagtctccttcactgggtttcacacaacatagacttacagaatcaaatttttggtgctttatatgtcctaagggttcttgccagaaaatatgaaaaaatcctggctacgcctctgaaggcaaccaagttggagattccgaagcaactatttgatccaaatgtcttcaatgcatggatggttttgtttataaacttgttggaaaggccagttcctgtggaaggccaaccaatggatcctgagattaggaaatcttgggcctggtggaaagttaagaaatggactatccatatcctgaaccgtctctacaccagattcggtgatctgaagcttcagaaaccagagagtaaagctttcgctcaaatgtttcagaagacttatgcaggaaaaatattggcatgccacatgcagctgctgaatgcaattcgtagtggtgattacttgccagatagggttatcaatcttgttcttcagtatctaactaacagtgttacaaagaacagtatgtatcagatgatgcagcctcagattgatatacttctttttgagataatttttcctcttatgtgcttcaatgacaatgaccaaaagttatgggaagaagatccccatgaatatgttcgcaagggctatgatatcatcgaagatttgtacagtccccgaacagctgctatggactttgtgagtgaattgattagaaagcgagggaaaaacaatctccaaaagttcatccatttcattgtggatatttttaggaggtatgatgaagcacctgctgatcttaagccatatcgccaaaaagatggtgctcttctcgctattgggacactctgtgataaactgaagcaaacagatccatataaaacagagcttgagagcagcatgggttgctgggcagtatgcccatatcaacttttcagaccagaacaattttcgtcaggctatgcactgtatgtctcaggaatgcgtgatccagatcttcctgtgagggttgattcggtctttgcacttcgttgttttgttgaagcttgcaaagatttaaatgagatccgacctatacttcctcagctccttgatgaattttttaagctgatgaatgaggttgagaatgaggatcttgtattcaccctagaaaccattgttgacaaatttggcgaagagatggcaccttatgcactaggtttgtgccagaatttggctgctgctttctggagatgtatggctagttcagaagctgatgatgaagctgatgattctggtgctttggcagctgttggttgcttacgagcaattagcacaattcttgagtccataagcagcctcccacatctttttctgcaaatagaacctacattgttacctataatgcgcaggatgttgacatctgatggccaagatgtttatgaagaagttcttgaaattgtttcctatatgacatttttctcacctacaatttcactggacatgtggagcttgtggccactgatgatggaagcgcttaatgactgggctatagatttctttgagaatattcttgttccactggacaactacatttctcggggaactgatatctttcttgcaagcaaagatccagattaccagcaaagcctgtgggatgcactacaatctataatgatggacgaaaacatggaagattctgatattgaacctgctcccaagctcattgaagttgtttttcaaaattgcaaaggcaacgtggatcagtgggttgagcactacctcaggattacaattgcacggttacgtagagcacagaaaccatacttgaaatgcctccttgtacaagtgatcgctaatgcgctctactacaatcctgcgctgacccttgaatctttaaataaacttggggttgcagctgacatttttaaccattggtttgctatgctacaacaagttaaaaaaagtggagcacgggttaatttcaagagggagcatgataagaaagtttgctgcttgggcctgacctctcttatcgcgcttccagctgataagattccagcagaagctttggatcggatcttcaaagcaacacttgagcttcttgttgcttacaaggaccaagttgcagaagctaagaaggaaaatgaagaggctgctgatgatatggatggttttgatgctgatgaagaagatgatgatgaagttgactccgataaggagatgggtgttgatgatgaagacggggatgaaataagcagtcttcagctgcaaaaattagctgcagaggctagaggcttccaaccagccgacgaggatgatgactcagatgatgatttcagtgacgatgaggagctacactcaccaatagatgaggtggatccgttcattttctttgtagaaactgttcaagctttgcaggcatctgatcctgccaggttccagaaccttatgcagacattggatttccgttatcaggcgcttgctagtggcataggacaacatgccgagcaaagaaaaattgaaattgagagagagaaatctgagaaggcaaatgcacagtgacataataaatcatttctggccgcccttgtttttgccattttgccagtataagccattggtgtctggtcaattccctgtgatttgcaggtcgctggtatgagttttgcagccttagccaacctttaagggtaggacaattttaggctcgcaaaattctatccttgtgaggaagcatcttggataatctgtcacgtcggccatgttcttcgtggcctgttgttgccgtcttggttgcgcaagaaagtttctctcgaggacagttgctccgtcttgttgaatttttttttgggggggggcttgtaagagcatttgttatagaaactcacctcaggtggtggggttgcattctccgagttgtcaaagtttattactggttcggagtagattgtatatggtttcggttggtaagacaacggttgtacgagctgcggtatatgtttttttttgtcaacaggacattgtaattgggttttgttctttggtcggcgagagcaagaaaaattggcattgttctgcggagttaccttgtttggtttcattgtccacttgcctgtgttgcaaaattatataatgttatagaaattgg

SEQ ID NO: 203092 - DNA, 3835 bp, Zea Mays
gcctctctcccgcacgcccccgccccgaagacctcgcgacgccaaaaaggaggagagaccgccacccccacgcccgcacggcccactcagcgctctccacccccgtcccctcgcggcggcggcggagcccgagcctgagtcctgcccccccgggctaggttggtctccgcctccgccctccagtctctttggcacaacctgcagccgctggcgcaggtggacatggatctgccaagcctcgccgtcgtgctgcgcgccgcgctcagtcacgttcctgaggagcgcaaagctgcagaggagagtctcaaccagttccagttcacaccacagcatttggtgagattgttacagatcattgtcgatggaagttgtgatatggctgtaagacaggttgcaagcattcatttcaagaattttattgcgaaaaactggtcacccaatgatccagatgagtctccgaaagttttggaaagtgacaaggccatggttcgtgaaaacgtacttggttttattgttcaagtgccccctttgttaagagcccagcttggagaaagtatcaaaacaattattcattctgattatcctgagcagtggccaagtctccttcactgggtttcacacaacatagacttacagaatcaaatttttggtgctttatatgtcctaagggttcttgccagaaaatatgagttcaagtctgaggatgagaggatacctttatatcacattgtagaggagacatttcctcgtctactaagcatttttagcaaattggttcagattgtcaatccaccaattgaagttgctgatttaatcaagttgatatgtaaaatattttggtcatcaatttatttggagattccgaagcaactatttgatccaaatgtcttcaatgcatggatggttttgtttataaacttgttggaaaggccagttcctgtggaaggccaaccaatggatcctgagattaggaaatcttgggcctggtggaaagttaagaaatggactatccatatcctgaaccgtctctacaccagattcggtgatctgaagcttcagaaaccagagagtaaagctttcgctcaaatgtttcagaagacttatgcaggaaaaatattggcatgccacatgcagctgctgaatgcaattcgtagtggtgattacttgccagatagggttatcaatcttgttcttcagtatctaactaacagtgttacaaagaacagtatgtatcagatgatgcagcctcagattgatatacttctttttgagataatttttcctcttatgtgcttcaatgacaatgaccaaaagttatgggaagaagatccccatgaatatgttcgcaagggctatgatatcatcgaagatttgtacagtccccgaacagctgctatggactttgtgagtgaattgattagaaagcgagggaaaaacaatctccaaaagttcatccatttcattgtggatatttttaggaggtatgatgaagcacctgctgatcttaagccatatcgccaaaaagatggtgctcttctcgctattgggacactctgtgataaactgaagcaaacagatccatataaaacagagcttgagagcagcatgggttgctgggcagtatgcccatatcaacttttcagaccagaacaattttcgtcaggctatgcactgtatgtctcaggaatgcgtgatccagatcttcctgtgagggttgattcggtctttgcacttcgttgttttgttgaagcttgcaaagatttaaatgagatccgacctatacttcctcagctccttgatgaattttttaagctgatgaatgaggttgagaatgaggatcttgtattcaccctagaaaccattgttgacaaatttggcgaagagatggcaccttatgcactaggtttgtgccagaatttggctgctgctttctggagatgtatggctagttcagaagctgatgatgaagctgatgattctggtgctttggcagctgttggttgcttacgagcaattagcacaattcttgagtccataagcagcctcccacatctttttctgcaaatagaacctacattgttacctataatgcgcaggatgttgacatctgatggccaagatgtttatgaagaagttcttgaaattgtttcctatatgacatttttctcacctacaatttcactggacatgtggagcttgtggccactgatgatggaagcgcttaatgactgggctatagatttctttgagaatattcttgttccactggacaactacatttctcggggaactgatatctttcttgcaagcaaagatccagattaccagcaaagcctgtgggatgcactacaatctataatgatggacgaaaacatggaagattctgatattgaacctgctcccaagctcattgaagttgtttttcaaaattgcaaaggcaacgtggatcagtgggttgagcactacctcaggattacaattgcacggttacgtagagcacagaaaccatacttgaaatgcctccttgtacaagtgatcgctaatgcgctctactacaatcctgcgctgacccttgaatctttaaataaacttggggttgcagctgacatttttaaccattggtttgctatgctacaacaagttaaaaaaagtggagcacgggttaatttcaagagggagcatgataagaaagtttgctgcttgggcctgacctctcttatcgcgcttccagctgataagattccagcagaagctttggatcggatcttcaaagcaacacttgagcttcttgttgcttacaaggaccaagttgcagaagctaagaaggaaaatgaagaggctgctgatgatatggatggttttgatgctgatgaagaagatgatgatgaagttgactccgataaggagatgggtgttgatgatgaagacggggatgaaataagcagtcttcagctgcaaaaattagctgcagaggctagaggcttccaaccagccgacgaggatgatgactcagatgatgatttcagtgacgatgaggagctacactcaccaatagatgaggtggatccgttcattttctttgtagaaactgttcaagctttgcaggcatctgatcctgccaggttccagaaccttatgcagacattggatttccgttatcaggcgcttgctagtggcataggacaacatgccgagcaaagaaaaattgaaattgagagagagaaatctgagaaggcaaatgcacagtgacataataaatcatttctggccgcccttgtttttgccattttgccagtataagccattggtgtctggtcaattccctgtgatttgcaggtcgctggtatgagttttgcagccttagccaacctttaagggtaggacaattttaggctcgcaaaattctatccttgtgaggaagcatcttggataatctgtcacgtcggccatgttcttcgtggcctgttgttgccgtcttggttgcgcaagaaagtttctctcgaggacagttgctccgtcttgttgaatttttttttgggggggggcttgtaagagcatttgttatagaaactcacctcaggtggtggggttgcattctccgagttgtcaaagtttattactggttcggagtagattgtatatggtttcggttggtaagacaacggttgtacgagctgcggtatatgtttttttttgtcaacaggacattgtaattgggttttgttctttggtcggcgagagcaagaaaaattggcattgttctgcggagttaccttgtttggtttcattgtccacttgcctgtgttgcaaaattatataatgttatagaaattgg

SEQ ID NO: 203093 - DNA, 3768 bp, Zea Mays
gcctctctcccgcacgcccccgccccgaagacctcgcgacgccaaaaaggaggagagaccgccacccccacgcccgcacggcccactcagcgctctccacccccgtcccctcgcggcggcggcggagcccgagcctgagtcctgcccccccgggctaggttggtctccgcctccgccctccagtctctttggcacaacctgcagccgctggcgcaggtggacatggatctgccaagcctcgccgtcgtgctgcgcgccgcgctcagtcacgttcctgaggagcgcaaagctgcagaggagagtctcaaccagttccagttcacaccacagcatttggtgagattgttacagatcattgtcgatggaagttgtgatatggctgtaagacaggttgcaagcattcatttcaagaattttattgcgaaaaactggtcacccaatgatccagatgagtctccgaaagttttggaaagtgacaaggccatggttcgtgaaaacgtacttggttttattgttcaagtgccccctttgttaagagcccagcttggagaaagtatcaaaacaattattcattctgattatcctgagcagtggccaagtctccttcactgggtttcacacaacatagacttacagaatcaaatttttggtgctttatatgtcctaagggttcttgccagaaaatatgaaaaaatcctggctacgcctctgaaggcaaccaagttggagattccgaagcaactatttgatccaaatgtcttcaatgcatggatggttttgtttataaacttgttggaaaggccagttcctgtggaaggccaaccaatggatcctgagattaggaaatcttgggcctggtggaaagttaagaaatggactatccatatcctgaaccgtctctacaccagattcggtgatctgaagcttcagaaaccagagagtaaagctttcgctcaaatgtttcagaagacttatgcaggaaaaatattggcatgccacatgcagctgctgaatgcaattcgtagtggtgattacttgccagatagggttatcaatcttgttcttcagtatctaactaacagtgttacaaagaacagtatgtatcagatgatgcagcctcagattgatatacttctttttgagataatttttcctcttatgtgcttcaatgacaatgaccaaaagttatgggaagaagatccccatgaatatgttcgcaagggctatgatatcatcgaagatttgtacagtccccgaacagctgctatggactttgtgagtgaattgattagaaagcgagggaaaaacaatctccaaaagttcatccatttcattgtggatatttttaggaggtatgatgaagcacctgctgatcttaagccatatcgccaaaaagatggtgctcttctcgctattgggacactctgtgataaactgaagcaaacagatccatataaaacagagcttgagagtatgctggtccgacatgtctttcctgaattcaacagtcgtgttggacacttgcgagcaaaggcagcatgggttgctgggcagtatgcccatatcaacttttcagaccagaacaattttcgtcaggctatgcactgtatgtctcaggaatgcgtgatccagatcttcctgtgagggttgattcggtctttgcacttcgttgttttgttgaagcttgcaaagatttaaatgagatccgacctatacttcctcagctccttgatgaattttttaagctgatgaatgaggttgagaatgaggatcttgtattcaccctagaaaccattgttgacaaatttggcgaagagatggcaccttatgcactaggtttgtgccagaatttggctgctgctttctggagatgtatggctagttcagaagctgatgatgaagctgatgattctggtgctttggcagctgttggttgcttacgagcaattagcacaattcttgagtccataagcagcctcccacatctttttctgcaaatagaacctacattgttacctataatgcgcaggatgttgacatctgatggccaagatgtttatgaagaagttcttgaaattgtttcctatatgacatttttctcacctacaatttcactggacatgtggagcttgtggccactgatgatggaagcgcttaatgactgggctatagatttctttgagaatattcttgttccactggacaactacatttctcggggaactgatatctttcttgcaagcaaagatccagattaccagcaaagcctgtgggatgcactacaatctataatgatggacgaaaacatggaagattctgatattgaacctgctcccaagctcattgaagttgtttttcaaaattgcaaaggcaacgtggatcagtgggttgagcactacctcaggattacaattgcacggttacgtagagcacagaaaccatacttgaaatgcctccttgtacaagtgatcgctaatgcgctctactacaatcctgcgctgacccttgaatctttaaataaacttggggttgcagctgacatttttaaccattggtttgctatgctacaacaagttaaaaaaagtggagcacgggttaatttcaagagggagcatgataagaaagtttgctgcttgggcctgacctctcttatcgcgcttccagctgataagattccagcagaagctttggatcggatcttcaaagcaacacttgagcttcttgttgcttacaaggaccaagttgcagaagctaagaaggaaaatgaagaggctgctgatgatatggatggttttgatgctgatgaagaagatgatgatgaagttgactccgataaggagatgggtgttgatgatgaagacggggatgaaataagcagtcttcagctgcaaaaattagctgcagaggctagaggcttccaaccagccgacgaggatgatgactcagatgatgatttcagtgacgatgaggagctacactcaccaatagatgaggtggatccgttcattttctttgtagaaactgttcaagctttgcaggcatctgatcctgccaggttccagaaccttatgcagacattggatttccgttatcaggcgcttgctagtggcataggacaacatgccgagcaaagaaaaattgaaattgagagagagaaatctgagaaggcaaatgcacagtgacataataaatcatttctggccgcccttgtttttgccattttgccagtataagccattggtgtctggtcaattccctgtgatttgcaggtcgctggtatgagttttgcagccttagccaacctttaagggtaggacaattttaggctcgcaaaattctatccttgtgaggaagcatcttggataatctgtcacgtcggccatgttcttcgtggcctgttgttgccgtcttggttgcgcaagaaagtttctctcgaggacagttgctccgtcttgttgaatttttttttgggggggggcttgtaagagcatttgttatagaaactcacctcaggtggtggggttgcattctccgagttgtcaaagtttattactggttcggagtagattgtatatggtttcggttggtaagacaacggttgtacgagctgcggtatatgtttttttttgtcaacaggacattgtaattgggttttgttctttggtcggcgagagcaagaaaaattggcattgttctgcggagttaccttgtttggtttcattgtccacttgcctgtgttgcaaaattatataatgttatagaaattgg

SEQ ID NO: 203094 - DNA, 2282 bp, Zea Mays
gccccacaaccgctctatacgactcctccatcctccccccctccccgtgatggctgcaatggatggggtaattgtagtggagctgtagaggcggcgggggtgcggttgcgacggactgtgctgcgccgacaagctgggaagaggaggcagcggcggcggggtgggacttgggatgggtcttctgtcgaaccgggtggagcggtcggagatcaggcccggcgaccacatctacacctggcgggccgtctacgcctactcccaccacggtacgctcctcagtcccctccgaattccgatggtgataagaattcctgccctcgcgagttccactacctaattgctgccgccgatggcacggatcaggaattctagtagtgtgcaagttagctgttcaccggaattctggcccgcgccggctcgctctggacttccttttcgccgccgctggatgctggtatttgttgtttttttgctttgttccgcgataggattactagtggtgatttgtgtgtactctctacacaaacggaagataccacacaaactgaagataccatggtctctacataaacccttccagatggccaggatgccacatgctgtgttctgctttccgtgcagaacaaatggcacttgttgctgctcacctactgctaaccaacgtgtctatctgtttctgaactttgttgtctctagtgtggagcagccttactgttagctcgagtttacgtgcaggaaagaaacactacataaggtttgacccatgcttcactgtgcctcataattgactagtttaggcctagttgctgtaaaccctgatcaccaaagtatcctatgtcaattaagttgttgaactattcggtcacttttactagttgagggaacttcctttatgtatttattgtttactgcaggttcttttgctttgcgtcttttcactttcagataacggaggtcgatcttcatttaggaagcttatacgacccttcaacagtgtcacaattgtgctacagggacagtgtctccacagtcagtgccttttgttggcagatgccaagatctgggttctgcactaccagcatgaaaagctgctcaaattgttgaaacccccctatttggcttctcctgcatcaatgcatcatacatcctctctggctctggatttttttttcaagtatttatgtcgggggaagcaaagtggtccattttacacgtaagaaagaaactgaaacttcagattcatcagactccacctccagcctgatctcagagatttcatcagagtgccaaacattccctgattgtggatttcagctgtctaatagtggtgttgtcctcacttgcttggactgtttcctccgcaacggctccctctattgcttcgagtatggagtgccatctgcagttttccttgcaaagattcgtggggggacctgcaccattgccgaatcagacccaccagaagttgttgtccatcgagcgatgtacctgcttcaaaatggttttggaaactacgacatgtttgagaagaactgcgaagacttcgcactctactgcaagactgggcttctacctgttgaggagcctggcattgggactagtgggcaagcttcttctgctattggtgtgccgttggcagctcttctgtccactccgttcaagcttctggctgctggtccgcttggaatggccactgtcactgctgggatgtactgtgctggcagatacattactgacataggagtaaggaaggacgtagcaaaagttgaagtggagaaattatcatcgcaccccggtttccaccttgttgaagatgaagaatcagtcaacaagcgatcagaaaaaccaaagaccttgctccctatgaagaggaaacgagaaaggtgactgcgaagcacagcttaggaggatgaacttctcttcccttcaattggtgtcgaattgtggataatttgggatatgataataagactcggtatagatatgtgccttgcgaatgtatcataattggattaggcgcacccctcacctgatcaactgtaactgccttataaattcaatcaaattgctatataatgtagatttttcttctttgtgaggtttcagtcttctgctgcaattaataacagttataatattttttactgatctgggagatcactgtatctgtattctgtagttacaacttacaaggtagagcaaactatcggcaatggcgttttcatcaggtatactgtacgaaaagtgaatataaaaaattgagcagagcttgtttttggaga

SEQ ID NO: 203095 - DNA, 2503 bp, Zea Mays
atcacacaggtcgcagcaaggaaccccaggagaggggaaaagttgtgtgtggcgtttgcgtttccacgacatgtcacagtcaacggcctttttgcaggctcgccactatcgtgtcacattggtgctcgcctgcgctgtatctgtatatatacacataccacacgcggtggggttggatgcatagagagcagttggattggatcaaagagaggagggctttgctttccgttttccttctccaaatggctcattagctcgtgcttcttccttccttgctaccgagttcggggcgctaaccaatgcgcagcgacaagctgatctctctctgccacgggatggaggtggaggctctagagaaggggtacacagcttttgccaaggcggtgaagtcttttacttcttcagaacggtacaagcgatcagagagctattttgaggacatgtatggtacagatgctttgcgttcttcagacaagacaattgttctacctatgccagaagctgtaaaagctaaggtgaaaggtgatatcagcaaggaagctcaacctggaaggggagcacaaagcaccttgagaaaggagatccttgagcttgagaagcacttcagggaacaacaggttgtgagtggtgcactggaaaacgctttaggacctaacgccggttcagtcaacttttcaccagagaatccaatgccaaaggcagctaatgaactgatacgggagattgccacattggagctcgaggtgaagaacatggagcagtatctcctgacactctaccgcaaagcattcgagcagcaagcgccggcactctctccccctgattgccgggaagcttcgaagccgtcagtgagctcacgctttgggcagctccgagaaacacccgtggcggcgaagtcttgcaagagtggaggaggggatgcggcactccggaccagttacccgccgccggcgcataagaaactgaacgatccgttggcagactgctgcacatctgctcgctcccatagagcggttgattcagatgtcctccgctgccagtcagccctgtcgtaccgcggagtttgctcgtccagggtactgccttcagaagaggatgatgatagcctcgcgagggctcttcgctcgtgccactcacagccattctcattcgcagaggaaggagagggggccggtgcatctggaggagcgataagcttagcagagtatctaggaaccaacgtagccgaccacatcccggaaacccccaacaacctgtcggaggagatggtgagatgcatggcggggatatactgcaggcttgcagaccctcccttggtccaccacggctcgtcgtcctcgccgacattgtccttctcctcgaccaccagcgcagtctctccacagtacgtcggagacgacatgtggagtcccagctaccgcaggagagaagcgacgaccctggactcccgcctgatcaacccgttccacgtcgagggtctgaaggagttcagtgggccttacaacacgatggtcgaggttcctacgatcagccgtgacggtcggaggatgaaagaagccgaggacctgctccagacttacaggctggttttgtaccggctggaagccgttgatctgaggacgatgacgaacgaagaaaagatagcgttctgggtgaacgtacacaatgccttgctgatgcatgcttatctggagaacggcgtcccacagaacaaaacatccctgcttgctaaggccgcctgcaaaatagctggacgcagcatcaacgcggccgttatccagagcgttgttcttggatgtaccacgcactgccccggacagtggctacgacggacgctgctctaccccaggaccaaaagcaaagtgagcaaagcggggcatgagtggcgagcctttgccgtcgcacaaccggagcctcttttgcgctttgcgctttgctccggcagccattctgatcccgcggtgagggtgtacactccgaagcggctgttccaccagctggaggcggccaaggaggagttcatccgggcgacggccggcgtgtggaaggagcagaagctgcttctccccaagctggtggaggcgtacgccaaggacgtgaggctgtcgccgcagggcctcgtggacatggtccagcgccacctcccggagaccatgagggtggccgtgcagcggtgccagcagggcggcagggcgtcgtcgggcaaggtcgtcgtcgactgggtgccccacaacccggccttccggtacctgctcgcaagggacctcgcgttccctcacctcagctgacgctgacactgagcatatatcgatgggcatgggctcaagtagtatatgcatgtgtcaaagggttaggacttaggagtaaagaagggatcgtgtgcagtttttgtgtgggtggttatcaatggcgtggcgtgtaaagatgcttctgtagtctgtagatgatgaacaggaaaggaaacagttgacgaaatgatagaaagcacgtttgacggttgact

SEQ ID NO: 203096 - DNA, 2358 bp, Zea Mays
gcatagagagcagttggattggatcaaagagaggagggctttgctttccgttttccttctccaaatggctcattagctcgtgcttcttccttccttgctaccgagttcggggcgctaaccaatgcgcagcgacaagctgatctctttcctgattgactcttattagtcttagctctgccacgggatggaggtggaggctctagagaaggggtacacagcttttgccaaggcggtgaagtcttttacttcttcagaacggtacaagcgatcagagagtcgcagctattttgaggacatgtatggtacagatgctttgcgttcttcagacaagacaattgttctacctatgccagaagctgtaaaagctaaggtgaaaggtgatatcagcaaggaagctcaacctggaaggggagcacaaagcaccttgagaaaggagatccttgagcttgagaagcacttcagggaacaacaggttgtgagtggtgcactggaaaacgctttaggacctaacgccggttcagtcaacttttcaccagagaatccaatgccaaaggcagctaatgaactgatacgggagattgccacattggagctcgaggtgaagaacatggagcagtatctcctgacactctaccgcaaagcattcgagcagcaagcgccggcactctctccccctgattgccgggaagcttcgaagccgtcagtgagctcacgctttgggcagctccgagaaacacccgtggcggcgaagtcttgcaagagtggaggaggggatgcggcactccggaccagttacccgccgccggcgcataagaaactgaacgatccgttggcagactgctgcacatctgctcgctcccatagagcggttgattcagatgtcctccgctgccagtcagccctgtcgtaccgcggagtttgctcgtccagggtactgccttcagaagaggatgatgatagcctcgcgagggctcttcgctcgtgccactcacagccattctcattcgcagaggaaggagagggggccggtgcatctggaggagcgataagcttagcagagtatctaggaaccaacgtagccgaccacatcccggaaacccccaacaacctgtcggaggagatggtgagatgcatggcggggatatactgcaggcttgcagaccctcccttggtccaccacggctcgtcgtcctcgccgacattgtccttctcctcgaccaccagcgcagtctctccacagtacgtcggagacgacatgtggagtcccagctaccgcaggagagaagcgacgaccctggactcccgcctgatcaacccgttccacgtcgagggtctgaaggagttcagtgggccttacaacacgatggtcgaggttcctacgatcagccgtgacggtcggaggatgaaagaagccgaggacctgctccagacttacaggctggttttgtaccggctggaagccgttgatctgaggacgatgacgaacgaagaaaagatagcgttctgggtgaacgtacacaatgccttgctgatgcatgcttatctggagaacggcgtcccacagaacaaaacatccctgcttgctaaggccgcctgcaaaatagctggacgcagcatcaacgcggccgttatccagagcgttgttcttggatgtaccacgcactgccccggacagtggctacgacggacgctgctctaccccaggaccaaaagcaaagtgagcaaagcggggcatgagtggcgagcctttgccgtcgcacaaccggagcctcttttgcgctttgcgctttgctccggcagccattctgatcccgcggtgagggtgtacactccgaagcggctgttccaccagctggaggcggccaaggaggagttcatccgggcgacggccggcgtgtggaaggagcagaagctgcttctccccaagctggtggaggcgtacgccaaggacgtgaggctgtcgccgcagggcctcgtggacatggtccagcgccacctcccggagaccatgagggtggccgtgcagcggtgccagcagggcggcagggcgtcgtcgggcaaggtcgtcgtcgactgggtgccccacaacccggccttccggtacctgctcgcaagggacctcgcgttccctcacctcagctgacgctgacactgagcatatatcgatgggcatgggctcaagtagtatatgcatgtgtcaaagggttaggacttaggagtaaagaagggatcgtgtgcagtttttgtgtgggtggttatcaatggcgtggcgtgtaaagatgcttctgtagtctgtagatgatgaacaggaaaggaaacagttgacgaaatgatagaaagcacgtttgacggttgact

SEQ ID NO: 203097 - DNA, 1947 bp, Zea Mays
ctgctcaatttcagtcacaggagagatccttgagcttgagaagcacttcagggaacaacaggttgtgagtggtgcactggaaaacgctttaggacctaacgccggttcagtcaacttttcaccagagaatccaatgccaaaggcagctaatgaactgatacgggagattgccacattggagctcgaggtgaagaacatggagcagtatctcctgacactctaccgcaaagcattcgagcagcaagcgccggcactctctccccctgattgccgggaagcttcgaagccgtcagtgagctcacgctttgggcagctccgagaaacacccgtggcggcgaagtcttgcaagagtggaggaggggatgcggcactccggaccagttacccgccgccggcgcataagaaactgaacgatccgttggcagactgctgcacatctgctcgctcccatagagcggttgattcagatgtcctccgctgccagtcagccctgtcgtaccgcggagtttgctcgtccagggtactgccttcagaagaggatgatgatagcctcgcgagggctcttcgctcgtgccactcacagccattctcattcgcagaggaaggagagggggccggtgcatctggaggagcgataagcttagcagagtatctaggaaccaacgtagccgaccacatcccggaaacccccaacaacctgtcggaggagatggtgagatgcatggcggggatatactgcaggcttgcagaccctcccttggtccaccacggctcgtcgtcctcgccgacattgtccttctcctcgaccaccagcgcagtctctccacagtacgtcggagacgacatgtggagtcccagctaccgcaggagagaagcgacgaccctggactcccgcctgatcaacccgttccacgtcgagggtctgaaggagttcagtgggccttacaacacgatggtcgaggttcctacgatcagccgtgacggtcggaggatgaaagaagccgaggacctgctccagacttacaggctggttttgtaccggctggaagccgttgatctgaggacgatgacgaacgaagaaaagatagcgttctgggtgaacgtacacaatgccttgctgatgcatgcttatctggagaacggcgtcccacagaacaaaacatccctgcttgctaaggccgcctgcaaaatagctggacgcagcatcaacgcggccgttatccagagcgttgttcttggatgtaccacgcactgccccggacagtggctacgacggacgctgctctaccccaggaccaaaagcaaagtgagcaaagcggggcatgagtggcgagcctttgccgtcgcacaaccggagcctcttttgcgctttgcgctttgctccggcagccattctgatcccgcggtgagggtgtacactccgaagcggctgttccaccagctggaggcggccaaggaggagttcatccgggcgacggccggcgtgtggaaggagcagaagctgcttctccccaagctggtggaggcgtacgccaaggacgtgaggctgtcgccgcagggcctcgtggacatggtccagcgccacctcccggagaccatgagggtggccgtgcagcggtgccagcagggcggcagggcgtcgtcgggcaaggtcgtcgtcgactgggtgccccacaacccggccttccggtacctgctcgcaagggacctcgcgttccctcacctcagctgacgctgacactgagcatatatcgatgggcatgggctcaagtagtatatgcatgtgtcaaagggttaggacttaggagtaaagaagggatcgtgtgcagtttttgtgtgggtggttatcaatggcgtggcgtgtaaagatgcttctgtagtctgtagatgatgaacaggaaaggaaacagttgacgaaatgatagaaagcacgtttgacggttgact

SEQ ID NO: 203098 - DNA, 373 bp, Zea Mays
cctgaaaacaaaatctccaacagaatactgttgcgctcgatttggacgggatccgatcacccggggcttcacctccaccctatataactcgagcctgcgcctcctctcgagccatctaaacgcagagagcatctcttccgaatgcctcaccacggtcagagagggcggagagagaagaagtcgccgccaccgtcaaaagccggagttctcctgggtcgctaggaacctgtacgcgaaggaatcaggcgcggtgaagactttgtacccagggtattgctcaacggagcaggatctccgccccggtgccgcgattcgccgtgaatcgaagcctccgcgccatcaggatcttggattaacgatcaacgtctgagat

SEQ ID NO: 203099 - DNA, 530 bp, Zea Mays
cctgaaaacaaaatctccaacagaatactgttgcgctcgatttggacgggatccgatcacccggggcttcacctccaccctatataactcgagcctgcgcctcctctcgagccatctaaacgcagagagcatctcttccgaatgcctcaccacggtcagagagggcggagagagaagaagtcgccgccaccgtcaaaagccggagttctcctgggtcgctaggaacctgtacgcgaaggaatcaggcgcggtgaagactttgtacccagggtattgctcaacggagcaggatctccgccccggtgccgcgattcgccgtgaatcgaagcctccgcgccatcaggtgaagagcaggtagtccaagaggaagtctacaacgaggagtacgagcttatctaggtggcatctccgagtcagcttgatggcgccaatgaataattattagttcgctttattgttatcatttatttttgtaagacacttccgctatgtaataatatttgtgacatttatctctatacgcttggtca

SEQ ID NO: 203100 - DNA, 1768 bp, Zea Mays
cctgaaaacaaaatctccaacagaatactgttgcgctcgatttggacgggatccgatcacccggggcttcacctccaccctatataactcgagcctgcgcctcctctcgagccatctaaacgcagagagcatctcttccgaatgcctcaccacggtcagagagggcggagagagaagaagtcgccgccaccgtcaaaagccggagttctcctgggtcgctaggaacctgtacgcgaaggaatcaggcgcggtgaagactttgtacccagggtattgctcaacggagcaggatctccgccccggtgccgcgattcgccgtgaatcgaagcctccgcgccatcaggaagggaggcataatcgatctacctgccaataaccgtcgcaggaagattgttaaccaacctcaaccagagatgaatccttcaccgaaccctccaccggctggagtagatctagtagctgccactcagatgcaactgctgcaacaaatggcaaacaccatgatagaaatggctcagatgcgacaagaatgtcaggagatgcgccaggagttgcaggaaatgcgacaggaactccggcaggaacgactggaacggcagcaacaacaaccactacctccaccaccaccagctccaccccgggacaagcaccgggaattcatgagtcacaagccacctacattctccaactctccagatcctcttcaggctgatgactggctaaagacagtagataaaatgctcaacattgctcaatgtactgatcaggagaaagtgctctatgcgtcgggtcgtctcactggccccgctgctgattggtgggactcttactgtgctgcccatgctgctgccaacactatcacctgggcagaattctctacacaattcaggaactatcatattcctgcaagcttgatgaaaattaaaaagaaggaattcttgtcacttaagcaaggcaacatgacagttagtgaataccatgataaattcattcagctgtcaaggtatgctcccgacgaggttgctgatgatgaaaggaagcaggagcagttcatggagggactcattgggccactccagtaccagctggtatctcacaccttctcatctttccagaggcttctggacaaggctatagctgttgaacacaaacgtgttcagctaggcgagatgaaaaggaagactattacccagggacaggggagcagtagcgtccgccgtcgctatgttccaccccagggtacaccagctcgtcctggaggagggcaacagtcctaccagcgacctgctcagcagacaccacaggcgacaccgcagactccgcatactcgtcaggatgcccccactgtcaccccggcgagacctacaggacagggcactgctacagacaccatatgcttcaagtgtggcgagattggtcactatgctaatgtttgtccgaagaggaaccccaacacaccggctcgtggtaattctcaagtcaagcagacacagactctaggaagcaaccgtggctatagcatcgctaaggttaatcaaatcaatgttgaagctactgaggatggtcctaacatcgtcattggtgaagagcaggtagtccaagaggaagtctacaacgaggagtacgagcttatctaggtggcatctccgagtcagcttgatggcgccaatgaataattattagttcgctttattgttatcatttatttttgtaagacacttccgctatgtaataatatttgtgacatttatctctatacgcttggtca

SEQ ID NO: 203101 - DNA, 1834 bp, Zea Mays
cctgaaaacaaaatctccaacagaatactgttgcgctcgatttggacgggatccgatcacccggggcttcacctccaccctatataactcgagcctgcgcctcctctcgagccatctaaacgcagagagcatctcttccgaatgcctcaccacggtcagagagggcggagagagaagaagtcgccgccaccgtcaaaagccggagttctcctgggtcgctaggaacctgtacgcgaaggaatcaggcgcggtgaagactttgtacccagggtattgctcaacggagcaggatctccgccccggtgccgcgattcgccgtgaatcgaagcctccgcgccatcaggcgagcaagcaaccgaggacccccgtacccagcaggtggaaaatactgagcaggtgctcgttgaaggaagggaggcataatcgatctacctgccaataaccgtcgcaggaagattgttaaccaacctcaaccagagatgaatccttcaccgaaccctccaccggctggagtagatctagtagctgccactcagatgcaactgctgcaacaaatggcaaacaccatgatagaaatggctcagatgcgacaagaatgtcaggagatgcgccaggagttgcaggaaatgcgacaggaactccggcaggaacgactggaacggcagcaacaacaaccactacctccaccaccaccagctccaccccgggacaagcaccgggaattcatgagtcacaagccacctacattctccaactctccagatcctcttcaggctgatgactggctaaagacagtagataaaatgctcaacattgctcaatgtactgatcaggagaaagtgctctatgcgtcgggtcgtctcactggccccgctgctgattggtgggactcttactgtgctgcccatgctgctgccaacactatcacctgggcagaattctctacacaattcaggaactatcatattcctgcaagcttgatgaaaattaaaaagaaggaattcttgtcacttaagcaaggcaacatgacagttagtgaataccatgataaattcattcagctgtcaaggtatgctcccgacgaggttgctgatgatgaaaggaagcaggagcagttcatggagggactcattgggccactccagtaccagctggtatctcacaccttctcatctttccagaggcttctggacaaggctatagctgttgaacacaaacgtgttcagctaggcgagatgaaaaggaagactattacccagggacaggggagcagtagcgtccgccgtcgctatgttccaccccagggtacaccagctcgtcctggaggagggcaacagtcctaccagcgacctgctcagcagacaccacaggcgacaccgcagactccgcatactcgtcaggatgcccccactgtcaccccggcgagacctacaggacagggcactgctacagacaccatatgcttcaagtgtggcgagattggtcactatgctaatgtttgtccgaagaggaaccccaacacaccggctcgtggtaattctcaagtcaagcagacacagactctaggaagcaaccgtggctatagcatcgctaaggttaatcaaatcaatgttgaagctactgaggatggtcctaacatcgtcattggtgaagagcaggtagtccaagaggaagtctacaacgaggagtacgagcttatctaggtggcatctccgagtcagcttgatggcgccaatgaataattattagttcgctttattgttatcatttatttttgtaagacacttccgctatgtaataatatttgtgacatttatctctatacgcttggtca

SEQ ID NO: 203102 - DNA, 596 bp, Zea Mays
cctgaaaacaaaatctccaacagaatactgttgcgctcgatttggacgggatccgatcacccggggcttcacctccaccctatataactcgagcctgcgcctcctctcgagccatctaaacgcagagagcatctcttccgaatgcctcaccacggtcagagagggcggagagagaagaagtcgccgccaccgtcaaaagccggagttctcctgggtcgctaggaacctgtacgcgaaggaatcaggcgcggtgaagactttgtacccagggtattgctcaacggagcaggatctccgccccggtgccgcgattcgccgtgaatcgaagcctccgcgccatcaggcgagcaagcaaccgaggacccccgtacccagcaggtggaaaatactgagcaggtgctcgttgaaggtgaagagcaggtagtccaagaggaagtctacaacgaggagtacgagcttatctaggtggcatctccgagtcagcttgatggcgccaatgaataattattagttcgctttattgttatcatttatttttgtaagacacttccgctatgtaataatatttgtgacatttatctctatacgcttggtca

SEQ ID NO: 203103 - DNA, 1138 bp, Zea Mays
ctccttcctgccaacacagcagcgccaccccctctcatggccctccccgacgacgccattcacctccccccgtcccccgtatcgccttcgtcaagtacgcccctcccccttccaccccatgacggagtgctcgattccttcatctgatggcgccacccacctccccccgctctcctccgccgccgcggctgtcgaggctcacttccaggcgcactggtccgcgctcgacgctgccgcacgccaggacccggcgcgggtcatcgccgtgggggactggcggtccccgctcgagctccccttcctgtggcttggggatgtcccctggtgtcgtctccgtcaggctgcaagtccaccaattcggcctcatctgcgacaacctcgacgcagtcaacaagttcgagcccaattacaggcttatcagaagatatatatcttcttcaacgatgttattcactacgggtccacttctagaaggagcttttacgattgaggttcttatatgggctgattggaccagctgcccagaaaacaaaagctcatctcatattttgtctgttctgtattttctttccttttcccccttccatcttaggacagatatgcactcagcataagcatttcattaattttgaacctgcagttctctcactctcctcgtatgtgttcacatagtgggtcctaggcactgttttctgcggatctagttttcttctacagcatctcttgaattcctgatatcttgacgtggcaaccttgttcttgcttttcatcagcaacttgactttgtctattgctcaattgttgcaactggcatcagtacttaactactggaggttgccttgctgtatgatatgcttttgttataatggtgcaatgtgacaagtatgttctagtggatttcactctcaactggtgctgacattcttgggtcatccacttcactgattagtattgtcagctggagggctcagattatctgttgagggacgtgagctacaatttacaggtgtctcagtggttccagtctgtttgtgatcacattggttcgcatggttgccagggtcattttgatgtaaatggaatcatgagatttgcctgcagccgcaactgctgcagctgtagtctatagagataaaat

SEQ ID NO: 203104 - DNA, 1543 bp, Zea Mays
gtccctctccctagtccctcccctcgtccgtcgtccacctctgccactacgagctcgtccccgtcttgtttcgtctcctctcgtctcgtcacgcgagatatttctacgggacgggacccgcgttgcttccccgcctcgccgtcccgcgcgcgccagccgggcccggggaagccatgaactgcctccagaacctgctcaacgttgacatatagacatgaactcgggatgaactacaatttcatacgcccagacttgattgtaggatcctgcttacagagtccacttgatgttgataagcttcggaagattggtgtcaaaactgtattctgcttgcagcaagattcagatcttgaatattttggagtcgacatccgtgccattcaagattattctctacaattcaaagatattgtgcactgccgtgcggaaattagggattttgatgcttttgatttgcgattgaggcttcctgctgtggttagcaaattgcacaaacttatcaactgtaatggtggtgtaacatatatacattgtactgctggacttggaagagctcctgctgttgcattggcttatatgttctggattcttgggtacagtctcaatgaaggacatcggctgctacagagtaaaagggcttgctttccgaagttggaagccattaagttggcaactgctgacattctgacaggattatccaaaaacacaatcactttgaagtgggaagctgatggttcttcctctgttgaaatttctgggctcgacattggctggggtcagagaattcctttgacatatgatgaggagaaaggagcttggtttcttgagaaagagttgcctgaaggacggtatgaatacaaatacgtagtggatggcaaatggctatgcaacgagcatgagctgataacgaaaccgaatgctgacggccacgtgaacaactatgttcaggtgagatcctcctgtcccgtcaaatggatgccatagctgagggctgagagtgcacgcgtttttcttggctgcaggtctccagagacggcacgagcgatgaagagaaggagcttagggagcggttgactggtccggaccctgatctcacggaccaggagaggctgatgatcagagagtacttggaacagtacgcggatgccgccgagcgctaggagaagaatgatgatgactgaggaagagaagagacacaccatgagacgacggaccgaagccgacctgaccgcaccttcctttacggagaggtcgggcttcccctctcttgtcaatcaaatactcgtagcttaaccgtgcaaaagggcacgttctgctcgcatacttggagaatgatgatgaaggagcaaactgtacgtattgttgaacagcagctgtgcagaaataacaaaggtagtagcgtaaaactactgtactgaccataatgttactactgtatgctccttcttggctatgaataataataataataataaaagagtaaataaacctcatcgatcccttgttatgcttttctgtgattggtacctgagagagagaggct

SEQ ID NO: 203105 - DNA, 1697 bp, Zea Mays
gcccgtccccggtccccgtcgtccctctccctagtccctcccctcgtccgtcgtccacctctgccactacgagctcgtccccgtcttgtttcgtctcctctcgtctcgtcacgcgagatatttctacgggacgggacccgcgttgcttccccgcctcgccgtcccgcgcgcgccagccgggcccggggaagccatgaactgcctccagaacctgctcaaggagcctccaatcgtggggtccaggtcgatgaggcggccctctccgctgaatctggcgatggtccgcggcggcagtcgccgatcaaacaccgtcaaaactgcccctggggcgtccacttccggtgccgagagcagcgccgtggagatgggcaccgagaagtccgaagtgtacagcactaacatgacgcaggctatgggagcagcgttgacatatagacatgaactcgggatgaactacaatttcatacgcccagacttgattgtaggatcctgcttacagagtccacttgatgttgataagcttcggaagattggtgtcaaaactgtattctgcttgcagcaagattcagatcttgaatattttggagtcgacatccgtgccattcaagattattctctacaattcaaagatattgtgcactgccgtgcggaaattagggattttgatgcttttgatttgcgattgaggcttcctgctgtggttagcaaattgcacaaacttatcaactgtaatggtggtgtaacatatatacattgtactgctggacttggaagagctcctgctgttgcattggcttatatgttctggattcttgggtacagtctcaatgaaggacatcggctgctacagagtaaaagggcttgctttccgaagttggaagccattaagttggcaactgctgacattctgacaggattatccaaaaacacaatcactttgaagtgggaagctgatggttcttcctctgttgaaatttctgggctcgacattggctggggtcagagaattcctttgacatatgatgaggagaaaggagcttggtttcttgagaaagagttgcctgaaggacggtatgaatacaaatacgtagtggatggcaaatggctatgcaacgagcatgagctgataacgaaaccgaatgctgacggccacgtgaacaactatgttcaggtctccagagacggcacgagcgatgaagagaaggagcttagggagcggttgactggtccggaccctgatctcacggaccaggagaggctgatgatcagagagtacttggaacagtacgcggatgccgccgagcgctaggaggtccaaagaatgatgatgactgaggaagagaagagacacaccatgagacgacggaccgaagccgacctgaccgcaccttcctttacggagaggtcgggcttcccctctcttgtcaatcaaatactcgtagcttaaccgtgcaaaagggcacgttctgctcgcatacttggagaatgatgatgaaggagcaaactgtacgtattgttgaacagcagctgtgcagaaataacaaaggtagtagcgtaaaactactgtactgaccataatgttactactgtatgctccttcttggctatgaataataataataataataaaagagtaaataaacctcatcgatcccttgttatgcttttctgtgattggtacctgagagagagaggct

SEQ ID NO: 203106 - DNA, 1495 bp, Zea Mays
cgcccgtccccggtccccgtcgtccctctccctagtccctcccctcgtccgtcgtccacctctgccactacgagctcgtccccgtcttgtttcgtctcctctcgtctcgtcacgcgagatatttctacgggacgggacccgcgttgcttccccgcctcgccgtcccgcgcgcgccagccgggcccggggaagccatgaactgcctccagaacctgctcaacgttgacatatagacatgaactcgggatgaactacaatttcatacgcccagacttgattgtaggatcctgcttacagagtccacttgatgttgataagcttcggaagattggtgtcaaaactgtattctgcttgcagcaagattcagatcttgaatattttggagtcgacatccgtgccattcaagattattctctacaattcaaagatattgtgcactgccgtgcggaaattagggattttgatgcttttgatttgcgattgaggcttcctgctgtggttagcaaattgcacaaacttatcaactgtaatggtggtgtaacatatatacattgtactgctggacttggaagagctcctgctgttgcattggcttatatgttctggattcttgggtacagtctcaatgaaggacatcggctgctacagagtaaaagggcttgctttccgaagttggaagccattaagttggcaactgctgacattctgacaggattatccaaaaacacaatcactttgaagtgggaagctgatggttcttcctctgttgaaatttctgggctcgacattggctggggtcagagaattcctttgacatatgatgaggagaaaggagcttggtttcttgagaaagagttgcctgaaggacggtatgaatacaaatacgtagtggatggcaaatggctatgcaacgagcatgagctgataacgaaaccgaatgctgacggccacgtgaacaactatgttcaggtctccagagacggcacgagcgatgaagagaaggagcttagggagcggttgactggtccggaccctgatctcacggaccaggagaggctgatgatcagagagtacttggaacagtacgcggatgccgccgagcgctaggaggtccaaagaatgatgatgactgaggaagagaagagacacaccatgagacgacggaccgaagccgacctgaccgcaccttcctttacggagaggtcgggcttcccctctcttgtcaatcaaatactcgtagcttaaccgtgcaaaagggcacgttctgctcgcatacttggagaatgatgatgaaggagcaaactgtacgtattgttgaacagcagctgtgcagaaataacaaaggtagtagcgtaaaactactgtactgaccataatgttactactgtatgctccttcttggctatgaataataataataataataaaagagtaaataaacctcatcgatcccttgttatgcttttctgtgattggtacctgagagagagaggct

SEQ ID NO: 203107 - DNA, 2713 bp, Zea Mays
atttattctacctctttccaatgtcccattttccttgtgaatcactagtgtcgcaaatcccaatctcccagcttgcgcctaaaccctagcttgcctatcgatggcgccgaagaagcgcaaggccgatcccgccgagtcccccgccgccgtggaggcagccaccaccaaccaccgccacgagccggcgtcctcggagcccaagccacgcggctccatctacttccccatcactgacgacccgcccgaacccaacgccgccgaagaggacgaggacgagggcgccggcgacgacgaggacgacgcggaggacattgtcaagctacttgagccgctgtcgcgggagcagctcgttgcgctgctccgcacggcggcggaggcgagccccgccacgatggcggccgtccgccgcgccgttgaggccgaccctgccagcaggaagctcttcgtccacggtctcggatggggtgccggcgccgaggacctccgctccgccttctcacgcttcggcgagctcgaggactgccgcgtcatctctgacaagcaatctggtagatccaagggctacgggttcgtcctcttccgctcccgccgctctgcgctccgcgccctcaaccgccctcagctccaaatcggtggtcgtcttgctttctgtcacctcgccgcctcaggccccgcacccccagctcagtctcagaaccctatctccaacgccaaccccaatgctaactctaactccacgagcaacgcttctggatcctcatcatcacaaactgacaatatacaacgcaagatatttgttggtaatgtgcatgctgatgtggacgtggaccgcctatatgagtattttgcacaatttggtgagattgaagagggcccgttgggctttgacaagaacactggcagaccaaagggatttgcattatttgtttacaagtctgtggagagtgctcgccgtgctttggaggagccaataaagaattttgatggaaagacactcaatgtgcagaaagccatagatgggaggaccaagggctcatctggaatgaatacaaatactaactccaatcccactactgcatctgtggtcgccgcccagatgactgctccttccagtgttgccatcagcccatatgatgcatcagcatatagtgctactgtggttcctgacatgagttttgcacagcaagctgctatgctgggattaggtgcacagcaacaggcattcactcaacccaatgcaatgcttgccatgatagcagcaatgcagaacccagctgcgctagggatgagtccagccatgcttgctgctatgaacccagccttcgccgctgctgcattgggtgcaggggggcagcaggcacacacagttggtcttacaggttttggagctcagggttttgggacaccgtcgtttggagcaggtgccgctttcccaaatgcagcaggtgttcaagcagcagcagctgcatatcaaggaagtggagctcctcctggctttcaagggccacctgggtttcaggttggccaggcaactacccagacaagcactgcagcggcagcggctgccgcagctgccactgctgctggttatcaggctggggcatctgggcagggccaggtgcctggttctcaggtcggaggcactggttttcagggtggatattgacagaactagaaatattctgaatcggaatctagtggacttgctttgcgttgcatgaactatttatgggtatgggcacggtttggcctggttccttgcggggccattggcttattgtgctacaaggatggcagagctataatactatttatccagcacagtcggtgcctcacaaaccggaaagcccatcagatgatgagaacaaaggaatcacattcccgatttgctgtcgcccccgctaatcttccccagcttttctttgcacaagcatcctggctgcaagtagcctgatgctcgtgctgaagctttgttgaagccaaccgtatcttttgacctttctatctccctctttctctattgctcgctgccgttttgggccccatttcccttgccgttttgattggtttcatgctagcaagtggtttttttctagtatgttttattatcaggacctagcaacgaacgttggttcctgccgacacgatgagtgttacacataactgtaggtgctatgctgaggcgtcctttacacataactggactctacacgctgacgttagttttgtcgccgcacgggtcatctggggattttgcggtgccggaacgggggtggttctgagggggaaacatgtgggattgcacacagaatttgacgctgtgaaccagagaactcttctctgccgatgtcagctcccaactccaacggctgctgtactccgtgatctgttcccacctactcctcgcggtggtatttaatgcgtgtccgtcggtccgtcctctacgcagaggatttgagtatcgtcatctctgagacgctaatgacgtgttagcgacgtgcgtttggctcttgagcggtgtcgacggattgctctttgtgaaactgacttgtgtttacttttctttttgtgtgtgtgaaaaaaaaactgagtccgatctgttgccaaaggcgccttgtggtttgaggcgagaacgccacagggaagggggaaaaaacagcagcgcagaaccacgcggaccgattaattaatcccatccgtctgtttcgtctcc

SEQ ID NO: 203108 - DNA, 2623 bp, Zea Mays
cccacgcatgattgtgcatgcttggcccgatagacccgtgggcctggtcatgtcgtgccttggcatgagcccaggtcgtatcgtgccgagcatgactagtttgctcatctatagttttgtgtcattgcggccttgagcccataagctattcggcccattagcttagcccagccgagacgccgcgcgcggcacagccctcctccggtactcggtcagtcggtcctccacactcctcaccagtcaccaccagaccaaatcgcagccgcgctcgagctaagccccgccgccgacgccgtcatctgcgccccagaaccccgtatttccctccgccgccttccgatctctcgctcctccccatgtcggagaaaaagcgccgcgccggtgcgagcgcggccggcgccgcatccagctccaagaagccgcgtgcttcctcggccgcgtcgtacgccgagtccctccgctcgaagctccgccccgacgcctccatcctggccaccctccgctccctcgcttctgcctccgcttccaaatccaaggccgccgccaggtccctcgcggaccacgacccgtgcgcggaccccgcctcctcgtacatcgtggtggccgaccaggactccacctccgtcacctcccgcatcaaccgcctcgtccttgccgccgcgcgcagcatcctctccggccggggcttctccttcgcggtgccctcgcgcgccgcctccaaccaggtctacctcccggacctcgaccgcatcgtgctcgtccgccgcgagtccgcgcgccccttcgccaacgtcgccaccgcgcgcaaggccaccatcacggcgcgagtcctctccctcgtccacgccgtcctcggcaggggcatccacgtcaccaagcgtgacctcttctacaccgacgtcaagctcttcggcgaccagacccagtctgacgccgtcctcgacgacgtctcctgcatgctcggatgcaccaggtcctcgctccacgtcgtcgcctccgagaagggcgtcgtcgtcggccgcctcgtcttcgccgacgacggggaccggatcgactgcacgcgcatgggcgtcggcggcaaggccattccgcccaacgtcgacagggtctcgggcatcgagagcgacgcgctcttcatcctcctggtggagaaggacgctgcattcatgcgactcgccgaggacaggttctacaaccgcttcccctgcatcattctgacggccaaggggcagccagatgtcgccacccggctgttcctgcggaggctcaaggttgagctgaagctgccagtgctcgcgctggtggattccgatccatacgggctcaagatcttgtcggtgtacatgtgtggttccaagaacatgtcgtatgacagtgccaatctgacgacgccggacatcaagtggctcggtgtccggccgagcgacctggacaagtacagagtgccggagcagtgccgtctccccatgaccgatcacgatatcaaggtggggaaagagctgctcgaggaggacttcgtgaagcagaatgagggctgggtgaaggagctggagacgatgcttcgcaccaagcaaaaggctgagatacaggccctcagttccttcgggttccagtacctcactgaggtctacctgcctcttaagttgcaggagcaggattggatttgagaactctccaatgctagatatcagtaatttccctagccaagataatgccctcctccgctcagtattttcaaggaccaaattggcatgaatgaagacttcgctatctagttaatcacatgtatttttgaacaccagctgttgtattatttatttctgctggagaactgttctgtggaaaacattgctgccagatatgtgctggaatttgatacataacacaggtgatttaaattggttcggcctcttatctggtcgaactttggttgttctgtgtcctatatttctgtagggcttattagttccgtgtttgacatggaaatgggataacccggattgaatgaaaatgtactggaaattgatatatagcagtatgaaaatccatgcatgatgtctttagaaacatgacaattaaattcaattaccctgttttcatatgtacacccaatcctagaataactgtaccaatttattgtatagtaaatggaccaaaaggctattgtaagaaaatgtcacactgcaatccttgcggctttcttcttcaaccaatggttcagtgagttaatagggatttttatcattccctgtggtctcctagtgaattctttggatatttgctctaaattacctctagattttgttggtgctttggattttgatgaaacaggagggcggcttccaggttcaatcaaaactaatttcaacttcagctcttgcctgcacgacatcaactgcactagtttcagtaattattgcctgcacgatgtcaactgcagtagtttcagcttcagctcttgatgtcttctcatgatccgtgatgataatacgaagtggcagctcaacatgacctaggaggtattgctctttgatcttccgaagaacagatagaacaattcgagcttcaacctgcagaatacatggtattatggattacggttgtatagagcaaaccgtttgac

SEQ ID NO: 203109 - DNA, 5223 bp, Zea Mays
ctgcctctctccctctccgcctacctctccttccctaccgtctcctgccactgcgcccctccaatagcgttgtcccttgccctcgcgcgccccgtgctcttcgtcgtcttcgccagcccaggtggcaggaagctacccatagccagcctcgtcttctcggccaaatccttcttcggtgcaccgctggccgccacctcggcctccgtcgctttgtcgctcctgtgccagtggctgcctccagctcgctcgaggtcgtcgctacggggaagaaggggcctttccgaccaaatccttctttggcgcgccactggccgccaccgcggcctccgtcgcgttgccactcccgcgacaaccggccgcctccaactcgcttgaggtcatcgcagcggggaagaaggggctttcccagccagatccttctttgacgtgccgctggccaccaccgcgccctccatcgcatcgccactcccgctagctcgaggtcgtcacaatggggaagaagggctgcaagatgaagacacacaagcgatttcgggtgacaaggaaggacaagatcatgcggcggtgcgctgggaagcaacacttgctcgccaagaaaaacaccaagcgcaagaagagactctccaagatggtattcttctttcctccactcttgtgccgctcaaattttgttcagccgctcattttgtcgcggaggtcgtttcaatagcagtaaatagaaatcatggctggtgcacctccgtgaattagatgctaatgtggaatgacgatgtcaatagcatttgctctcgtattttaattgcttgatagttttaacgtgacaacgttgctgaaaactagaaaggcgaaatgcaagggcgtgagtttgttttgctgatgtgctctggggtgcttcatttgttatttcttggcatatgtctcctactcattaggaagctcagtttattcctcgattttcaaatgtgtgtgagggccagtacccgatagatggcatgaaaaaagcttttggctaaaattgaacatgtcaaagttcacagattattatcatggtccttaatataacgtttgtttctgaaaatgaactattttattgtacacataaagttaccactactatttttgaaaaagctagaaaatagtcatgacaattttgagaataaggtgggtgggagtgggtgtttaatgttttgacctacgagtacttctaattttacttcattattgttagtcatctaatatatacttgttcctacttcattattaggcgtgggtgtttattctgtgttaataagcagttataaattatggggtgttaaagtagtagcacgtctttgttacaagattatagccgatcaagcatacttcgtttactacttggataacacaccaagcagaaatagctgaacaaatatccctacaaacagctcagacatcattgtttcagttcatgtccgtactctgctttgatcaaatacagttcccggtatccagtccatacattttagtttccagatttttgtttggataacattaagcccatactttttcatattttcagttagcacatacatttcatttcatccaagacatgctgaaaactgaatgtgactcatacaacgggctaggcatcctgttcaaatctaaaaacttagtcagtttggatcacatcatattttcagattttcagcttataagctgaaatttgacgcccagtttccagattttagattttcatttttcagttttttatttaaacagtttggatcacattcatgtttcaactttcgatttgcagataatatgcacgtagttttcatattgacatatattatatggtggtctgaatcttgaaaaattgcttgcttgttgagtgaagaactccttgccatggttgttgcagcctaaatctgtttatattacttgtagatattcagttgttattttgtgccttgctgctaccaaaattaagaaatgataacactatagcccacctagcattgttctaacattttaaaatagaataattggatctataccattaaaagattctaactttctgcataggtctatcgttggaaatgaagggacatgtcgtttttctgtccaacgagaatagcagttgtcttctgctaatattgtcgctggacaaatgaactctgtgtttttgtgtgcaagcaataattcagttgttgctttgttggtctggctatctcactaaccatttttgtggtgatttaatcttgaagcatcgattgtgctaaatagtttatcggatcctttatactcatgttttcccttgaactggacagaggtgccggatagggcttaatagttgaatcgaagattaggatacgttggtaggagtactagggagggatcacctggatcagtgcattaaagttagctgacagtaaatattattgttcttgctattctttcgagcaatgttcctcaaaccatgatacatatatcttgtaataagaaaatcagtgacctttttggtgagtgacaattctattatgatatttttgacgatggagatctaggctagcttgttcctgagttggtcctaaggataggtttcatcactttgtggcgttttattcatcttctagcttagacggtttagttattacactgagaattatattcacttggaaacacttgtttcagctggctatttacttgtagctaatagggagttccatttagttgactatctcacatatagttatccaaatggttaagatgtagtggtgtgttgttttgctttttggtgtgtgtcaatttctgcaggagatgttcgccgatctgtgggccaaaggcttcagtttgctaggtgagcatctgcacagttctgaaataggcgcctatggttgcacagttttttactacaacacttattccacactcaggctaaatttggctcagttggttacaatgtcatgttgattggaatctgccatttgtgaatctatggtctatgacttatctggtagggttagattggataaatgtgttcaatacacaaaaacttgtactatctatatgacactagagattagtgtgccagattgttaaaagctagataatctactgctaccatttaaaagtaactgctggattaattttataggtggattgtgcttaaattgcaatatggagataaatttgttaaatctgtgtatcagatggcctgggctgatctttattaggcttgttattcatgttcttctattttcccaggattcatctgctttagctcaattgggatggccagatatgcggataccaatcttatacaccttatcatggccagatagaatctatcgccctagctcaatttgttaaatctgtctagatatttgcaagcatgacatcttcacaactcctgggctacttttacaggacatctgatgcttttatttggaaatgacctccaagaattcaggtcttattttttattacagtatggggttgttctaataagctactggcatatgatggtaatacttgataaattcgtatggatgagggaaacctaagtcagctgttggtatgtgcatctgtgattaaatctgatgggtttttaatcagaaaaattatgacaaccatcttataaattttaggaaatagatatattattgtacttaaaactaaattttctgaacagctcatcaaacttggaccttgacctaaactcatttcaattttggtgtcattttgaatagttatatgtacgagttgagttggataccatggtaaggttgctaaacatgaatatgctttcgaaaaaaggatgttaagtaacttagtgactctgcttaacactgtaggatttgaggctgccatagtatgctctctgaccgtgctaacgggaggaaggagatgatttaagttctccatgtttataaccagaaagaggaggatagtccaatcatggtaactaaatagtaggtagtaatgtttcacggtaaatcacagttctcgaatgcgatatgatctttgactcggagtattgaagactaatttagtttgagtttgagattagttgtttttgtcattaataaactcacattagcgtctggttacgagctcactactagattttagatctccatttttggtgtacttctgctgcatgtgcctcccatagttgcggatttgcaggtatcacctgattccttttgatttttggattgagatacagtaaaagttatctttgcctgtttccaccacactgtatcatacaggtaaacatgaatacaaggctggcttgatctggcaagtgctcgccattctatgggcccatcacacttttcgagtacactgtttgatcatgaagagcagtctgctgccactaaacttgaggttgttgatcatgattgtctgaaaatttatcggggatatgccttgggatggagaaatgtcacagaacacaggatgaagacgattccaagaatccacccatgtcaggtaacacaatagcatgtcagccatatgctatacatgcatatattatggtatggaaataactccggagagtatatcacattgtgttatgtatgcaaacactaatgcaagacagccatcctgcccatcatgttggtaggggtcaaaagcttcttgctgctgaaattgatggtacaccgtacaagcatttacctttgattttttctgacgttaatatgttgcttcactgaaggactagaagacgccttcacatcacggagtagagctctcagcaacaacagtgcaacgatgtttggacttttgttcacatatgggagtgtttaaactcctgcacctagatttagaaacaccaccatgtaaaatagacaaggcggtgcttttgcaaacatgatgctgccacgagacccgaacttatgtatggccaaacatgttaacatattttgtatgtcatgggctgttccagaaacattctgaaatacacggttccttctaaattctatattttgtcttgatagaacgcccgtaaaagtgcttcaatgttctagtttacatgaaaggtatatagcaatttactcaagaattctattgtctctataggacggctccacttattctagtaaaataaaaaaaactggattaggtgggagcaagcgagtgtaggttgggacttgggaataactaggtttagcaagcgacggtctaggatatgttttattgattttaatcgatccgaaaatttaaaactacgag

SEQ ID NO: 203110 - DNA, 4387 bp, Zea Mays
ctgcctctctccctctccgcctacctctccttccctaccgtctcctgccactgcgcccctccaatagcgttgtcccttgccctcgcgcgccccgtgctcttcgtcgtcttcgccagcccaggtggcaggaagctacccatagccagcctcgtcttctcggccaaatccttcttcggtgcaccgctggccgccacctcggcctccgtcgctttgtcgctcctgtgccagtggctgcctccagctcgctcgaggtcgtcgctacggggaagaaggggcctttccgaccaaatccttctttggcgcgccactggccgccaccgcggcctccgtcgcgttgccactcccgcgacaaccggccgcctccaactcgcttgaggtcatcgcagcggggaagaaggggctttcccagccagatccttctttgacgtgccgctggccaccaccgcgccctccatcgcatcgccactcccgctagctcgaggtcgtcacaatggggaagaagggctgcaagatgaagacacacaagcgatttcgggtgacaaggaaggacaagatcatgcggcggtgcgctgggaagcaacacttgctcgccaagaaaaacaccaagcgcaagaagagactctccaagatggtattcttctttcctccactcttgtgccgctcaaattttgttcagccgctcattttgtcgcggaggtcgtttcaatagcagtaaatagaaatcatggctggtgcacctccgtgaattagatgctaatgtggaatgacgatgtcaatagcatttgctctcgtattttaattgcttgatagttttaacgtgacaacgttgctgaaaactagaaaggcgaaatgcaagggcgtgagtttgttttgctgatgtgctctggggtgcttcatttgttatttcttggcatatgtctcctactcattaggaagctcagtttattcctcgattttcaaatgtgtgtgagggccagtacccgatagatggcatgaaaaaagcttttggctaaaattgaacatgtcaaagttcacagattattatcatggtccttaatataacgtttgtttctgaaaatgaactattttattgtacacataaagttaccactactatttttgaaaaagctagaaaatagtcatgacaattttgagaataaggtgggtgggagtgggtgtttaatgttttgacctacgagtacttctaattttacttcattattgttagtcatctaatatatacttgttcctacttcattattaggcgtgggtgtttattctgtgttaataagcagttataaattatggggtgttaaagtagtagcacgtctttgttacaagattatagccgatcaagcatacttcgtttactacttggataacacaccaagcagaaatagctgaacaaatatccctacaaacagctcagacatcattgtttcagttcatgtccgtactctgctttgatcaaatacagttcccggtatccagtccatacattttagtttccagatttttgtttggataacattaagcccatactttttcatattttcagttagcacatacatttcatttcatccaagacatgctgaaaactgaatgtgactcatacaacgggctaggcatcctgttcaaatctaaaaacttagtcagtttggatcacatcatattttcagattttcagcttataagctgaaatttgacgcccagtttccagattttagattttcatttttcagttttttatttaaacagtttggatcacattcatgtttcaactttcgatttgcagataatatgcacgtagttttcatattgacatatattatatggtggtctgaatcttgaaaaattgcttgcttgttgagtgaagaactccttgccatggttgttgcagcctaaatctgtttatattacttgtagatattcagttgttattttgtgccttgctgctaccaaaattaagaaatgataacactatagcccacctagcattgttctaacattttaaaatagaataattggatctataccattaaaagattctaactttctgcataggtctatcgttggaaatgaagggacatgtcgtttttctgtccaacgagaatagcagttgtcttctgctaatattgtcgctggacaaatgaactctgtgtttttgtgtgcaagcaataattcagttgttgctttgttggtctggctatctcactaaccatttttgtggtgatttaatcttgaagcatcgattgtgctaaatagtttatcggatcctttatactcatgttttcccttgaactggacagaggtgccggatagggcttaatagttgaatcgaagattaggatacgttggtaggagtactagggagggatcacctggatcagtgcattaaagttagctgacagtaaatattattgttcttgctattctttcgagcaatgttcctcaaaccatgatacatatatcttgtaataagaaaatcagtgacctttttggtgagtgacaattctattatgatatttttgacgatggagatctaggctagcttgttcctgagttggtcctaaggataggtttcatcactttgtggcgttttattcatcttctagcttagacggtttagttattacactgagaattatattcacttggaaacacttgtttcagctggctatttacttgtagctaatagggagttccatttagttgactatctcacatatagttatccaaatggttaagatgtagtggtgtgttgttttgctttttggtgtgtgtcaatttctgcaggagatgttcgccgatctgtgggccaaaggcttcagtttgctaggattcatctgctttagctcaattgggatggccagatatgcggataccaatcttatacaccttatcatggccagatagaatctatcgccctagctcaatttgttaaatctgtctagatatttgcaagcatgacatcttcacaactcctgggctacttttacaggacatctgatgcttttatttggaaatgacctccaagaattcaggtcttattttttattacagtatggggttgttctaataagctactggcatatgatggtaatacttgataaattcgtatggatgagggaaacctaagtcagctgttgctcatcaaacttggaccttgacctaaactcatttcaattttggtgtcattttgaatagttatatgtacgagttgagttggataccatggtaaggttgctaaacatgaatatgctttcgaaaaaaggatgttaagtaacttagtgactctgcttaacactgtaggatttgaggctgccatagtatgctctctgaccgtgctaacgggaggaaggagatgatttaagttctccatgtttataaccagaaagaggaggatagtccaatcatggtaactaaatagtaggtagtaatgtttcacggtaaatcacagttctcgaatgcgatatgatctttgactcggagtattgaagactaatttagtttgagtttgagattagttgtttttgtcattaataaactcacattagcgtctggttacgagctcactactagattttagatctccatttttggtgtacttctgctgcatgtgcctcccatagttgcggatttgcaggtaaacatgaatacaaggctggcttgatctggcaagtgctcgccattctatgggcccatcacacttttcgagtacactgtttgatcatgaagagcagtctgctgccactaaacttgaggttgttgatcatgattgtctgaaaatttatcggggatatgccttgggatggagaaatgtcacagaacacaggatgaagacgattccaagaatccacccatgtcaggactagaagacgccttcacatcacggagtagagctctcagcaacaacagtgcaacgatgtttggacttttgttcacatatgggagtgtttaaactcctgcacctagatttagaaacaccaccatgtaaaatagacaaggcggtgcttttgcaaacatgatgctgccacgagacccgaacttatgtatggccaaacatgttaacatattttgtatgtcatgggctgttccagaaacattctgaaatacacggttccttctaaattctatattttgtcttgatagaacgcccgtaaaagtgcttcaatgttctagtttacatgaaaggtatatagcaatttactcaagaattctattgtctctataggacggctccacttattctagtaaaataaaaaaaactggattaggtgggagcaagcgagtgtaggttgggacttgggaataactaggtttagcaagcgacggtctaggatatgttttattgattttaatcgatccgaaaatttaaaactacgag

SEQ ID NO: 203111 - DNA, 4800 bp, Zea Mays
ctgcctctctccctctccgcctacctctccttccctaccgtctcctgccactgcgcccctccaatagcgttgtcccttgccctcgcgcgccccgtgctcttcgtcgtcttcgccagcccaggtggcaggaagctacccatagccagcctcgtcttctcggccaaatccttcttcggtgcaccgctggccgccacctcggcctccgtcgctttgtcgctcctgtgccagtggctgcctccagctcgctcgaggtcgtcgctacggggaagaaggggcctttccgaccaaatccttctttggcgcgccactggccgccaccgcggcctccgtcgcgttgccactcccgcgacaaccggccgcctccaactcgcttgaggtcatcgcagcggggaagaaggggctttcccagccagatccttctttgacgtgccgctggccaccaccgcgccctccatcgcatcgccactcccgctagctcgaggtcgtcacaatggggaagaagggctgcaagatgaagacacacaaggttctttcctgctagctcgtccttagttcctgtgagtcctttggttgttcgatgccttctactgattcatgtctcgttcggttatgtgtgtcatcactcgtcatggcgtcggtgaagcgatttcgggtgacaaggaaggacaagatcatgcggcggtgcgctgggaagcaacacttgctcgccaagaaaaacaccaagcgcaagaagagactctccaagatggtattcttctttcctccactcttgtgccgctcaaattttgttcagccgctcattttgtcgcggaggtcgtttcaatagcagtaaatagaaatcatggctggtgcacctccgtgaattagatgctaatgtggaatgacgatgtcaatagcatttgctctcgtattttaattgcttgatagttttaacgtgacaacgttgctgaaaactagaaaggcgaaatgcaagggcgtgagtttgttttgctgatgtgctctggggtgcttcatttgttatttcttggcatatgtctcctactcattaggaagctcagtttattcctcgattttcaaatgtgtgtgagggccagtacccgatagatggcatgaaaaaagcttttggctaaaattgaacatgtcaaagttcacagattattatcatggtccttaatataacgtttgtttctgaaaatgaactattttattgtacacataaagttaccactactatttttgaaaaagctagaaaatagtcatgacaattttgagaataaggtgggtgggagtgggtgtttaatgttttgacctacgagtacttctaattttacttcattattgttagtcatctaatatatacttgttcctacttcattattaggcgtgggtgtttattctgtgttaataagcagttataaattatggggtgttaaagtagtagcacgtctttgttacaagattatagccgatcaagcatacttcgtttactacttggataacacaccaagcagaaatagctgaacaaatatccctacaaacagctcagacatcattgtttcagttcatgtccgtactctgctttgatcaaatacagttcccggtatccagtccatacattttagtttccagatttttgtttggataacattaagcccatactttttcatattttcagttagcacatacatttcatttcatccaagacatgctgaaaactgaatgtgactcatacaacgggctaggcatcctgttcaaatctaaaaacttagtcagtttggatcacatcatattttcagattttcagcttataagctgaaatttgacgcccagtttccagattttagattttcatttttcagttttttatttaaacagtttggatcacattcatgtttcaactttcgatttgcagataatatgcacgtagttttcatattgacatatattatatggtggtctgaatcttgaaaaattgcttgcttgttgagtgaagaactccttgccatggttgttgcagcctaaatctgtttatattacttgtagatattcagttgttattttgtgccttgctgctaccaaaattaagaaatgataacactatagcccacctagcattgttctaacattttaaaatagaataattggatctataccattaaaagattctaactttctgcataggtctatcgttggaaatgaagggacatgtcgtttttctgtccaacgagaatagcagttgtcttctgctaatattgtcgctggacaaatgaactctgtgtttttgtgtgcaagcaataattcagttgttgctttgttggtctggctatctcactaaccatttttgtggtgatttaatcttgaagcatcgattgtgctaaatagtttatcggatcctttatactcatgttttcccttgaactggacagaggtgccggatagggcttaatagttgaatcgaagattaggatacgttggtaggagtactagggagggatcacctggatcagtgcattaaagttagctgacagtaaatattattgttcttgctattctttcgagcaatgttcctcaaaccatgatacatatatcttgtaataagaaaatcagtgacctttttggtgagtgacaattctattatgatatttttgacgatggagatctaggctagcttgttcctgagttggtcctaaggataggtttcatcactttgtggcgttttattcatcttctagcttagacggtttagttattacactgagaattatattcacttggaaacacttgtttcagctggctatttacttgtagctaatagggagttccatttagttgactatctcacatatagttatccaaatggttaagatgtagtggtgtgttgttttgctttttggtgtgtgtcaatttctgcaggagatgttcgccgatctgtgggccaaaggcttcagtttgctaggtgagcatctgcacagttctgaaataggcgcctatggttgcacagttttttactacaacacttattccacactcaggctaaatttggctcagttggttacaatgtcatgttgattggaatctgccatttgtgaatctatggtctatgacttatctggtagggttagattggataaatgtgttcaatacacaaaaacttgtactatctatatgacactagagattagtgtgccagattgttaaaagctagataatctactgctaccatttaaaagtaactgctggattaattttataggtggattgtgcttaaattgcaatatggagataaatttgttaaatctgtgtatcagatggcctgggctgatctttattaggcttgttattcatgttcttctattttcccaggattcatctgctttagctcaattgggatggccagatatgcggataccaatcttatacaccttatcatggccagatagaatctatcgccctagctcaatttgttaaatctgtctagatatttgcaagcatgacatcttcacaactcctgggctacttttacaggacatctgatgcttttatttggaaatgacctccaagaattcaggtcttattttttattacagtatggggttgttctaataagctactggcatatgatggtaatacttgataaattcgtatggatgagggaaacctaagtcagctgttggtatgtgcatctgtgattaaatctgatgggtttttaatcagaaaaattatgacaaccatcttataaattttaggaaatagatatattattgtacttaaaactaaattttctgaacagctcatcaaacttggaccttgacctaaactcatttcaattttggtgtcattttgaatagttatatgtacgagttgagttggataccatggtaaggttgctaaacatgaatatgctttcgaaaaaaggatgttaagtaacttagtgactctgcttaacactgtaggatttgaggctgccatagtatgctctctgaccgtgctaacgggaggaaggagatgatttaagttctccatgtttataaccagaaagaggaggatagtccaatcatggtaaacatgaatacaaggctggcttgatctggcaagtgctcgccattctatgggcccatcacacttttcgagtacactgtttgatcatgaagagcagtctgctgccactaaacttgaggttgttgatcatgattgtctgaaaatttatcggggatatgccttgggatggagaaatgtcacagaacacaggatgaagacgattccaagaatccacccatgtcaggactagaagacgccttcacatcacggagtagagctctcagcaacaacagtgcaacgatgtttggacttttgttcacatatgggagtgtttaaactcctgcacctagatttagaaacaccaccatgtaaaatagacaaggcggtgcttttgcaaacatgatgctgccacgagacccgaacttatgtatggccaaacatgttaacatattttgtatgtcatgggctgttccagaaacattctgaaatacacggttccttctaaattctatattttgtcttgatagaacgcccgtaaaagtgcttcaatgttctagtttacatgaaaggtatatagcaatttactcaagaattctattgtctctataggacggctccacttattctagtaaaataaaaaaaactggattaggtgggagcaagcgagtgtaggttgggacttgggaataactaggtttagcaagcgacggtctaggatatgttttattgattttaatcgatccgaaaatttaaaactacgag

SEQ ID NO: 203112 - DNA, 2379 bp, Zea Mays
ctgcctctctccctctccgcctacctctccttccctaccgtctcctgccactgcgcccctccaatagcgttgtcccttgccctcgcgcgccccgtgctcttcgtcgtcttcgccagcccaggtggcaggaagctacccatagccagcctcgtcttctcggccaaatccttcttcggtgcaccgctggccgccacctcggcctccgtcgctttgtcgctcctgtgccagtggctgcctccagctcgctcgaggtcgtcgctacggggaagaaggggcctttccgaccaaatccttctttggcgcgccactggccgccaccgcggcctccgtcgcgttgccactcccgcgacaaccggccgcctccaactcgcttgaggtcatcgcagcggggaagaaggggctttcccagccagatccttctttgacgtgccgctggccaccaccgcgccctccatcgcatcgccactcccgctagctcgaggtcgtcacaatggggaagaagggctgcaagatgaagacacacaagcgatttcgggtgacaaggaaggacaagatcatgcggcggtgcgctgggaagcaacacttgctcgccaagaaaaacaccaagcgcaagaagagactctccaagatggattcatctgctttagctcaattgggatggccagatatgcggataccaatcttatacaccttatcatggccagatagaatctatcgccctagctcaatttgttaaatctgtctagatatttgcaagcatgacatcttcacaactcctgggctacttttacaggacatctgatgcttttatttggaaatgacctccaagaattcaggtcttattttttattacagtatggggttgttctaataagctactggcatatgatggtaatacttgataaattcgtatggatgagggaaacctaagtcagctgttggtatgtgcatctgtgattaaatctgatgggtttttaatcagaaaaattatgacaaccatcttataaattttaggaaatagatatattattgtacttaaaactaaattttctgaacagctcatcaaacttggaccttgacctaaactcatttcaattttggtgtcattttgaatagttatatgtacgagttgagttggataccatggtaaggttgctaaacatgaatatgctttcgaaaaaaggatgttaagtaacttagtgactctgcttaacactgtaggatttgaggctgccatagtatgctctctgaccgtgctaacgggaggaaggagatgatttaagttctccatgtttataaccagaaagaggaggatagtccaatcatggtaactaaatagtaggtagtaatgtttcacggtaaatcacagttctcgaatgcgatatgatctttgactcggagtattgaagactaatttagtttgagtttgagattagttgtttttgtcattaataaactcacattagcgtctggttacgagctcactactagattttagatctccatttttggtgtacttctgctgcatgtgcctcccatagttgcggatttgcaggtatcacctgattccttttgatttttggattgagatacagtaaaagttatctttgcctgtttccaccacactgtatcatacaggtaaacatgaatacaaggctggcttgatctggcaagtgctcgccattctatgggcccatcacacttttcgagtacactgtttgatcatgaagagcagtctgctgccactaaacttgaggttgttgatcatgattgtctgaaaatttatcggggatatgccttgggatggagaaatgtcacagaacacaggatgaagacgattccaagaatccacccatgtcaggactagaagacgccttcacatcacggagtagagctctcagcaacaacagtgcaacgatgtttggacttttgttcacatatgggagtgtttaaactcctgcacctagatttagaaacaccaccatgtaaaatagacaaggcggtgcttttgcaaacatgatgctgccacgagacccgaacttatgtatggccaaacatgttaacatattttgtatgtcatgggctgttccagaaacattctgaaatacacggttccttctaaattctatattttgtcttgatagaacgcccgtaaaagtgcttcaatgttctagtttacatgaaaggtatatagcaatttactcaagaattctattgtctctataggacggctccacttattctagtaaaataaaaaaaactggattaggtgggagcaagcgagtgtaggttgggacttgggaataactaggtttagcaagcgacggtctaggatatgttttattgattttaatcgatccgaaaatttaaaactacgag

SEQ ID NO: 203113 - DNA, 1653 bp, Zea Mays
gcgaaaaaaccattagcaagaccaaggcacgggcgcacacgggcacacggcggttaggggccgcggggtacaagtgtaaaccaggagtgggggctttcgccgcgcgcgcatggtgctccgcgaaagccgagcggccggacaagtgaagcgcggccacgatcgaccggccccggccccccatcgtcgcatcccatccatcccatttcccccacgagccctaggcgcgtccacggcggcacggaaccggagatggaggagagcgacgcggcggagggggtggcggtgcagctgatcgacggcgagggcgagttcgcggccgagggggcggagcggttcatggcggccgccggcgtcgccgggtgcgggctctcctacgccgtcgtctccatcatggggccacagagcagcggaaagagtaccttgttgaatcaattatttggtaccaattttagggagatggatgcattcagaggaaggagtcaaactactaaaggtatctggatagcacgctgtgttggtgttgagccttgtactgttgtattggatcttgagggtaccgatggaagagagagaggagaggatgacactgcatttgagaagcaaagttcgttatttgctcttgcaatttcagatatagttctaattaacatgtggtgccatgatattggccgtgagcaagctgccaataaaccactcctaaagacagtatttcagactccacttgaacatctagaaccagttctaagggaggatatacaaaagatatggaactctgttgccaagccagaggcacacaaagacacccctatcaatgaattcttcaatgtgcaagttactgcattgtccagttttgaggaaaaagaggaccagtttagggaacaggttcaacaacttaggcagagattttcaaattcaattgcaccaggaggtcttgcaggtgatagaagaggagtagttcctgcttcaggttttttgtttagttcacaacagatttggaaagttatccgagagaacaaggatcttgatcttcctgctcacaaggtaatggttgctacagttcgatgtgatgaaattgcaaacgagaagtttggatgcataacctcagacacagaatggttggatgtggagagtgctgtccaatctggtccagtacctggttttggaaaaaaacttggcaatatcgtcgacgttcacttgcaagagtatgacaaagaagctgtctattttgatgaagctgtaaggaaaggaaaacgacagcatttggagtccagaatactgaatcttgtccaacctgcattccagaaaatgttgactcatctgcgtgtgaaggctctagaaaaatttaaaactggtcttaattcatctttggagagtggaaaaggattcgcagtatctgctcgagacaatactgaatgctctctcaaagaatttgaacaaggctgtgcagatgctataatcaagcaagcgaactgggactgctctaaaatgctagagaaagttcggcgtgatattgaagatcatgcactttcaattcgtgaaagcaagctatccgaaatgacaagacacgctaaggttatgtatggcaagctgaaagagattttaatcactagcttagcaatgcataattttcttctagatttatttgcatatctg

SEQ ID NO: 203114 - DNA, 2514 bp, Zea Mays
atggaggagagcgacgcggcggagggggtggcggtgcagctgatcgacggcgagggcgagttcgcggccgagggggcggagcggttcatggcggccgccggcgtcgccgggtgcgggctctcctacgccgtcgtctccatcatggggccacagagcagcggaaagagtaccttgttgaatcaattatttggtaccaattttagggagatggatgcattcagaggaaggagtcaaactactaaaggtatctggatagcacgctgtgttggtgttgagccttgtactgttgtattggatcttgagggtaccgatggaagagagagaggagaggatgacactgcatttgagaagcaaagttcgttatttgctcttgcaatttcagatatagttctaattaacatgtggtgccatgatattggccgtgagcaagctgccaataaaccactcctaaagacagtatttcagactccacttgaacatctagaaccagttctaagggaggatatacaaaagatatggaactctgttgccaagccagaggcacacaaagacacccctatcaatgaattcttcaatgtgcaagttactgcattgtccagttttgaggaaaaagaggaccagtttagggaacaggttcaacaacttaggcagagattttcaaattcaattgcaccaggaggtcttgcaggtgatagaagaggagtagttcctgcttcaggttttttgtttagttcacaacagatttggaaagttatccgagagaacaaggatcttgatcttcctgctcacaaggtaatggttgctacagttcgatgtgatgaaattgcaaacgagaagtttggatgcataacctcagacacagaatggttggatgtggagagtgctgtccaatctggtccagtacctggttttggaaaaaaacttggcaatatcgtcgacgttcacttgcaagagtatgacaaagaagctgtctattttgatgaagctgtaaggaaaggaaaacgacagcatttggagtccagaatactgaatcttgtccaacctgcattccagaaaatgttgactcatctgcgtgtgaaggctctagaaaaatttaaaactggtcttaattcatctttggagagtggaaaaggattcgcagtatctgctcgagacaatactgaatgctctctcaaagaatttgaacaaggctgtgcagtgtttagccatgacaaggattcaattccaagggtctggacaggaaaggaagatgttcgtgcaatagcaaaggaagctcgatctgcggctctcaaacttctgtctgtaatggcggccattcgctgggatgacgagccagataggattgaaagcatcctcacttcaacacttctggaaggctctgttgtatcaaagattgcaagtgctgcttctgctgatccacttgcttctaccacttgggaagagattgctccaaagcatacaatgattaccccgtctcagtgcaagtcactgtggaaacaatttaaagcagaaactgagttcacgattacacaagcagtatccacacagcaagctcacaggcgcggtaatagtaaactgcctcctccttgggcaatcgtggccattgctattcttggtttcaatgagatcatggtgcttattaggaatcccatttatctgttcttgctatttgtgggctacttgatggtcaaagctttggcgatgcagctagatgtcagcagagaattccagaatggagtggttcctggaataatctctgtgtcggtgaagctcctaccagcgatacagaacctggtgaacaaagtggcagccgagcagcaagctgagcaccagcagcagcacccgcaccctcaccctcacactcaggccccaggacccccacagccacagatgcagccgccgccgctgctcctgagcccgagaagccccatgagcgagctgcggaggctgcacatgccgcgcagcccgcgcagcccgcgcaaggtggcgtcgccggcgccatcctcgtcgtcgtcatcgtctgccgtgtcgtcccctaggcacgttggcgaggaccagaagccaagaccaggggcagtcggggcgcctgagaacgaggccaccgtcgccgactcgatagtgtgatccacgcaccagccatcgtggcgcgcgtttgactgctataggtacaaggatatcaaggcagaaataatgcaggaccctcttctgccgtgcaatcctttagtttttgcaaggagagggaggggataatgcatagatggacaattgctacctggcaccatttttcagcatatgtatagaaaggagctacccatttgaaactgaaagtcgtaggcattgtttaattaagtgcgctagaaataccccagccgcattcagctctttttatatatatgctaacaccgtaatctaatgtttaaacgctatccggttcattggctacaactgtcaatgatatgtaccgagacttattacttcatagctatcggtaatctatctactacgacttgtagg

SEQ ID NO: 203115 - DNA, 789 bp, Zea Mays
ctgctctatatctttgattctggcaacactgattttggtgattccaagatcccaaacactactgagatcaaaaccaagcctgatggttgggaaactacttcaagaggacaggatgggaacatatgggatatctcacagcgagaagatgacattctaatacaggaatttgaaaggcgaattgcttttagtaaacagcagattgctagcttcatcaaaacccacatttttagtcggaggcgtcctatcgatggatggaagtacatgattgaagaaattggccccaacgcaagaaaaggaaaggggagtgtgcaaagattaccaagtgtcagtgatcctgcaacccagccttacagggaagaaactcctgcaattgcttctagttcctccttcagaggcaatcggccatgatggtgttcgataaaccaaatcttttgctggtttcactggcatagtttatacaggcattttccccttccttttggcttcaaatgtatggtggatgactccttgcgaagaacatgacgaactttccttctgcgttgtataattttgtaatgaatgtgacgctttctgatgaaccagcaatggaagcgtttaagttttctagttactactctctctgttccaaccctccattccaaattgttccaacttgtaagtcgttggcttttctaaagttactattccctccgttacaattcctttctttcaaattctaggtctagattttcaaattgtaagtcgttttagctttcctttctaattgtaagtccttttgacacttctaaa

SEQ ID NO: 203116 - DNA, 4747 bp, Zea Mays
ccagagagttgtacttgtacacacagtgagacactagtgacgaggcatggacatcgccgtatccgtacatgactggttccagacgcgtgtgccgccgcagtacccagccgcccaggcaacgtgaccagccgagccgagccggagcggacgagcccccggcgtcgcgagataaaaaaagatcgggagcagaagagaagagagcaggagcagccgggcctaaacagaacagaacagaaaggaaaggagagacgcgtgtcctcccagccactgccaccctcccccacctctgcctctctcgaccccacccgacccggcgcggaaccggagccgcccgcccgcccgcagccccgccgcgccccgaacggtgccgacgagctccagcagcgcccaatggcggcggccttcctcgccctggagccccgcgtgacatgatccctggcttggctcccgagcaggggaatatccgcgcgagcacccccacccccacaccccagccatagggccccccaattctcgccttccccaccgcaaatccttctcgactcccgtatctcccctctcctcctccgccgcctcgcgcgccgcaattggcgttgtgctcgcgtggacccagatcgccgccaggaagtgtctaattggtggtgcgcataggactggctggatttcaatcgtgataatactgatatacggagactcattgctgatccagtgagcctattcgcgccaacttgattacagcctttctcacacaagtatggcgccctctgctgccgtcccgggtggctctgaggttgaggggtcaccacgcatggccaagttcctctgcagctttggaggcagtatccttccccgaccactcgatggctgtcttaggtatgttggcggcgagacaaggattgtcatgttgccgcgtgacatatcatatgccgacctggctgcacggatgagagagctctataaggatgctgatatcatcaaataccagcaacctgatgaggatttagatgcgctggtctcggttgtgaacgacgacgatgtggtgaacatgatggaggagtatgacaaggtcattgcgacaggggaggcgttcactcggctcaggatcttcttattttctcagcatttggatgatgatgctgcatcagtggatgtgcattacaatgtagacgagcgggaaacagagagaaggtatgtagatgcgcttaacagccttggtgatgttaagtcaccttcctcccctgtgtctgtggagcagctttttggcattggaggcaatgattcaggaattcctgattttgctggcttgagacatttgaatgtccctcgtccaacacatagtcagaggtatggagagatggattctccttggagccctgcctatgtctcaccaggccagtacggggtacatgacccaagggattttccaatttcaccatcatctgcaaggtttcaagtaggagcggaggattttgatgagaggactcctgacgactttgtaaggcagtcaccaaaatatcgtcattatgaggcgcattcaccatcacatatggataatttagtctggcttccacctggtgctgtaattcagcaaaatgcaggctttcctggtaatttgagccggtccaacaatttcttggatgggagcaatggatgtgatcactgccgttcaccattccataaggttcaaggttcagtgaatgatcctatctatatgaaccctcgttggactcggccagtccaacaacattttgaccaaccaagcatgattaatgattatcccggtcaccatgctaattcttgtccagattactgccgccctggtgatcattatgtgggaggtcaagatgttagattggaaaatggtgtttatgttaaagagcaaaatggtggtcatcctcccatgttctataatgagtcacatcctcacgatagagtctggcatgtgcataccaagcaaagtcatcagcgatacgaggatccaaggctgcatcatcctgctaatggtagagtgatcgagccatacattatggatgccaacaaagtatatgaagttcattcagcatctcttgctcgttctagccatgagagtcctcactattatcacggtagcagtgaggtcataaatgacacgtatcacaaccaacaagttggaggcagtgggtcgtatgtgcagccagcagggtttgaagaatcccctagccaccattacaaccactcttcggcctatggtgcagattccttttaccaaatgcagcagaatttgccacccattcaatctctgagaaggagagcgaacagccctgttcacactgcctcaccatatgattccccacacctgccaatatcaaatgggaccattaacacaaacttcgtaagaaatacaggtgatgtcagtccgaggataccagggctacctggatatgatcgaatgccaaacacatggactcctcccaacggcagcataccatatagagttgttgggcatgatgttcatgctgcctccatggaaaacactagtgcctttggtcctaggtctaatccaactgctgctcagtatgttcagcatttcattgctcctgaatcaatccagcatcaacctggagctccattgagggaggttcatcctgaaagatcataccctgaacccatgccgtcgtcatatgttgatggcaaagtagctgtttctgcattgcctctcactgatcaattatccaggttggatacaaacacaataaagaaacctgaaggtccagatgatgttaactcaactcaaaatgtgaatgaaacaactcctttgcatgctgtggatgaaccaagtaccttaccccaccatgttgtagttgtacatgaagttgatactaagcaggggaagccaaccgaacatgaaagcaggcaaaagcaacatgaagctggggctacagcactgcaggaatgtggggatatttcagaggatagattgaatttccttcctgaattgattgcctctgttaaaaaggcagcactggaagatgctgctgagacacggatagcccaatcagatgctaatggtgctgtttcacctgttcctgatgatgatgatgataatgaaaagaagttggatgcagcagctgctggtactacagatgcaaatcaggaccctgatttgcaaggaagcattgatcggcagaagagctccaagattgagtctacaactgctgaagctgaagctttgtctaaaggactacagactataaaaaatgacgatttggaggaaattagagagctgggttcaggtacttatggggcagtttatcatggtaaatggagaggatgtgatgtcgctgttaaaagaataaaagcgagttgctttgtaggaagaccatctgagagagagcgtttgattgcggatttctggaaagaagctctgatcctaagctcactccatcatccaaatgtggtttcattttatggtgtagttcgtgatggtccagatggaagcttagcaactgttactgagtttatgatcaatggatctctaaaacagtttctgaggaaaaaagacaggacaattgatcgccggaagagagtaatattagccatggatgctgcatttggcatggagtatttgcatgggaagaatatagtccattttgacctgaaatgtgagaatctactggtgaacatgagggatccgcagcgaccaatttgcaagatcggtgatcttggactgtcaaaggttaaacagcatactttggtatctggtggtgttagaggaaccttaccatggatggcaccagagcttctgagtgggaaaagtaatatggtgtcagacaagattgatgtctattcgtttggaattgtcatgtgggagttgcttactggggaagagccatactctggcatgcgtgctgctgaaattattgggggcattgtaaacgattccctacgtcctcaaattccttcatggtgtgatcctgagtggaagggattgatggaaagctgttggtccagtgatccagctgagagaccgtccttcacggatatatctcaaaggttgaggaaaatggccgccgcaatgaatgtgaagtaaaggtccggaagccatatttgtcttcatcgcagttgatgaccctactccaagtgataatttaacaagtgctgacttcatgggagaaaatctatgtcatggagattccaaagcatgtttgatgttttcttttaatcctggagtaaaccggctaccatttgccttccgccgaaaacaagtatgctatatggcgcattgtcttgatgggagctgttgcactgtcatgtaaataagttttgacttgctggcccgtagtagatgtgcaaagtaataggcacgatcacacagttacttttttttttcccatataaattgtgttctaggataggtagaacgaacatgactggagcgatccttgttcagattgtaaagaaaaggacagacccagtgctgacggttcttatatgagtggggtctggttaaagaataaccaaaacaagtcttatacttttatcttgcagagaggttgcatcgaatctaggactttggctcggtagaaaggtttttcaccactgcgttaggcctatacttttttcagtttaaccactgtgctagacctgcccccttttttgagtttgtacttggtctaaaaataagagtatactgttttccatgtgtatatatcatcacttcctatttgaatgccccaaaaaacaagagtacactgtttgtcatgtatac

SEQ ID NO: 203117 - DNA, 3717 bp, Zea Mays
ccgggcctaaacagaacagaacagaaaggaaaggagagacgcgtgtcctcccagccactgccaccctcccccacctctgcctctctcgaccccacccgacccggcgcggaaccggagccgcccgcccgcccgcagccccgccgcgccccgaacggtgccgacgagctccagcagcgcccaatggcggcggccttcctcgccctggagccccgcgtgacatgatccctggcttggctcccgagcaggggaatatccgcgcgagcacccccacccccacaccccagccatagggccccccaattctcgccttccccaccgcaaatccttctcgactcccgtatctcccctctcctcctccgccgcctcgcgcgccgcaattggcgttgtgctcgcgtggacccagatcgccgccaggaagtgtctaattggtggtgcgcataggactggctggatttcaatcgtgataatactgatatacggagactcattgctgatccagtgagcctattcgcgccaacttgattacagcctttctcacacaagtatggcgccctctgctgccgtcccgggtggctctgaggttgaggggtcaccacgcatggccaagttcctctgcagctttggaggcagtatccttccccgaccactcgatggctgtcttaggtatgttggcggcgagacaaggattgtcatgttgccgcgtgacatatcatatgccgacctggctgcacggatgagagagctctataaggatgctgatatcatcaaataccagcaacctgatgaggatttagatgcgctggtctcggttgtgaacgacgacgatgtggtgaacatgatggaggagtatgacaaggtcattgcgacaggggaggcgttcactcggctcaggatcttcttattttctcagcatttggatgatgatgctgcatcagtggatgtgcattacaatgtagacgagcgggaaacagagagaaggtatgtagatgcgcttaacagccttggtgatgttaagtcaccttcctcccctgtgtctgtggagcagctttttggcattggaggcaatgattcaggaattcctgattttgctggcttgagacatttgaatgtccctcgtccaacacatagtcagaggtatggagagatggattctccttggagccctgcctatgtctcaccaggccagtacggggtacatgacccaagggattttccaatttcaccatcatctgcaaggtttcaagtaggagcggaggattttgatgagaggactcctgacgactttgtaaggcagtcaccaaaatatcgtcattatgaggcgcattcaccatcacatatggataatttagtctggcttccacctggtgctgtaattcagcaaaatgcaggctttcctggtaatttgagccggtccaacaatttcttggatgggagcaatggatgtgatcactgccgttcaccattccataaggttcaaggttcagtgaatgatcctatctatatgaaccctcgttggactcggccagtccaacaacattttgaccaaccaagcatgattaatgattatcccggtcaccatgctaattcttgtccagattactgccgccctggtgatcattatgtgggaggtcaagatgttagattggaaaatggtgtttatgttaaagagcaaaatggtggtcatcctcccatgttctataatgagtcacatcctcacgatagagtctggcatgtgcataccaagcaaagtcatcagcgatacgaggatccaaggctgcatcatcctgctaatggtagagtgatcgagccatacattatggatgccaacaaagtatatgaagttcattcagcatctcttgctcgttctagccatgagagtcctcactattatcacggtagcagtgaggtcataaatgacacgtatcacaaccaacaagttggaggcagtgggtcgtatgtgcagccagcagggtttgaagaatcccctagccaccattacaaccactcttcggcctatggtgcagattccttttaccaaatgcagcagaatttgccacccattcaatctctgagaaggagagcgaacagccctgttcacactgcctcaccatatgattccccacacctgccaatatcaaatgggaccattaacacaaacttcgtaagaaatacaggtgatgtcagtccgaggataccagggctacctggatatgatcgaatgccaaacacatggactcctcccaacggcagcataccatatagagttgttgggcatgatgttcatgctgcctccatggaaaacactagtgcctttggtcctaggtctaatccaactgctgctcagtatgttcagcatttcattgctcctgaatcaatccagcatcaacctggagctccattgagggaggttcatcctgaaagatcataccctgaacccatgccgtcgtcatatgttgatggcaaagtagctgtttctgcattgcctctcactgatcaattatccaggttggatacaaacacaataaagaaacctgaaggtccagatgatgttaactcaactcaaaatgtgaatgaaacaactcctttgcatgctgtggatgaaccaagtaccttaccccaccatgttgtagttgtacatgaagttgatactaagcaggggaagccaaccgaacatgaaagcaggcaaaagcaacatgaagctggggctacagcactgcaggaatgtggggatatttcagaggatagattgaatttccttcctgaattgattgcctctgttaaaaaggcagcactggaagatgctgctgagacacggatagcccaatcagatgctaatggtgctgtttcacctgttcctgatgatgatgatgataatgaaaagaagttggatgcagcagctgctggtactacagatgcaaatcaggaccctgatttgcaaggaagcattgatcggcagaagagctccaagattgagtctacaactgctgaagctgaagctttgtctaaaggactacagactataaaaaatgacgatttggaggaaattagagagctgggttcaggtacttatggggcagtttatcatggtaaatggagaggatgtgatgtcgctgttaaaagaataaaagcgagttgctttgtaggaagaccatctgagagagagcgtttgattgcggatttctggaaagaagctctgatcctaagctcactccatcatccaaatgtggtttcattttatggtgtagttcgtgatggtccagatggaagcttagcaactgttactgagtttatgatcaatggatctctaaaacagtttctgaggaaaaaagacaggacaattgatcgccggaagagagtaatattagccatggatgctgcatttggcatggagtatttgcatgggaagaatatagtccattttgacctgaaatgtgagaatctactggtgaacatgagggatccgcagcgaccaatttgcaagatcggtgatcttggactgtcaaaggttaaacagcatactttggtatctggtggtgttagaggaaccttaccatggatggcaccagagcttctgagtgggaaaagtaatatggtgtcagacaagattgatgtctattcgtttggaattgtcatgtgggagttgcttactggggaagagccatactctggcatgcgtgctgctgaaattattgctttgaaagaacaaataaggccgag

SEQ ID NO: 203118 - DNA, 4384 bp, Zea Mays
ccgggcctaaacagaacagaacagaaaggaaaggagagacgcgtgtcctcccagccactgccaccctcccccacctctgcctctctcgaccccacccgacccggcgcggaaccggagccgcccgcccgcccgcagccccgccgcgccccgaacggtgccgacgagctccagcagcgcccaatggcggcggccttcctcgccctggagccccgcgtgacatgatccctggcttggctcccgagcaggggaatatccgcgcgagcacccccacccccacaccccagccatagggccccccaattctcgccttccccaccgcaaatccttctcgactcccgtatctcccctctcctcctccgccgcctcgcgcgccgcaattggcgttgtgctcgcgtggacccagatcgccgccaggaagtgtctaattggtggtgcgcataggactggctggatttcaatcgtgataatactgatatacggagactcattgctgatccagtgagcctattcgcgccaacttgattacagcctttctcacacaagtatggcgccctctgctgccgtcccgggtggctctgaggttgaggggtcaccacgcatggccaagttcctctgcagctttggaggcagtatccttccccgaccactcgatggctgtcttaggtatgttggcggcgagacaaggattgtcatgttgccgcgtgacatatcatatgccgacctggctgcacggatgagagagctctataaggatgctgatatcatcaaataccagcaacctgatgaggatttagatgcgctggtctcggttgtgaacgacgacgatgtggtgaacatgatggaggagtatgacaaggtcattgcgacaggggaggcgttcactcggctcaggatcttcttattttctcagcatttggatgatgatgctgcatcagtggatgtgcattacaatgtagacgagcgggaaacagagagaaggtatgtagatgcgcttaacagccttggtgatgttaagtcaccttcctcccctgtgtctgtggagcagctttttggcattggaggcaatgattcaggaattcctgattttgctggcttgagacatttgaatgtccctcgtccaacacatagtcagaggtatggagagatggattctccttggagccctgcctatgtctcaccaggccagtacggggtacatgacccaagggattttccaatttcaccatcatctgcaaggtttcaagtaggagcggaggattttgatgagaggactcctgacgactttgtaaggcagtcaccaaaatatcgtcattatgaggcgcattcaccatcacatatggataatttagtctggcttccacctggtgctgtaattcagcaaaatgcaggctttcctggtaatttgagccggtccaacaatttcttggatgggagcaatggatgtgatcactgccgttcaccattccataaggttcaaggttcagtgaatgatcctatctatatgaaccctcgttggactcggccagtccaacaacattttgaccaaccaagcatgattaatgattatcccggtcaccatgctaattcttgtccagattactgccgccctggtgatcattatgtgggaggtcaagatgttagattggaaaatggtgtttatgttaaagagcaaaatggtggtcatcctcccatgttctataatgagtcacatcctcacgatagagtctggcatgtgcataccaagcaaagtcatcagcgatacgaggatccaaggctgcatcatcctgctaatggtagagtgatcgagccatacattatggatgccaacaaagtatatgaagttcattcagcatctcttgctcgttctagccatgagagtcctcactattatcacggtagcagtgaggtcataaatgacacgtatcacaaccaacaagttggaggcagtgggtcgtatgtgcagccagcagggtttgaagaatcccctagccaccattacaaccactcttcggcctatggtgcagattccttttaccaaatgcagcagaatttgccacccattcaatctctgagaaggagagcgaacagccctgttcacactgcctcaccatatgattccccacacctgccaatatcaaatgggaccattaacacaaacttcgtaagaaatacaggtgatgtcagtccgaggataccagggctacctggatatgatcgaatgccaaacacatggactcctcccaacggcagcataccatatagagttgttgggcatgatgttcatgctgcctccatggaaaacactagtgcctttggtcctaggtctaatccaactgctgctcagtatgttcagcatttcattgctcctgaatcaatccagcatcaacctggagctccattgagggaggttcatcctgaaagatcataccctgaacccatgccgtcgtcatatgttgatggcaaagtagctgtttctgcattgcctctcactgatcaattatccaggttggatacaaacacaataaagaaacctgaaggtccagatgatgttaactcaactcaaaatgtgaatgaaacaactcctttgcatgctgtggatgaaccaagtaccttaccccaccatgttgtagttgtacatgaagttgatactaagcaggggaagccaaccgaacatgaaagcaggcaaaagcaacatgaagctggggctacagcactgcaggaatgtggggatatttcagaggatagattgaatttccttcctgaattgattgcctctgttaaaaaggcagcactggaagatgctgctgagacacggatagcccaatcagatgctaatggtgctgtttcacctgttcctgatgatgatgatgataatgaaaagaagttggatgcagcagctgctggtactacagatgcaaatcaggaccctgatttgcaaggaagcattgatcggcagaagagctccaagattgagtctacaactgctgaagctgaagctttgtctaaaggactacagattgcggatttctggaaagaagctctgatcctaagctcactccatcatccaaatgtggtttcattttatggtgtagttcgtgatggtccagatggaagcttagcaactgttactgagtttatgatcaatggatctctaaaacagtttctgaggaaaaaagacaggacaattgatcgccggaagagagtaatattagccatggatgctgcatttggcatggagtatttgcatgggaagaatatagtccattttgacctgaaatgtgagaatctactggtgaacatgagggatccgcagcgaccaatttgcaagatcggtgatcttggactgtcaaaggttaaacagcatactttggtatctggtggtgttagaggaaccttaccatggatggcaccagagcttctgagtgggaaaagtaatatggtgtcagacaagattgatgtctattcgtttggaattgtcatgtgggagttgcttactggggaagagccatactctggcatgcgtgctgctgaaattattgggggcattgtaaacgattccctacgtcctcaaattccttcatggtgtgatcctgagtggaagggattgatggaaagctgttggtccagtgatccagctgagagaccgtccttcacggatatatctcaaaggttgaggaaaatggccgccgcaatgaatgtgaagtaaaggtccggaagccatatttgtcttcatcgcagttgatgaccctactccaagtgataatttaacaagtgctgacttcatgggagaaaatctatgtcatggagattccaaagcatgtttgatgttttcttttaatcctggagtaaaccggctaccatttgccttccgccgaaaacaagtatgctatatggcgcattgtcttgatgggagctgttgcactgtcatgtaaataagttttgacttgctggcccgtagtagatgtgcaaagtaataggcacgatcacacagttacttttttttttcccatataaattgtgttctaggataggtagaacgaacatgactggagcgatccttgttcagattgtaaagaaaaggacagacccagtgctgacggttcttatatgagtggggtctggttaaagaataaccaaaacaagtcttatacttttatcttgcagagaggttgcatcgaatctaggactttggctcggtagaaaggtttttcaccactgcgttaggcctatacttttttcagtttaaccactgtgctagacctgcccccttttttgagtttgtacttggtctaaaaataagagtatactgttttccatgtgtatatatcatcacttcctatttgaatgccccaaaaaacaagagtacactgtttgtcatgtatac

SEQ ID NO: 203119 - DNA, 4362 bp, Zea Mays
ccgggcctaaacagaacagaacagaaaggaaaggagagacgcgtgtcctcccagccactgccaccctcccccacctctgcctctctcgaccccacccgacccggcgcggaaccggagccgcccgcccgcccgcagccccgccgcgccccgaacggtgccgacgagctccagcagcgcccaatggcggcggccttcctcgccctggagccccgcgtgacatgatccctggcttggctcccgagcaggggaatatccgcgcgagcacccccacccccacaccccagccatagggccccccaattctcgccttccccaccgcaaatccttctcgactcccgtatctcccctctcctcctccgccgcctcgcgcgccgcaattggcgttgtgctcgcgtggacccagatcgccgccaggaagtgtctaattggtggtgcgcataggactggctggatttcaatcgtgataatactgatatacggagactcattgctgatccagtgagcctattcgcgccaacttgattacagcctttctcacacaagtatggcgccctctgctgccgtcccgggtggctctgaggttgaggggtcaccacgcatggccaagttcctctgcagctttggaggcagtatccttccccgaccactcgatggctgtcttaggtatgttggcggcgagacaaggattgtcatgttgccgcgtgacatatcatatgccgacctggctgcacggatgagagagctctataaggatgctgatatcatcaaataccagcaacctgatgaggatttagatgcgctggtctcggttgtgaacgacgacgatgtggtgaacatgatggaggagtatgacaaggtcattgcgacaggggaggcgttcactcggctcaggatcttcttattttctcagcatttggatgatgatgctgcatcagtggatgtgcattacaatgtagacgagcgggaaacagagagaaggtatgtagatgcgcttaacagccttggtgatgttaagtcaccttcctcccctgtgtctgtggagcagctttttggcattggaggcaatgattcaggaattcctgattttgctggcttgagacatttgaatgtccctcgtccaacacatagtcagaggtatggagagatggattctccttggagccctgcctatgtctcaccaggccagtacggggtacatgacccaagggattttccaatttcaccatcatctgcaaggtttcaagtaggagcggaggattttgatgagaggactcctgacgactttgtaaggcagtcaccaaaatatcgtcattatgaggcgcattcaccatcacatatggataatttagtctggcttccacctggtgctgtaattcagcaaaatgcaggctttcctggtaatttgagccggtccaacaatttcttggatgggagcaatggatgtgatcactgccgttcaccattccataaggttcaaggttcagtgaatgatcctatctatatgaaccctcgttggactcggccagtccaacaacattttgaccaaccaagcatgattaatgattatcccggtcaccatgctaattcttgtccagattactgccgccctggtgatcattatgtgggaggtcaagatgttagattggaaaatggtgtttatgttaaagagcaaaatggtggtcatcctcccatgttctataatgagtcacatcctcacgatagagtctggcatgtgcataccaagcaaagtcatcagcgatacgaggatccaaggctgcatcatcctgctaatggtagagtgatcgagccatacattatggatgccaacaaagtatatgaagttcattcagcatctcttgctcgttctagccatgagagtcctcactattatcacggtagcagtgaggtcataaatgacacgtatcacaaccaacaagttggaggcagtgggtcgtatgtgcagccagcagggtttgaagaatcccctagccaccattacaaccactcttcggcctatggtgcagattccttttaccaaatgcagcagaatttgccacccattcaatctctgagaaggagagcgaacagccctgttcacactgcctcaccatatgattccccacacctgccaatatcaaatgggaccattaacacaaacttcgtaagaaatacaggtgatgtcagtccgaggataccagggctacctggatatgatcgaatgccaaacacatggactcctcccaacggcagcataccatatagagttgttgggcatgatgttcatgctgcctccatggaaaacactagtgcctttggtcctaggtctaatccaactgctgctcagtatgttcagcatttcattgctcctgaatcaatccagcatcaacctggagctccattgagggaggttcatcctgaaagatcataccctgaacccatgccgtcgtcatatgttgatggcaaagtagctgtttctgcattgcctctcactgatcaattatccaggttggatacaaacacaataaagaaacctgaaggtccagatgatgttaactcaactcaaaatgtgaatgaaacaactcctttgcatgctgtggatgaaccaagtaccttaccccaccatgttgtagttgtacatgaagttgatactaagcaggggaagccaaccgaacatgaaagcaggcaaaagcaacatgaagctggggctacagcactgcaggaatgtggggatatttcagaggatagattgaatttccttcctgaattgattgcctctgttaaaaaggcagcactggaagatgctgctgagacacggatagcccaatcagatgctaatggtgctgtttcacctgttcctgatgatgatgatgataatgaaaagaagttggatgcagcagctgctggtactacagatgcaaatcaggaccctgatttgcaaggaagcattgatcggcagaagagctccaagattgagtctacaactgctgaagctgaagctttgtctaaaggactacagattgcggatttctggaaagaagctctgatcctaagctcactccatcatccaaatgtggtttcattttatggtgtagttcgtgatggtccagatggaagcttagcaactgttactgagtttatgatcaatggatctctaaaacagtttctgaggaaaaaagacaggacaattgatcgccggaagagagtaatattagccatggatgctgcatttggcatggagtatttgcatgggaagaatatagtccattttgacctgaaatgtgagaatctactggtgaacatgagggatccgcagcgaccaatttgcaagatcggtgatcttggactgtcaaaggttaaacagcatactttggtatctggtggtgttagaggaaccttaccatggatggcaccagagcttctgagtgggaaaagtaatatggtgtcagacaagattgatgtctattcgtttggaattgtcatgtgggagttgcttactggggaagagccatactctggcatgcgtgctgctgaaattattgggggcattgtaaacgattccctacgtcctcaaattccttcatggtgtgatcctgagtggaagggattgatggaaagctgttggtccagtgatccagctgagagaccgtccttcacggatatatctcaaaggttgaggaaaatggccgccgcaatgaatgtgaagtaaagcatcgcagttgatgaccctactccaagtgataatttaacaagtgctgacttcatgggagaaaatctatgtcatggagattccaaagcatgtttgatgttttcttttaatcctggagtaaaccggctaccatttgccttccgccgaaaacaagtatgctatatggcgcattgtcttgatgggagctgttgcactgtcatgtaaataagttttgacttgctggcccgtagtagatgtgcaaagtaataggcacgatcacacagttacttttttttttcccatataaattgtgttctaggataggtagaacgaacatgactggagcgatccttgttcagattgtaaagaaaaggacagacccagtgctgacggttcttatatgagtggggtctggttaaagaataaccaaaacaagtcttatacttttatcttgcagagaggttgcatcgaatctaggactttggctcggtagaaaggtttttcaccactgcgttaggcctatacttttttcagtttaaccactgtgctagacctgcccccttttttgagtttgtacttggtctaaaaataagagtatactgttttccatgtgtatatatcatcacttcctatttgaatgccccaaaaaacaagagtacactgtttgtcatgtatac

SEQ ID NO: 203120 - DNA, 4790 bp, Zea Mays
ccgggcctaaacagaacagaacagaaaggaaaggagagacgcgtgtcctcccagccactgccaccctcccccacctctgcctctctcgaccccacccgacccggcgcggaaccggagccgcccgcccgcccgcagccccgccgcgccccgaacggtgccgacgagctccagcagcgcccaatggcggcggccttcctcgccctggagccccgcgtgacatgatccctggcttggctcccgagcaggggaatatccgcgcgagcacccccacccccacaccccagccatagggccccccaattctcgccttccccaccgcaaatccttctcgactcccgtatctcccctctcctcctccgccgcctcgcgcgccgcaattggcgttgtgctcgcgtggacccagatcgccgccaggaagtgtctaattggtggtgcgcataggactggctggatttcaatcgtgataatactgatatacggagactcattgctgatccagtgagcctattcgcgccaacttgattacagcctttctcacacaagtatggcgccctctgctgccgtcccgggtggctctgaggttgaggggtcaccacgcatggccaagttcctctgcagctttggaggcagtatccttccccgaccactcgatggctgtcttaggtatgttggcggcgagacaaggattgtcatgttgccgcgtgacatatcatatgccgacctggctgcacggatgagagagctctataaggatgctgatatcatcaaataccagcaacctgatgaggatttagatgcgctggtctcggttgtgaacgacgacgatgtggtgaacatgatggaggagtatgacaaggtcattgcgacaggggaggcgttcactcggctcaggatcttcttattttctcagcatttggatgatgatgctgcatcagtggatgtgcattacaatgtagacgagcgggaaacagagagaaggtatgtagatgcgcttaacagccttggtgatgttaagtcaccttcctcccctgtgtctgtggagcagctttttggcattggaggcaatgattcaggaattcctgattttgctggcttgagacatttgaatgtccctcgtccaacacatagtcagaggtatggagagatggattctccttggagccctgcctatgtctcaccaggccagtacggggtacatgacccaagggattttccaatttcaccatcatctgcaaggtttcaagtaggagcggaggattttgatgagaggactcctgacgactttgtaaggcagtcaccaaaatatcgtcattatgaggcgcattcaccatcacatatggataatttagtctggcttccacctggtgctgtaattcagcaaaatgcaggctttcctggtaatttgagccggtccaacaatttcttggatgggagcaatggatgtgatcactgccgttcaccattccataaggttcaaggttcagtgaatgatcctatctatatgaaccctcgttggactcggccagtccaacaacattttgaccaaccaagcatgattaatgattatcccggtcaccatgctaattcttgtccagattactgccgccctggtgatcattatgtgggaggtcaagatgttagattggaaaatggtgtttatgttaaagagcaaaatggtggtcatcctcccatgttctataatgagtcacatcctcacgatagagtctggcatgtgcataccaagcaaagtcatcagcgatacgaggatccaaggctgcatcatcctgctaatggtagagtgatcgagccatacattatggatgccaacaaagtatatgaagttcattcagcatctcttgctcgttctagccatgagagtcctcactattatcacggtagcagtgaggtcataaatgacacgtatcacaaccaacaagttggaggcagtgggtcgtatgtgcagccagcagggtttgaagaatcccctagccaccattacaaccactcttcggcctatggtgcagattccttttaccaaatgcagcagaatttgccacccattcaatctctgagaaggagagcgaacagccctgttcacactgcctcaccatatgattccccacacctgccaatatcaaatgggaccattaacacaaacttcgtaagaaatacaggtgatgtcagtccgaggataccagggctacctggatatgatcgaatgccaaacacatggactcctcccaacggcagcataccatatagagttgttgggcatgatgttcatgctgcctccatggaaaacactagtgcctttggtcctaggtctaatccaactgctgctcagtatgttcagcatttcattgctcctgaatcaatccagcatcaacctggagctccattgagggaggttcatcctgaaagatcataccctgaacccatgccgtcgtcatatgttgatggcaaagtagctgtttctgcattgcctctcactgatcaattatccaggttggatacaaacacaataaagaaacctgaaggtccagatgatgttaactcaactcaaaatgtgaatgaaacaactcctttgcatgctgtggatgaaccaagtaccttaccccaccatgttgtagttgtacatgaagttgatactaagcaggggaagccaaccgaacatgaaagcaggcaaaagcaacatgaagctggggctacagcactgcaggaatgtggggatatttcagaggatagattgaatttccttcctgaattgattgcctctgttaaaaaggcagcactggaagatgctgctgagacacggatagcccaatcagatgctaatggtgctgtttcacctgttcctgatgatgatgatgataatgaaaagaagttggatgcagcagctgctggtactacagatgcaaatcaggaccctgatttgcaaggaagcattgatcggcagaagagctccaagattgagtctacaactgctgaagctgaagctttgtctaaaggactacaggtatgttatgtgatctctgtgtgaattttactttatgtttcatttatactgtttatggatcatgcagactataaaaaatgacgatttggaggaaattagagagctgggttcaggtacttatggggcagtttatcatggtaaatggagaggatgtgatgtcgctgttaaaagaataaaagcgagttgctttgtaggaagaccatctgagagagagcgtttggtatgtctaattttcttgtcagttccatctattttaggttttgtgcttgcagatgtttgcactgacattacagtactggttcctcaaagtccttcacattattttctgaatgatattttgagctatccagctgggctgaggagaaagtaaatttgaacatatttttctgttcaaaatgattctagttcagatttatctaattttgcagattgcggatttctggaaagaagctctgatcctaagctcactccatcatccaaatgtggtttcattttatggtgtagttcgtgatggtccagatggaagcttagcaactgttactgagtttatgatcaatggatctctaaaacagtttctgaggaaaaaagacaggacaattgatcgccggaagagagtaatattagccatggatgctgcatttggcatggagtatttgcatgggaagaatatagtccattttgacctgaaatgtgagaatctactggtgaacatgagggatccgcagcgaccaatttgcaagatcggtgatcttggactgtcaaaggttaaacagcatactttggtatctggtggtgttagaggaaccttaccatggatggcaccagagcttctgagtgggaaaagtaatatggtgtcagacaagattgatgtctattcgtttggaattgtcatgtgggagttgcttactggggaagagccatactctggcatgcgtgctgctgaaattattgggggcattgtaaacgattccctacgtcctcaaattccttcatggtgtgatcctgagtggaagggattgatggaaagctgttggtccagtgatccagctgagagaccgtccttcacggatatatctcaaaggttgaggaaaatggccgccgcaatgaatgtgaagtaaagcatcgcagttgatgaccctactccaagtgataatttaacaagtgctgacttcatgggagaaaatctatgtcatggagattccaaagcatgtttgatgttttcttttaatcctggagtaaaccggctaccatttgccttccgccgaaaacaagtatgctatatggcgcattgtcttgatgggagctgttgcactgtcatgtaaataagttttgacttgctggcccgtagtagatgtgcaaagtaataggcacgatcacacagttacttttttttttcccatataaattgtgttctaggataggtagaacgaacatgactggagcgatccttgttcagattgtaaagaaaaggacagacccagtgctgacggttcttatatgagtggggtctggttaaagaataaccaaaacaagtcttatacttttatcttgcagagaggttgcatcgaatctaggactttggctcggtagaaaggtttttcaccactgcgttaggcctatacttttttcagtttaaccactgtgctagacctgcccccttttttgagtttgtacttggtctaaaaataagagtatactgttttccatgtgtatatatcatcacttcctatttgaatgccccaaaaaacaagagtacactgtttgtcatgtatac

SEQ ID NO: 203121 - DNA, 4404 bp, Zea Mays
ccgggcctaaacagaacagaacagaaaggaaaggagagacgcgtgtcctcccagccactgccaccctcccccacctctgcctctctcgaccccacccgacccggcgcggaaccggagccgcccgcccgcccgcagccccgccgcgccccgaacggtgccgacgagctccagcagcgcccaatggcggcggccttcctcgccctggagccccgcgtgacatgatccctggcttggctcccgagcaggggaatatccgcgcgagcacccccacccccacaccccagccatagggccccccaattctcgccttccccaccgcaaatccttctcgactcccgtatctcccctctcctcctccgccgcctcgcgcgccgcaattggcgttgtgctcgcgtggacccagatcgccgccaggaagtgtctaattggtggtgcgcataggactggctggatttcaatcgtgataatactgatatacggagactcattgctgatccagtgagcctattcgcgccaacttgattacagcctttctcacacaagtatggcgccctctgctgccgtcccgggtggctctgaggttgaggggtcaccacgcatggccaagttcctctgcagctttggaggcagtatccttccccgaccactcgatggctgtcttaggtatgttggcggcgagacaaggattgtcatgttgccgcgtgacatatcatatgccgacctggctgcacggatgagagagctctataaggatgctgatatcatcaaataccagcaacctgatgaggatttagatgcgctggtctcggttgtgaacgacgacgatgtggtgaacatgatggaggagtatgacaaggtcattgcgacaggggaggcgttcactcggctcaggatcttcttattttctcagcatttggatgatgatgctgcatcagtggatgtgcattacaatgtagacgagcgggaaacagagagaaggtatgtagatgcgcttaacagccttggtgatgttaagtcaccttcctcccctgtgtctgtggagcagctttttggcattggaggcaatgattcaggaattcctgattttgctggcttgagacatttgaatgtccctcgtccaacacatagtcagaggtatggagagatggattctccttggagccctgcctatgtctcaccaggccagtacggggtacatgacccaagggattttccaatttcaccatcatctgcaaggtttcaagtaggagcggaggattttgatgagaggactcctgacgactttgtaaggcagtcaccaaaatatcgtcattatgaggcgcattcaccatcacatatggataatttagtctggcttccacctggtgctgtaattcagcaaaatgcaggctttcctggtaatttgagccggtccaacaatttcttggatgggagcaatggatgtgatcactgccgttcaccattccataaggttcaaggttcagtgaatgatcctatctatatgaaccctcgttggactcggccagtccaacaacattttgaccaaccaagcatgattaatgattatcccggtcaccatgctaattcttgtccagattactgccgccctggtgatcattatgtgggaggtcaagatgttagattggaaaatggtgtttatgttaaagagcaaaatggtggtcatcctcccatgttctataatgagtcacatcctcacgatagagtctggcatgtgcataccaagcaaagtcatcagcgatacgaggatccaaggctgcatcatcctgctaatggtagagtgatcgagccatacattatggatgccaacaaagtatatgaagttcattcagcatctcttgctcgttctagccatgagagtcctcactattatcacggtagcagtgaggtcataaatgacacgtatcacaaccaacaagttggaggcagtgggtcgtatgtgcagccagcagggtttgaagaatcccctagccaccattacaaccactcttcggcctatggtgcagattccttttaccaaatgcagcagaatttgccacccattcaatctctgagaaggagagcgaacagccctgttcacactgcctcaccatatgattccccacacctgccaatatcaaatgggaccattaacacaaacttcgtaagaaatacaggtgatgtcagtccgaggataccagggctacctggatatgatcgaatgccaaacacatggactcctcccaacggcagcataccatatagagttgttgggcatgatgttcatgctgcctccatggaaaacactagtgcctttggtcctaggtctaatccaactgctgctcagtatgttcagcatttcattgctcctgaatcaatccagcatcaacctggagctccattgagggaggttcatcctgaaagatcataccctgaacccatgccgtcgtcatatgttgatggcaaagtagctgtttctgcattgcctctcactgatcaattatccaggttggatacaaacacaataaagaaacctgaaggtccagatgatgttaactcaactcaaaatgtgaatgaaacaactcctttgcatgctgtggatgaaccaagtaccttaccccaccatgttgtagttgtacatgaagttgatactaagcaggggaagccaaccgaacatgaaagcaggcaaaagcaacatgaagctggggctacagcactgcaggaatgtggggatatttcagaggatagattgaatttccttcctgaattgattgcctctgttaaaaaggcagcactggaagatgctgctgagacacggatagcccaatcagatgctaatggtgctgtttcacctgttcctgatgatgatgatgataatgaaaagaagttggatgcagcagctgctggtactataaaaaatgacgatttggaggaaattagagagctgggttcaggtacttatggggcagtttatcatggtaaatggagaggatgtgatgtcgctgttaaaagaataaaagcgagttgctttgtaggaagaccatctgagagagagcgtttgattgcggatttctggaaagaagctctgatcctaagctcactccatcatccaaatgtggtttcattttatggtgtagttcgtgatggtccagatggaagcttagcaactgttactgagtttatgatcaatggatctctaaaacagtttctgaggaaaaaagacaggacaattgatcgccggaagagagtaatattagccatggatgctgcatttggcatggagtatttgcatgggaagaatatagtccattttgacctgaaatgtgagaatctactggtgaacatgagggatccgcagcgaccaatttgcaagatcggtgatcttggactgtcaaaggttaaacagcatactttggtatctggtggtgttagaggaaccttaccatggatggcaccagagcttctgagtgggaaaagtaatatggtgtcagacaagattgatgtctattcgtttggaattgtcatgtgggagttgcttactggggaagagccatactctggcatgcgtgctgctgaaattattgggggcattgtaaacgattccctacgtcctcaaattccttcatggtgtgatcctgagtggaagggattgatggaaagctgttggtccagtgatccagctgagagaccgtccttcacggatatatctcaaaggttgaggaaaatggccgccgcaatgaatgtgaagtaaagcatcgcagttgatgaccctactccaagtgataatttaacaagtgctgacttcatgggagaaaatctatgtcatggagattccaaagcatgtttgatgttttcttttaatcctggagtaaaccggctaccatttgccttccgccgaaaacaagtatgctatatggcgcattgtcttgatgggagctgttgcactgtcatgtaaataagttttgacttgctggcccgtagtagatgtgcaaagtaataggcacgatcacacagttacttttttttttcccatataaattgtgttctaggataggtagaacgaacatgactggagcgatccttgttcagattgtaaagaaaaggacagacccagtgctgacggttcttatatgagtggggtctggttaaagaataaccaaaacaagtcttatacttttatcttgcagagaggttgcatcgaatctaggactttggctcggtagaaaggtttttcaccactgcgttaggcctatacttttttcagtttaaccactgtgctagacctgcccccttttttgagtttgtacttggtctaaaaataagagtatactgttttccatgtgtatatatcatcacttcctatttgaatgccccaaaaaacaagagtacactgtttgtcatgtatac

SEQ ID NO: 203122 - DNA, 4264 bp, Zea Mays
attttggagtctgatcgcagtcctttgatttcagcacgcgaagtgtctaattggtggtgcgcataggactggctggatttcaatcgtgataatactgatatacggagactcattgctgatccagtgagcctattcgcgccaacttgattacagcctttctcacacaagtatggcgccctctgctgccgtcccgggtggctctgaggttgaggggtcaccacgcatggccaagttcctctgcagctttggaggcagtatccttccccgaccactcgatggctgtcttaggtatgttggcggcgagacaaggattgtcatgttgccgcgtgacatatcatatgccgacctggctgcacggatgagagagctctataaggatgctgatatcatcaaataccagcaacctgatgaggatttagatgcgctggtctcggttgtgaacgacgacgatgtggtgaacatgatggaggagtatgacaaggtcattgcgacaggggaggcgttcactcggctcaggatcttcttattttctcagcatttggatgatgatgctgcatcagtggatgtgcattacaatgtagacgagcgggaaacagagagaaggtatgtagatgcgcttaacagccttggtgatgttaagtcaccttcctcccctgtgtctgtggagcagctttttggcattggaggcaatgattcaggaattcctgattttgctggcttgagacatttgaatgtccctcgtccaacacatagtcagaggtatggagagatggattctccttggagccctgcctatgtctcaccaggccagtacggggtacatgacccaagggattttccaatttcaccatcatctgcaaggtttcaagtaggagcggaggattttgatgagaggactcctgacgactttgtaaggcagtcaccaaaatatcgtcattatgaggcgcattcaccatcacatatggataatttagtctggcttccacctggtgctgtaattcagcaaaatgcaggctttcctggtaatttgagccggtccaacaatttcttggatgggagcaatggatgtgatcactgccgttcaccattccataaggttcaaggttcagtgaatgatcctatctatatgaaccctcgttggactcggccagtccaacaacattttgaccaaccaagcatgattaatgattatcccggtcaccatgctaattcttgtccagattactgccgccctggtgatcattatgtgggaggtcaagatgttagattggaaaatggtgtttatgttaaagagcaaaatggtggtcatcctcccatgttctataatgagtcacatcctcacgatagagtctggcatgtgcataccaagcaaagtcatcagcgatacgaggatccaaggctgcatcatcctgctaatggtagagtgatcgagccatacattatggatgccaacaaagtatatgaagttcattcagcatctcttgctcgttctagccatgagagtcctcactattatcacggtagcagtgaggtcataaatgacacgtatcacaaccaacaagttggaggcagtgggtcgtatgtgcagccagcagggtttgaagaatcccctagccaccattacaaccactcttcggcctatggtgcagattccttttaccaaatgcagcagaatttgccacccattcaatctctgagaaggagagcgaacagccctgttcacactgcctcaccatatgattccccacacctgccaatatcaaatgggaccattaacacaaacttcgtaagaaatacaggtgatgtcagtccgaggataccagggctacctggatatgatcgaatgccaaacacatggactcctcccaacggcagcataccatatagagttgttgggcatgatgttcatgctgcctccatggaaaacactagtgcctttggtcctaggtctaatccaactgctgctcagtatgttcagcatttcattgctcctgaatcaatccagcatcaacctggagctccattgagggaggttcatcctgaaagatcataccctgaacccatgccgtcgtcatatgttgatggcaaagtagctgtttctgcattgcctctcactgatcaattatccaggttggatacaaacacaataaagaaacctgaaggtccagatgatgttaactcaactcaaaatgtgaatgaaacaactcctttgcatgctgtggatgaaccaagtaccttaccccaccatgttgtagttgtacatgaagttgatactaagcaggggaagccaaccgaacatgaaagcaggcaaaagcaacatgaagctggggctacagcactgcaggaatgtggggatatttcagaggatagattgaatttccttcctgaattgattgcctctgttaaaaaggcagcactggaagatgctgctgagacacggatagcccaatcagatgctaatggtgctgtttcacctgttcctgatgatgatgatgataatgaaaagaagttggatgcagcagctgctggtactacagatgcaaatcaggaccctgatttgcaaggaagcattgatcggcagaagagctccaagattgagtctacaactgctgaagctgaagctttgtctaaaggactacagactataaaaaatgacgatttggaggaaattagagagctgggttcaggtacttatggggcagtttatcatggtaaatggagaggatgtgatgtcgctgttaaaagaataaaagcgagttgctttgtaggaagaccatctgagagagagcgtttgattgcggatttctggaaagaagctctgatcctaagctcactccatcatccaaatgtggtttcattttatggtgtagttcgtgatggtccagatggaagcttagcaactgttactgagtttatgatcaatggatctctaaaacagtttctgaggaaaaaagacaggacaattgatcgccggaagagagtaatattagccatggatgctgcatttggcatggagtatttgcatgggaagaatatagtccattttgacctgaaatgtgagaatctactggtgaacatgagggatccgcagcgaccaatttgcaagatcggtgatcttggactgtcaaaggttaaacagcatactttggtatctggtggtgttagaggaaccttaccatggatggcaccagagcttctgagtgggaaaagtaatatggtgtcagacaagattgatgtctattcgtttggaattgtcatgtgggagttgcttactggggaagagccatactctggcatgcgtgctgctgaaattattgggggcattgtaaacgattccctacgtcctcaaattccttcatggtgtgatcctgagtggaagggattgatggaaagctgttggtccagtgatccagctgagagaccgtccttcacggatatatctcaaaggttgaggaaaatggccgccgcaatgaatgtgaagtaaaggtccggaagccatatttgtcttgtatgtgtgttccccgcatccaatatatatagcgatatacaagaggaaggcagagttgaaacaggattattttgagtaaatatgttccatatgtcttggcagcatcgcagttgatgaccctactccaagtgataatttaacaagtgctgacttcatgggagaaaatctatgtcatggagattccaaagcatgtttgatgttttcttttaatcctggagtaaaccggctaccatttgccttccgccgaaaacaagtatgctatatggcgcattgtcttgatgggagctgttgcactgtcatgtaaataagttttgacttgctggcccgtagtagatgtgcaaagtaataggcacgatcacacagttacttttttttttcccatataaattgtgttctaggataggtagaacgaacatgactggagcgatccttgttcagattgtaaagaaaaggacagacccagtgctgacggttcttatatgagtggggtctggttaaagaataaccaaaacaagtcttatacttttatcttgcagagaggttgcatcgaatctaggactttggctcggtagaaaggtttttcaccactgcgttaggcctatacttttttcagtttaaccactgtgctagacctgcccccttttttgagtttgtacttggtctaaaaataagagtatactgttttccatgtgtatatatcatcacttcctatttgaatgccccaaaaaacaagagtacactgtttgtcatgtatac

SEQ ID NO: 203123 - DNA, 4220 bp, Zea Mays
atggtaaatcgttggagaactgggtagaggcaggattttctaaggtgcaattcagctattggatggaattgcaaaatacactactcctatatatgtggaagtgtctaattggtggtgcgcataggactggctggatttcaatcgtgataatactgatatacggagactcattgctgatccagtgagcctattcgcgccaacttgattacagcctttctcacacaagtatggcgccctctgctgccgtcccgggtggctctgaggttgaggggtcaccacgcatggccaagttcctctgcagctttggaggcagtatccttccccgaccactcgatggctgtcttaggtatgttggcggcgagacaaggattgtcatgttgccgcgtgacatatcatatgccgacctggctgcacggatgagagagctctataaggatgctgatatcatcaaataccagcaacctgatgaggatttagatgcgctggtctcggttgtgaacgacgacgatgtggtgaacatgatggaggagtatgacaaggtcattgcgacaggggaggcgttcactcggctcaggatcttcttattttctcagcatttggatgatgatgctgcatcagtggatgtgcattacaatgtagacgagcgggaaacagagagaaggtatgtagatgcgcttaacagccttggtgatgttaagtcaccttcctcccctgtgtctgtggagcagctttttggcattggaggcaatgattcaggaattcctgattttgctggcttgagacatttgaatgtccctcgtccaacacatagtcagaggtatggagagatggattctccttggagccctgcctatgtctcaccaggccagtacggggtacatgacccaagggattttccaatttcaccatcatctgcaaggtttcaagtaggagcggaggattttgatgagaggactcctgacgactttgtaaggcagtcaccaaaatatcgtcattatgaggcgcattcaccatcacatatggataatttagtctggcttccacctggtgctgtaattcagcaaaatgcaggctttcctggtaatttgagccggtccaacaatttcttggatgggagcaatggatgtgatcactgccgttcaccattccataaggttcaaggttcagtgaatgatcctatctatatgaaccctcgttggactcggccagtccaacaacattttgaccaaccaagcatgattaatgattatcccggtcaccatgctaattcttgtccagattactgccgccctggtgatcattatgtgggaggtcaagatgttagattggaaaatggtgtttatgttaaagagcaaaatggtggtcatcctcccatgttctataatgagtcacatcctcacgatagagtctggcatgtgcataccaagcaaagtcatcagcgatacgaggatccaaggctgcatcatcctgctaatggtagagtgatcgagccatacattatggatgccaacaaagtatatgaagttcattcagcatctcttgctcgttctagccatgagagtcctcactattatcacggtagcagtgaggtcataaatgacacgtatcacaaccaacaagttggaggcagtgggtcgtatgtgcagccagcagggtttgaagaatcccctagccaccattacaaccactcttcggcctatggtgcagattccttttaccaaatgcagcagaatttgccacccattcaatctctgagaaggagagcgaacagccctgttcacactgcctcaccatatgattccccacacctgccaatatcaaatgggaccattaacacaaacttcgtaagaaatacaggtgatgtcagtccgaggataccagggctacctggatatgatcgaatgccaaacacatggactcctcccaacggcagcataccatatagagttgttgggcatgatgttcatgctgcctccatggaaaacactagtgcctttggtcctaggtctaatccaactgctgctcagtatgttcagcatttcattgctcctgaatcaatccagcatcaacctggagctccattgagggaggttcatcctgaaagatcataccctgaacccatgccgtcgtcatatgttgatggcaaagtagctgtttctgcattgcctctcactgatcaattatccaggttggatacaaacacaataaagaaacctgaaggtccagatgatgttaactcaactcaaaatgtgaatgaaacaactcctttgcatgctgtggatgaaccaagtaccttaccccaccatgttgtagttgtacatgaagttgatactaagcaggggaagccaaccgaacatgaaagcaggcaaaagcaacatgaagctggggctacagcactgcaggaatgtggggatatttcagaggatagattgaatttccttcctgaattgattgcctctgttaaaaaggcagcactggaagatgctgctgagacacggatagcccaatcagatgctaatggtgctgtttcacctgttcctgatgatgatgatgataatgaaaagaagttggatgcagcagctgctggtactacagatgcaaatcaggaccctgatttgcaaggaagcattgatcggcagaagagctccaagattgagtctacaactgctgaagctgaagctttgtctaaaggactacagactataaaaaatgacgatttggaggaaattagagagctgggttcaggtacttatggggcagtttatcatggtaaatggagaggatgtgatgtcgctgttaaaagaataaaagcgagttgctttgtaggaagaccatctgagagagagcgtttgattgcggatttctggaaagaagctctgatcctaagctcactccatcatccaaatgtggtttcattttatggtgtagttcgtgatggtccagatggaagcttagcaactgttactgagtttatgatcaatggatctctaaaacagtttctgaggaaaaaagacaggacaattgatcgccggaagagagtaatattagccatggatgctgcatttggcatggagtatttgcatgggaagaatatagtccattttgacctgaaatgtgagaatctactggtgaacatgagggatccgcagcgaccaatttgcaagatcggtgatcttggactgtcaaaggttaaacagcatactttggtatctggtggtgttagaggaaccttaccatggatggcaccagagcttctgagtgggaaaagtaatatggtgtcagacaagattgatgtctattcgtttggaattgtcatgtgggagttgcttactggggaagagccatactctggcatgcgtgctgctgaaattattgggggcattgtaaacgattccctacgtcctcaaattccttcatggtgtgatcctgagtggaagggattgatggaaagctgttggtccagtgatccagctgagagaccgtccttcacggatatatctcaaaggttgaggaaaatggccgccgcaatgaatgtgaagtaaaggtccggaagccatatttgtcttcatcgcagttgatgaccctactccaagtgataatttaacaagtgctgacttcatgggagaaaatctatgtcatggagattccaaagcatgtttgatgttttcttttaatcctggagtaaaccggctaccatttgccttccgccgaaaacaagtatgctatatggcgcattgtcttgatgggagctgttgcactgtcatgtaaataagttttgacttgctggcccgtagtagatgtgcaaagtaataggcacgatcacacagttacttttttttttcccatataaattgtgttctaggataggtagaacgaacatgactggagcgatccttgttcagattgtaaagaaaaggacagacccagtgctgacggttcttatatgagtggggtctggttaaagaataaccaaaacaagtcttatacttttatcttgcagagaggttgcatcgaatctaggactttggctcggtagaaaggtttttcaccactgcgttaggcctatacttttttcagtttaaccactgtgctagacctgcccccttttttgagtttgtacttggtctaaaaataagagtatactgttttccatgtgtatatatcatcacttcctatttgaatgccccaaaaaacaagagtacactgtttgtcatgtatac

SEQ ID NO: 203124 - DNA, 4198 bp, Zea Mays
atggtaaatcgttggagaactgggtagaggcaggattttctaaggtgcaattcagctattggatggaattgcaaaatacactactcctatatatgtggaagtgtctaattggtggtgcgcataggactggctggatttcaatcgtgataatactgatatacggagactcattgctgatccagtgagcctattcgcgccaacttgattacagcctttctcacacaagtatggcgccctctgctgccgtcccgggtggctctgaggttgaggggtcaccacgcatggccaagttcctctgcagctttggaggcagtatccttccccgaccactcgatggctgtcttaggtatgttggcggcgagacaaggattgtcatgttgccgcgtgacatatcatatgccgacctggctgcacggatgagagagctctataaggatgctgatatcatcaaataccagcaacctgatgaggatttagatgcgctggtctcggttgtgaacgacgacgatgtggtgaacatgatggaggagtatgacaaggtcattgcgacaggggaggcgttcactcggctcaggatcttcttattttctcagcatttggatgatgatgctgcatcagtggatgtgcattacaatgtagacgagcgggaaacagagagaaggtatgtagatgcgcttaacagccttggtgatgttaagtcaccttcctcccctgtgtctgtggagcagctttttggcattggaggcaatgattcaggaattcctgattttgctggcttgagacatttgaatgtccctcgtccaacacatagtcagaggtatggagagatggattctccttggagccctgcctatgtctcaccaggccagtacggggtacatgacccaagggattttccaatttcaccatcatctgcaaggtttcaagtaggagcggaggattttgatgagaggactcctgacgactttgtaaggcagtcaccaaaatatcgtcattatgaggcgcattcaccatcacatatggataatttagtctggcttccacctggtgctgtaattcagcaaaatgcaggctttcctggtaatttgagccggtccaacaatttcttggatgggagcaatggatgtgatcactgccgttcaccattccataaggttcaaggttcagtgaatgatcctatctatatgaaccctcgttggactcggccagtccaacaacattttgaccaaccaagcatgattaatgattatcccggtcaccatgctaattcttgtccagattactgccgccctggtgatcattatgtgggaggtcaagatgttagattggaaaatggtgtttatgttaaagagcaaaatggtggtcatcctcccatgttctataatgagtcacatcctcacgatagagtctggcatgtgcataccaagcaaagtcatcagcgatacgaggatccaaggctgcatcatcctgctaatggtagagtgatcgagccatacattatggatgccaacaaagtatatgaagttcattcagcatctcttgctcgttctagccatgagagtcctcactattatcacggtagcagtgaggtcataaatgacacgtatcacaaccaacaagttggaggcagtgggtcgtatgtgcagccagcagggtttgaagaatcccctagccaccattacaaccactcttcggcctatggtgcagattccttttaccaaatgcagcagaatttgccacccattcaatctctgagaaggagagcgaacagccctgttcacactgcctcaccatatgattccccacacctgccaatatcaaatgggaccattaacacaaacttcgtaagaaatacaggtgatgtcagtccgaggataccagggctacctggatatgatcgaatgccaaacacatggactcctcccaacggcagcataccatatagagttgttgggcatgatgttcatgctgcctccatggaaaacactagtgcctttggtcctaggtctaatccaactgctgctcagtatgttcagcatttcattgctcctgaatcaatccagcatcaacctggagctccattgagggaggttcatcctgaaagatcataccctgaacccatgccgtcgtcatatgttgatggcaaagtagctgtttctgcattgcctctcactgatcaattatccaggttggatacaaacacaataaagaaacctgaaggtccagatgatgttaactcaactcaaaatgtgaatgaaacaactcctttgcatgctgtggatgaaccaagtaccttaccccaccatgttgtagttgtacatgaagttgatactaagcaggggaagccaaccgaacatgaaagcaggcaaaagcaacatgaagctggggctacagcactgcaggaatgtggggatatttcagaggatagattgaatttccttcctgaattgattgcctctgttaaaaaggcagcactggaagatgctgctgagacacggatagcccaatcagatgctaatggtgctgtttcacctgttcctgatgatgatgatgataatgaaaagaagttggatgcagcagctgctggtactacagatgcaaatcaggaccctgatttgcaaggaagcattgatcggcagaagagctccaagattgagtctacaactgctgaagctgaagctttgtctaaaggactacagactataaaaaatgacgatttggaggaaattagagagctgggttcaggtacttatggggcagtttatcatggtaaatggagaggatgtgatgtcgctgttaaaagaataaaagcgagttgctttgtaggaagaccatctgagagagagcgtttgattgcggatttctggaaagaagctctgatcctaagctcactccatcatccaaatgtggtttcattttatggtgtagttcgtgatggtccagatggaagcttagcaactgttactgagtttatgatcaatggatctctaaaacagtttctgaggaaaaaagacaggacaattgatcgccggaagagagtaatattagccatggatgctgcatttggcatggagtatttgcatgggaagaatatagtccattttgacctgaaatgtgagaatctactggtgaacatgagggatccgcagcgaccaatttgcaagatcggtgatcttggactgtcaaaggttaaacagcatactttggtatctggtggtgttagaggaaccttaccatggatggcaccagagcttctgagtgggaaaagtaatatggtgtcagacaagattgatgtctattcgtttggaattgtcatgtgggagttgcttactggggaagagccatactctggcatgcgtgctgctgaaattattgggggcattgtaaacgattccctacgtcctcaaattccttcatggtgtgatcctgagtggaagggattgatggaaagctgttggtccagtgatccagctgagagaccgtccttcacggatatatctcaaaggttgaggaaaatggccgccgcaatgaatgtgaagtaaagcatcgcagttgatgaccctactccaagtgataatttaacaagtgctgacttcatgggagaaaatctatgtcatggagattccaaagcatgtttgatgttttcttttaatcctggagtaaaccggctaccatttgccttccgccgaaaacaagtatgctatatggcgcattgtcttgatgggagctgttgcactgtcatgtaaataagttttgacttgctggcccgtagtagatgtgcaaagtaataggcacgatcacacagttacttttttttttcccatataaattgtgttctaggataggtagaacgaacatgactggagcgatccttgttcagattgtaaagaaaaggacagacccagtgctgacggttcttatatgagtggggtctggttaaagaataaccaaaacaagtcttatacttttatcttgcagagaggttgcatcgaatctaggactttggctcggtagaaaggtttttcaccactgcgttaggcctatacttttttcagtttaaccactgtgctagacctgcccccttttttgagtttgtacttggtctaaaaataagagtatactgttttccatgtgtatatatcatcacttcctatttgaatgccccaaaaaacaagagtacactgtttgtcatgtatac

SEQ ID NO: 203125 - DNA, 4045 bp, Zea Mays
agtgtctaattggtggtgcgcataggactggctggatttcaatcgtgataatactgatatacggagactcattgctgatccagtgagcctattcgcgccaacttgattacagcctttctcacacaagtatggcgccctctgctgccgtcccgggtggctctgaggttgaggggtcaccacgcatggccaagttcctctgcagctttggaggcagtatccttccccgaccactcgatggctgtcttaggtatgttggcggcgagacaaggattgtcatgttgccgcgtgacatatcatatgccgacctggctgcacggatgagagagctctataaggatgctgatatcatcaaataccagcaacctgatgaggatttagatgcgctggtctcggttgtgaacgacgacgatgtggtgaacatgatggaggagtatgacaaggtcattgcgacaggggaggcgttcactcggctcaggatcttcttattttctcagcatttggatgatgatgctgcatcagtggatgtgcattacaatgtagacgagcgggaaacagagagaaggtatgtagatgcgcttaacagccttggtgatgttaagtcaccttcctcccctgtgtctgtggagcagctttttggcattggaggcaatgattcaggaattcctgattttgctggcttgagacatttgaatgtccctcgtccaacacatagtcagaggtatggagagatggattctccttggagccctgcctatgtctcaccaggccagtacggggtacatgacccaagggattttccaatttcaccatcatctgcaaggtttcaagtaggagcggaggattttgatgagaggactcctgacgactttgtaaggcagtcaccaaaatatcgtcattatgaggcgcattcaccatcacatatggataatttagtctggcttccacctggtgctgtaattcagcaaaatgcaggctttcctggtaatttgagccggtccaacaatttcttggatgggagcaatggatgtgatcactgccgttcaccattccataaggttcaaggttcagtgaatgatcctatctatatgaaccctcgttggactcggccagtccaacaacattttgaccaaccaagcatgattaatgattatcccggtcaccatgctaattcttgtccagattactgccgccctggtgatcattatgtgggaggtcaagatgttagattggaaaatggtgtttatgttaaagagcaaaatggtggtcatcctcccatgttctataatgagtcacatcctcacgatagagtctggcatgtgcataccaagcaaagtcatcagcgatacgaggatccaaggctgcatcatcctgctaatggtagagtgatcgagccatacattatggatgccaacaaagtatatgaagttcattcagcatctcttgctcgttctagccatgagagtcctcactattatcacggtagcagtgaggtcataaatgacacgtatcacaaccaacaagttggaggcagtgggtcgtatgtgcagccagcagggtttgaagaatcccctagccaccattacaaccactcttcggcctatggtgcagattccttttaccaaatgcagcagaatttgccacccattcaatctctgagaaggagagcgaacagccctgttcacactgcctcaccatatgattccccacacctgccaatatcaaatgggaccattaacacaaacttcgtaagaaatacaggtgatgtcagtccgaggataccagggctacctggatatgatcgaatgccaaacacatggactcctcccaacggcagcataccatatagagttgttgggcatgatgttcatgctgcctccatggaaaacactagtgcctttggtcctaggtctaatccaactgctgctcagtatgttcagcatttcattgctcctgaatcaatccagcatcaacctggagctccattgagggaggttcatcctgaaagatcataccctgaacccatgccgtcgtcatatgttgatggcaaagtagctgtttctgcattgcctctcactgatcaattatccaggttggatacaaacacaataaagaaacctgaaggtccagatgatgttaactcaactcaaaatgtgaatgaaacaactcctttgcatgctgtggatgaaccaagtaccttaccccaccatgttgtagttgtacatgaagttgatactaagcaggggaagccaaccgaacatgaaagcaggcaaaagcaacatgaagctggggctacagcactgcaggaatgtggggatatttcagaggatagattgaatttccttcctgaattgattgcctctgttaaaaaggcagcactggaagatgctgctgagacacggatagcccaatcagatgctaatggtgctgtttcacctgttcctgatgatgatgatgataatgaaaagaagttggatgcagcagctgctggtactacagatgcaaatcaggaccctgatttgcaaggaagcattgatcggcagaagagctccaagattgagtctacaactgctgaagctgaagctttgtctaaaggactacagactataaaaaatgacgatttggaggaaattagagagctgggttcaggtacttatggggcagtttatcatggtaaatggagaggatgtgatgtcgctgttaaaagaataaaagcgagttgctttgtaggaagaccatctgagagagagcgtttgttcgtgatggtccagatggaagcttagcaactgttactgagtttatgatcaatggatctctaaaacagtttctgaggaaaaaagacaggacaattgatcgccggaagagagtaatattagccatggatgctgcatttggcatggagtatttgcatgggaagaatatagtccattttgacctgaaatgtgagaatctactggtgaacatgagggatccgcagcgaccaatttgcaagatcggtgatcttggactgtcaaaggttaaacagcatactttggtatctggtggtgttagaggaaccttaccatggatggcaccagagcttctgagtgggaaaagtaatatggtgtcagacaagattgatgtctattcgtttggaattgtcatgtgggagttgcttactggggaagagccatactctggcatgcgtgctgctgaaattattgggggcattgtaaacgattccctacgtcctcaaattccttcatggtgtgatcctgagtggaagggattgatggaaagctgttggtccagtgatccagctgagagaccgtccttcacggatatatctcaaaggttgaggaaaatggccgccgcaatgaatgtgaagtaaaggtccggaagccatatttgtcttcatcgcagttgatgaccctactccaagtgataatttaacaagtgctgacttcatgggagaaaatctatgtcatggagattccaaagcatgtttgatgttttcttttaatcctggagtaaaccggctaccatttgccttccgccgaaaacaagtatgctatatggcgcattgtcttgatgggagctgttgcactgtcatgtaaataagttttgacttgctggcccgtagtagatgtgcaaagtaataggcacgatcacacagttacttttttttttcccatataaattgtgttctaggataggtagaacgaacatgactggagcgatccttgttcagattgtaaagaaaaggacagacccagtgctgacggttcttatatgagtggggtctggttaaagaataaccaaaacaagtcttatacttttatcttgcagagaggttgcatcgaatctaggactttggctcggtagaaaggtttttcaccactgcgttaggcctatacttttttcagtttaaccactgtgctagacctgcccccttttttgagtttgtacttggtctaaaaataagagtatactgttttccatgtgtatatatcatcacttcctatttgaatgccccaaaaaacaagagtacactgtttgtcatgtatac

SEQ ID NO: 203126 - DNA, 1189 bp, Zea Mays
ccaagcaaccaaccaagattcgagccgtggagtcgaagcatatgggccacggccgccacaaaaaggaaacgagaaagacaaggcctccgcggctccgcccccgatgcctccgctcctcacctcacccgcctccctcccctccgcctcccctctcctcgtctcctgtatcggcgctctccaccgccccggccccttcctccaccagcgcgccgccgcctcggtccacttcctcgcgccgcacaggaagacccgaccgccccccgcgatgagctggcttgggaagctgggcctgagcgggcttggaggcagcccgcgcgcgtcggaggcgtcggcagcgctggcgcaggggcccgacgaggaccagcccgcgccggggaacgagttcgcgcaattcggcgccggctgcttctggggcgtggagctcgcgttccagcgcgtgccgggagtcacccgcacggaggtcggctacagccagggcaacatccacgatccgacctacgaggacgtctgcaccggcaccacaaaccacaacgaggtcgtccgcgtgcagtacgacccggccgcctgcaagtacgacgacctcctcgacaccttctgggcgcgccacgaccccactactcccaaccgacaggtcagggatatactactataacccagagcaggagaaggcggcaagagagtccctggagaagcagcagaagcttctgaaccggaagatcgtcaccgagatcgttccagcgaagaggttctatagagcagaagagtaccatcagcagtacctggagaagggcggccgcttcggcttcgggcaatctgcagccaagggctgcaatgaccccatccgatgctacggatgagccaaatggacctctacgtgcatggtgtgaatcgtaactgaataagggatgcatcaaagccagattttatactgctttcctaggtttgttttgccactattgaacggctgtaagagtttagctatatactaccatggtactccaatcatcgtgtacaaaaccatattgtattacatgcaagtgcgagtgagatttaagcgtaaacagattgttgtagaattcgtacgaattttacagagcagaaacaatgggatgcagggattgccagtgatgatggtggcatattttttttaaaatagtatattctacaaacccttttttttacagaggaa

SEQ ID NO: 203127 - DNA, 2282 bp, Zea Mays
cccatcccttcctctcctcggtcaaaccgcctttctctcccctactcttctccctccctccccgtctctctctctctctaaaaaaagtggcgcccggagaaccgagaggccggagaaagaaaggcggaaagagggagcaaaatctcactttgctgggagttctttcctctgtttccgactcctttgttctcttagtgttcttggttggtggaatggaagctcagcagctccatttgtgttccagagatcttcgtcgttctcgttcccctcgtgtgtagcctttggaggaattcccgttcacatgatccgtgcctggacgtgacggttttgccacgctctgctgcttccctttcggggagaagaggactcgactcaaatcatttggtatcgcagacgtcgcccttcccagttcagttgagagagatttctggcatgtccggcgcaagtaactatggatccctcatcgatgaatggttgctgccccctacaccaagcccaagaactctcatgtctagcttcctgaatgaagaattcagctctgcgccattctctggtccccatgatcaatctgaaaagagcagagaagttttgaattcgagcgatgagggctgcgagagcaggtttcagtgtcccgaaaattgatacttctcgagttggttcatccacagttattcgatctcctgtgtcaattccacctggtctaagtccaactacacttcttgagtctcctgtttttctttacaataaaatggcacaaccgtctccaaccactggcacattgccatttttgatggctacgaatgataagtcaacaatatcaccagctgccaagataactgaagattctacatttgataatgatgtgttttctttccaaccccacttaggttctgaacaaacagggttctctactgcagaaaaggactatggtgcctatgagagaaagcagtccttgtcgaatattcatcagcaggaatccagtctccagtcaagctttaccgcagtcaaggataacactagtgcaacaattgttaaagcgaagccatcttctagttccatgttcagtgatagtcactattcagctgatcaacagcaagctgacgagacaaacataaaggtgcaaggcaaaggtgtggaggctagatcagctgcttttgctcctgtatcagcgcacagtgatgcatctctcctggagtctcaagaagcacttgatgtctcctcaacactgtctaatgaagaggacgagagggcaacgcatggcactgtttctatagagtgtgatggtgatgaagctgatgctgtatctaaaagaaggaagctggaactagatgctttagaagctactgctactgctactacctccaccaccaataccatcgacatggggcctgcagcctcaagagctgtccgggagcctagggttgttgttcagaccacaagtgaggttgacattcttgacgacggttatcggtggcgcaagtatgggcagaaggttgttaagggcaatccaaatccaagtgcgcaagcatgtggaaagagcatcacacgatctgaaatcagtcatcacaacgtatgagggaaagcacaaccatgaagttccagcagccagaaatagtgggcaaggcagttccagcgctccatctgcatcacaagctgttggttctcatcgtaggcaagaacctgcacaggccagctttgctcactttggtacggcctctttcagctcgttcggtctcccaccgagtggtcagttgggaccaacaactggcaatttcggcttcgggatggttccgccaggcatgacgatcccagtgccctctctaggatcacttgcccctgtaaagatggttggaaattcatcaactatgcagggctacccagggcttatggtgccgggagaaccaaaggcagagcctgtctcgcaaccacttatccaaatggcaaatgcatctccaccagcttaccaacagatattgagcaggcctcctttcggtcatcagatgtaaataataggaaagagaaaggggataatagatttgcttcagcttgtatacatgatagctacgctgcaacatggctttagtgttcatggatcgtccaattttttatttctattttatttttctgcccacgcatgtctttgaagcaaagaatgctgaggatgataccctgtcgtgcctgttgtaatcacgtaaaggatacctttcgtctttttgagactcgaaattggaaaacgaccaatcaaaatttctggttgcgaatgcaaatctgatgaattgtgc

SEQ ID NO: 203128 - DNA, 2425 bp, Zea Mays
cccatcccttcctctcctcggtcaaaccgcctttctctcccctactcttctccctccctccccgtctctctctctctctaaaaaaagtggcgcccggagaaccgagaggccggagaaagaaaggcggaaagagggagcaaaatctcactttgctgggagttctttcctctgtttccgactcctttgttctcttagtgttcttggttggtggaatggaagctcagcagctccatttgtgttccagagatcttcgtcgttctcgttcccctcgtgtgtagcctttggaggaattcccgttcacatgatccgtgcctggacgtgacggttttgccacgctctgctgcttccctttcggggagaagaggactcgactcaaatcatttggtatcgcagacgtcgcccttcccagttcaggtgccagttgcagttgagagagatttctggcatgtccggcgcaagtaactatggatccctcatcgatgaatggttgctgccccctacaccaagcccaagaactctcatgtctagcttcctgaatgaagaattcagctctgcgccattctctggtccccatgatcaatctgaaaagagcagagaagttttgaattcgagcgatgaggttccttcacatgctgtcaaaggcccatttcaaaatggtttcccaaatttgttcagtgctaaatcaaactccaatggtggtttggcggagcgcagggctgcgagagcaggtttcagtgtcccgaaaattgatacttctcgagttggttcatccacagttattcgatctcctgtgtcaattccacctggtctaagtccaactacacttcttgagtctcctgtttttctttacaataaaatggcacaaccgtctccaaccactggcacattgccatttttgatggctacgaatgataagtcaacaatatcaccagctgccaagataactgaagattctacatttgataatgatgtgttttctttccaaccccacttaggttctgaacaaacagggttctctactgcagaaaaggactatggtgcctatgagagaaagcagtccttgtcgaatattcatcagcaggaatccagtctccagtcaagctttaccgcagtcaaggataacactagtgcaacaattgttaaagcgaagccatcttctagttccatgttcagtgatagtcactattcagctgatcaacagcaagctgacgagacaaacataaaggtgcaaggcaaaggtgtggaggctagatcagctgcttttgctcctgtatcagcgcacagtgatgcatctctcctggagtctcaagaagcacttgatgtctcctcaacactgtctaatgaagaggacgagagggcaacgcatggcactgtttctatagagtgtgatggtgatgaagctgatgctgtatctaaaagaaggaagctggaactagatgctttagaagctactgctactgctactacctccaccaccaataccatcgacatggggcctgcagcctcaagagctgtccgggagcctagggttgttgttcagaccacaagtgaggttgacattcttgacgacggttatcggtggcgcaagtatgggcagaaggttgttaagggcaatccaaatccaaggagctactacaaatgtacaaacccgggctgttcagtgcgcaagcatgtggaaagagcatcacacgatctgaaatcagtcatcacaacgtatgagggaaagcacaaccatgaagttccagcagccagaaatagtgggcaaggcagttccagcgctccatctgcatcacaagctgttggttctcatcgtaggcaagaacctgcacaggccagctttgctcactttggtacggcctctttcagctcgttcggtctcccaccgagtggtcagttgggaccaacaactggcaatttcggcttcgggatggttccgccaggcatgacgatcccagtgccctctctaggatcacttgcccctgtaaagatggttggaaattcatcaactatgcagggctacccagggcttatggtgccgggagaaccaaaggcagagcctgtctcgcaaccacttatccaaatggcaaatgcatctccaccagcttaccaacagatattgagcaggcctcctttcggtcatcagatgtaaataataggaaagagaaaggggataatagatttgcttcagcttgtatacatgatagctacgctgcaacatggctttagtgttcatggatcgtccaattttttatttctattttatttttctgcccacgcatgtctttgaagcaaagaatgctgaggatgataccctgtcgtgcctgttgtaatcacgtaaaggatacctttcgtctttttgagactcgaaattggaaaacgaccaatcaaaatttctggttgcgaatgcaaatctgatgaattgtgc

SEQ ID NO: 203129 - DNA, 2281 bp, Zea Mays
cccatcccttcctctcctcggtcaaaccgcctttctctcccctactcttctccctccctccccgtctctctctctctctaaaaaaagtggcgcccggagaaccgagaggccggagaaagaaaggcggaaagagggagcaaaatctcactttgctgggagttctttcctctgtttccgactcctttgttctcttagtgttcttggttggtggaatggaagctcagcagctccatttgtgttccagagatcttcgtcgttctcgttcccctcgtgtgtagcctttggaggaattcccgttcacatgatccgtgcctggacgtgacggttttgccacgctctgctgcttccctttcggggagaagaggactcgactcaaatcatttggtatcgcagacgtcgcccttcccagttcagttgagagagatttctggcatgtccggcgcaagtaactatggatccctcatcgatgaatggttgctgccccctacaccaagcccaagaactctcatgtctagcttcctgaatgaagaattcagctctgcgccattctctggtccccatgatcaatctgaaaagagcagagaagttttgaattcgagcgatgaggttccttcacatgctgtcaaaggcccatttcaaaatggtttcccaaatttgttcagtgctaaatcaaactccaatggtggtttggcggagcgcagggctgcgagagcaggcacaaccgtctccaaccactggcacattgccatttttgatggctacgaatgataagtcaacaatatcaccagctgccaagataactgaagattctacatttgataatgatgtgttttctttccaaccccacttaggttctgaacaaacagggttctctactgcagaaaaggactatggtgcctatgagagaaagcagtccttgtcgaatattcatcagcaggaatccagtctccagtcaagctttaccgcagtcaaggataacactagtgcaacaattgttaaagcgaagccatcttctagttccatgttcagtgatagtcactattcagctgatcaacagcaagctgacgagacaaacataaaggtgcaaggcaaaggtgtggaggctagatcagctgcttttgctcctgtatcagcgcacagtgatgcatctctcctggagtctcaagaagcacttgatgtctcctcaacactgtctaatgaagaggacgagagggcaacgcatggcactgtttctatagagtgtgatggtgatgaagctgatgctgtatctaaaagaaggaagctggaactagatgctttagaagctactgctactgctactacctccaccaccaataccatcgacatggggcctgcagcctcaagagctgtccgggagcctagggttgttgttcagaccacaagtgaggttgacattcttgacgacggttatcggtggcgcaagtatgggcagaaggttgttaagggcaatccaaatccaaggagctactacaaatgtacaaacccgggctgttcagtgcgcaagcatgtggaaagagcatcacacgatctgaaatcagtcatcacaacgtatgagggaaagcacaaccatgaagttccagcagccagaaatagtgggcaaggcagttccagcgctccatctgcatcacaagctgttggttctcatcgtaggcaagaacctgcacaggccagctttgctcactttggtacggcctctttcagctcgttcggtctcccaccgagtggtcagttgggaccaacaactggcaatttcggcttcgggatggttccgccaggcatgacgatcccagtgccctctctaggatcacttgcccctgtaaagatggttggaaattcatcaactatgcagggctacccagggcttatggtgccgggagaaccaaaggcagagcctgtctcgcaaccacttatccaaatggcaaatgcatctccaccagcttaccaacagatattgagcaggcctcctttcggtcatcagatgtaaataataggaaagagaaaggggataatagatttgcttcagcttgtatacatgatagctacgctgcaacatggctttagtgttcatggatcgtccaattttttatttctattttatttttctgcccacgcatgtctttgaagcaaagaatgctgaggatgataccctgtcgtgcctgttgtaatcacgtaaaggatacctttcgtctttttgagactcgaaattggaaaacgaccaatcaaaatttctggttgcgaatgcaaatctgatgaattgtgc

SEQ ID NO: 203130 - DNA, 4557 bp, Zea Mays
ctctaggtctttcttaccgagccgccaggagagcgggaccgggacgcgaggtgctgccgccgcccgcgcgcgggacgctcaaaacagccgcttccccaaccaaaaggcgcaagaaaactcgtccccgccgctcaaaaatctcccgcctcccgcggatgggatggcatccagtttcacagaccacacgcccacccgctccgccgctcgcgcccaaaaattttcgttcagccggctgcctgccccccaccaccacttccctcccgttccgaaaccccgattagccgccgacccgccgtctccccacgtatttgactggtgctagagccagcgcccagatcaaccttcctgagtccatcggcaccgcatctgcctcgcgatccgtctctctctctgtcccctcacggccgtagaccttttcgagggcggtatcggagggaggagagggggaggcgaaggcgggagtagtagaaactaggaagggccgttcgtgtcttgcggagaagatggagaacctgaggaggttcctgaacccgctggtgctcaacctgcagaagatggagctggagctcacctgccccgtctgcctgaagttgctcacctcgcccacaacgctgccgtgttaccacacatcctgcagcaagtgtgcccttacaccgacttcaaaaggctacagctgtgccatttgcaaatcaggctattgttctcaagatttaaggccagcttctcaccttgagtcgatagtgagcattcataggagcctcagctctaccgtcagcaccatgattgaacaacaggattctcaaattaacattcatgttgcaaaggcagcatctcatggaacaccagaatcaggaaacagaagtggggtggaggagaaatctgaccagatgaaatcttacaaccctgttgcttcaaagctagtatataaccaaccaactggacctgcatttgggaacattgatagtgttcaagcaaaagatcctgcatttgagaacaatgctggtgccgcagctgttgcaccaatggcttttgtacgaaagggtcattctgggtcacaatcttctgatggccctggagatttggactgtgacagcaatgacctcgaaggagaactgatgacaagcctatcacctcttcaaactgcattgaaacgagaggcaaatgcaatggatgatcataccagagaattgaagaagcaaaaatcaaatgatcaagttcaaagacaaacaaacatggccagtgcttggaaatgtgagttctgtcattcttcccaagttactgagtgtactggccctttgtcacattatttgaatggggagccagtagaagctgatcaagcttggaaatcaagtgttcagcatgtccatgagaaatgcattgaatgggctcctcaagcattctttactggtgacaccgcaaacaacttggggcctgagttggcccgtgcttctaagatcaaatgcagtgtttgtggcttaaaaggcgcagcacttggctgccttgtgaagagctgccgcaaaagttttcatgtcccatgtgcctacaacatcaaaggctgcaaatgggatcaagagaactttgttatgctgtgtcctacacattcgtcaaaaaagttgccttgtgagagattaaagccaaaaaagaaggccaagctgcagcaaccatcttccgacattgatggtccgatttcaccctctccgatgcaaagggctgaactttggactgcctcaccttttctgactagtgaatgggtgatatgtggatctgcgctcgttggccatgagaaggaaatcttggatcagtttgagtgtcacactggcatcacagtaaccaacacctggagttcagatgtgactcatgtgattgctaatacggatgaacgtggggcatgtgcacggacactcaaggtcctcatggctattttagctgggaagtgggttctcaatgtgaattggctgaaagcctgtatggaggctagggaaccagtcccagaagagccctacgagataaggtgtgatgttcatggctctgtcgacggccctcgctcaggaaggctccgagcgatgcagcaggcaccaggtctgtttgctgggttgaccttctacttcagtggccatttcatgccgggatacagggccaacctcgaagatttgatcgccgcagcaggggggtccgttctggagaaggccgagctctctagcacgtccttgatcctctacagcatggaggcgccgccgccccacaacaacctagacgccctcgagaccatcaacaagagattagccgaggcccaggaactggcgaccacggctggctgcaaagccattcctcatacatggcttctggactgtatcgcgtcgtgcgcggttgagttgaacgtgtcgtgttctactgcctaggttcaaacgtaggaatgtgacatctgctgctgtttttttttgaaaaaggagattaagagacgattggcttgttgtcttgatccaaagtatctttagacgttgtagcatgaaagcggaatttagtcggaataagcctgtgtatcttagtcaacgttactgtcggtgatgtcatccacatgtttcacctactgacaggtgcagtttgtctgatttttttcttcttgatttgtatctaaaaaaacataaaaggatgcactcagatccaacgctccagacggcgccatctgagaatttgcatatctgcctgtgggagtgaaatgattgtggagtgcattggaaacgaagcaaagcgggatggctgagctcaggtggttgcttcagaagtagttcaccagcaagcagccgggaggtcaggtccccctcacgcccctcggtatagcagtctcaccagtcaggcgtcctcctccctctggtctggtgtcccgtgaactctccttttttcggttcaccagaccatgatcctgatagcaaaccagttccccttttattcgatccatttataaggagccgctcctggtcctgagctagtgtgtgggtgtgcccacggcatggcgttcttcagcagcggatcccgggtgctggtcgaaatcctgacgaggatgcagagcgctgaaagaccaatgcctgtcgaccacaccttcttcgagtcgggatccattcgctaccatgtggaggcttcagcgtcggatcccgagaacgtgttcctatcgatatcgacgccatcgctctcctacgactacgaggaggctgcagctgctccctcgtcgagccgcctgcctgagctgaccctgcaggaggcgaggaagacgtatcacaggttcgccgagatggtggagccgccgagggaagggtacgtcctgacgctcaagctcaacttctccggcctcacccggcccaaagatcgcgtcaaggccattaaccaggtgtcgctgctgcaatccgtggtgctgagctcgcagctgaagcacatgctggggagcctcggctcgtcgggcacgatgaggctcgtgtacaacaaccagagggagcccttcttcgtcagcaagacggctgagaagataaacgctatcttccccatgcgtttcagggatgacacggacctggccatcgccacctccttcttccaggagctgcaggaggtcgggaactcgttcgcgagggcgcccaagtgcagctggtcgccgatcccaccgccggagctgcgcggggagaacgtgcaccacctcaccaccaacggcggattcgtctccttcggcgtcctgtcgcggcacgtgagggggaagcggccgccaagaccgcgtggatcctgctcaacttccagtcctacgtcaagtaccacatcaagtgcacccggagccacgtccagagccggatgcgggagcggctggaggccctgacggaggccgtccagaacgcgaggctgcgagggaatagcggcgacgacgacaagaagcggtcgtcacaagttgtgaagaagaggagcaagagacgtctcgccagcctggcgaaagcgagcgacagggtgcgcaagggtttcagggccgtcctggacaagatgaagcggctgcggctgagggtcagggtgaagggcctggaccggctccggcggcagttccggtgccggtgcttcgccgtgcctaggctgcccgcgccatctcgcaccggcagaaggaaggagcactacagataccacaaactggccgagtaatctatatatataccgaactttggtcatcgacgacgtcgattctacgtactgtattaactgatgatgagcatggctgctagtttaatagcgatggcactccgctattatatctagcattggagcgcaaaaaagagtttagatcttttctcctcacacaggcttaaaaggttttagcctctgcctaatgtggtaggcttagagttagagatggacattgaagacgccttaagtgtccatgcttcagtgttgttgcatttgagctaatttgtacctgtacttttagtgcccgtttggcacagctccagctcctgattctaagcgaggatctggaggagccgtgccaaacgggtattttttaaaccgattctcgtgtgaagccgaaagattggg

SEQ ID NO: 203131 - DNA, 498 bp, Zea Mays
agatcttctttaggcaattatagagaggatgggcgagcttgagaagctggaatgaaaagaaacaatggtgtagtgtacattagcaatttagcataggtccggagctagttctgcccaatcgacaaattacctccatatttttcacaattctttgtacctgttgtgcatcatctttgcttcacttaaacctttatcaagccgtgaatcggtgtatgtctttttaacgtttcctgaggttactgagggtttttgaactgcatgtgaggattttagtttgatggcaaagcgaaagatccaccgcatgaagaaaggatatgtgtctgtatgctgatttgatgtgtttctgaccaatcttgctgataggcctgaagttctcgctgataaatgggctggaacgacctgtgaggaccgaaggtcctttgggcttttgcgtactaagagcatctccaacaaggtgacctataaaaatgccctataatttgaaaatgagtatatttt

SEQ ID NO: 203132 - DNA, 4480 bp, Zea Mays
catcgctcgcatcgcccggcatctcgcccgccacatcccagatctcccgtccccgccccgcatctcgcccgccagcgaccggcgagggggcgcgcgcccgccgccgccgcgatgtacctggcgtacgggtggccgcagtcgatcccgctggacccggacaactcggaccgcgtggtcctcctccgcttgctcggccgcttcctcctcgccgtctgcccggcctcgctccacctctggtccgccgcacaacaccgggtccgcctcgcccgctccgaccgctctccggagtctctctccgcccacggctacaacgcgcacgccgtgtggagccccgacgccaagaccgtcgctgtcctgacctcttccttctacctctacgtttacaaggttcagcacttggggaagcaactgatcgtcggtggcaagcaggtcccggggctttgcctggctagcatatccctaatcatcaccgagaaggttcctctcgccaatggcgttgctataacgagcaatttcgtgtgtgacaacaaaagcatgctcctcggactatccaacgggcatgtgcaggtcatgtcctggaacgctgaggcaattcttctattgtccatgttgagctgtcggtgaagctaaggttgctggttgctttgtactcaggctgtcgcattgccctctgtactattggtaagaagggattgaggcagcctggcagcatcagagtggagagatggttggacactgatgatgcgatgtgtacttctgtggcttctgagcaacagattcttgctgttgggtgcagtagaggtgttgttgaattgtatgatcttgcagaaaacacacggcatatacgaaccatttcgttgtatgattgggggtattcagtggaagataccgggcctgttgcttgtatatcttggacgcctgacaattgtgctttcgcagttgggtggaaatttaggggacttactgtatggtctgtgtctggatgtcggttgatgtgtactattcgtcaaactggttcaaattctgcctcatctcctatggtgaaacgttgcactctaaaatttgagcctctaatgggaggaacatcacacattcaatgggatgataatggatataagttatttgctgtcgaagaaaacttgtcagaaagggttcttgctttctcatttgccaaatgttgcctaaacagagggctttcgggcacaacatattcccatcaggttctttatggggatgatcgaatccttttggtgcaaccggatgatgctgatgaactgaagatattgcatcttaatgttccaatttcatacatttcccagaactggccacttctacatgtggtggcaagcaatgatgggatgtacttggcagttgctggctctcacgggctagtgctatatgatttgcgaaataaaaggtggcgtttttttggcgatgttacacaagagcaaaagatccaatgcaaaggcctattgtggctgagaaaaattgttattgtgtgcaactatgttgaaacgtcaaacacgtacgagcttctctttttcccaagatatcatcttgattatagctctttactctaccgaaaaccactgcttggaaggccaattgtcatggatgttttccaggattatatattagttacttacagtccatttgatgtacatatcttccatgtgatgatctcaggagaattatcgccttctagcaatccagttttacagctttcaacagtgcgagaactttcaatcatgagtccaaagagtccacctgtttcaatgcgcttcattcctgaacaaaatgacaaagaagtgctgaagcgagatactaatgaatcttatgatcttttgtcccagcaaccatcaagatgtttgatcttgcggaccaatggggagctttctgtgcttgacatggacgatggacatgaacacgctcttacaaattcaattgaactcttttgggtcacctgttcccagtttgaagagaagggtagtcttatcaaagaggtttcatggcttgactatggtcatcagggtatgcaggtgtggtacccatcacatggagcaggtccttttaagcaagaggattttttgcagctggatccggagcttgagtttgatcgcgaggtgtatcctcttggtcttcttccaaacgttggtgtggttgttggtgtttcccagaggatgtccttctcaactgcggagtttccatgctttgagccttcacctcaagcccaaacaatattgcattgtttattacgacatctccttcagagggacaagattgatgaagctttgcgcttggcaaatttgtcagcagaaaaacctcacttctctcactgtctagagtggcttctgtttacagtatttgatgcagatatatcaaggccaagtgcttcaaaaaatcaggcttcacaaaaagttgattctcccaagaattctcttcttgagaaaacttgtgacctgctacggaactttcctgaatatatggatgttgtagtcagtgttgctaggaaaactgatggtcgacactgggctgatcttttctctacagctggacgatccacagagatgtttgaggaatgcttccaacagaggtggtacaggactgctgcttgctacatactggtcattgctaagctggagggccctgcagtcagccagtattgtgcactccgtttgctacaagctacacttgatgagtctttgtatgagcttgctggggagttggttcgcttcttgctaagatctggaagagattttgagaatgccactccagactccgagaagctctctccaagatttctaggctattttctgttccgttcgccatataagaggcaatcttctgatttgagaagtaactcaatgaaagaacttagtccacatattgcttctgttatgaacattctagagcgtcatgctagctatttgatgtctggcaaggagctttctaaactcgttgcttttgtcaaggggactcaatttgatcttgtggaatatctacaacgagaaaggcaagggtctgctcgtctagagaattttgcttctgcactcgaactgattggacaaaagctccaaatggatacactgcaaagtcgacttgatgcagagttccttctagctcatatgtgttcagtcaagtttaaggaatggatcgtggtgctagctactttattgcggcgtgcagaggttttggtggatctctttaggcatgatttgcgattgtggaaagcatatagcattactctacagtcacatgatgtattcacagaatatcttgaccttcttaatatcttggaggaggagctttcatctgtctctgatcttacattgcaaaatggaccattgtcatgaatgctggacaatgacactgattggaaaaacagctgaatgcggcgttttaaccttgagttaattaacacatacagtttgatgagatctgcggtggggccaggaatctgatgtaaatagattattcagggggtttttccctttgagcaacaccccggaggcgctatgacagctatttgtgcagtgatcagctaagcacctattgttgtattatttgtttgttgcagcagagttgaatgtgcattcttcgccttatggtaagtatgtgctgcactcttaacactgtaagtcatatgagtttttgaccaacaagttgttttctccgttccatagaatcgtgttaagagctagaaatctagaacatgtagattgtcctcacctgatgtttgtagactacgagatattattaaaactgacactatgaggttctcttcattgcattttttacatgtcatactgatgtttttactctgggcaactaatggaaataccctaacctgcaggaggaggaatttatacattgtggggttgccttcccctgccctttggcaggttagtgaagtgtgccctagaggaaagtggcatgtttgagagcaattagattggagggggctaaaatcccctttgttatttaaaattaaatagaagaggaatttagcctctcggatcccctcaagtcccctgtatcccaaacaaacccttgaagtgttttctacagctttaggaaatgtggtttacttctatggtaggtacatgggcaaccaatgtatatacatttatttttacagcatcctggccccgttcatccacaacgtgttgcacatgtctagcctctccattgcaagggcgtacagatatgtatataaaaatctacacaatgcatgcgcatgcaccggagtgtatctgtatcgaccatgaaaggtttggtacaagtctgaaaaagtatacattgttgtcaatcgctatcatatttactgctgtcgcgatgtgtagtagccagtaggctgaccggtcactgatgtgcgtcatggccagatgcacccttcgctgtatgaatagtcgccaacatgggcagcacgtagtgatgtagccatgtaggtccgctgatgcccgaaggagttaattaggag

SEQ ID NO: 203133 - DNA, 1336 bp, Zea Mays
gtcgctgaaggacagggagcggcagctagggtttcgcagtgcaaatattcgcggtgctgtggcggccggcggccgtcttctactatccgcggcgactgttgtctgctatccacgtgctgtggcggctggcctgtgctcctatccgcggttgccgagcaatatggattttaatgccattgggaggacattgggtgcaagatcaattgagcaaacttgtgacagcaagtgagaagagcacaacatccgttgagtctttggcaagaaaggaggacattgggtgctccattagagatatcatggcattggtgaaggagtgtggtgcagttctaggaacaaaagaacacttcatagcatctcaagtttttgtcaagagggcagagagggaaatgtttatgactttggacacactggaagaacgcttcaactggcttacaatgaaacatgattgggtcactaggatgattcactaggatctgtaattttttgtagcactgctgtgttgtaccatgcgcttgaagctgacgaagatttatttccacacccccctctaggaaagtactatgttgttgatgctggatatccaaatagggatgggtacttggcctcgtacaaaggacaacggtatcatgttccggaatggagaaatggtcctccacctaatggtgagcaagagctcttcaatcatttacactcaagtctacggaatgttgttgaacgcacatttggtgtatggaagatgaaatggagaattcttcttaagatgccaacttatcctatggacaaacaaaaaatgattgttgttgctacaatgtgtcttcacaatttcatccgtgagaatagtgcattggatgaggattttcagagatgtgatcgagacccagattatatccctactattccatcccgttataggcgacatgtccctcagaatgcatcagatacatctaccacagggtcgagtagtaggaacatgaataggttctgcgatgatgtatcgaaggtactttgggagtcgaggtgattagaaaaggtggttcgtgtcatattttggatatcgtgtcgtgctagttttatgcaatttatggattaaacatttgagaccattttatgcactaatatgatgggaatattttatatgttattgtttcatattttttctgtatatgcatcttacttattggtttgtaacaaagttgaactacaaagggtaaaacagacaatcgccacagaccaccaactttcaacatacaagaatcagtttacttgtcaaacggttttaaaaatgattctgattctctaggagaatcaggaggatcagctcctcaggaggatcatg

SEQ ID NO: 203134 - DNA, 1003 bp, Zea Mays
gtcgctgaaggacagggagcggcagctagggtttcgcagtgcaaatattcgcggtgctgtggcggccggcggccgtcttctactatccgcggcgactgttgtctgctatccacgtgctgtggcggctggcctgtgctcctatccgcggttgccgagcactgctgtgttgtaccatgcgcttgaagctgacgaagatttatttccacacccccctctaggaaagtactatgttgttgatgctggatatccaaatagggatgggtacttggcctcgtacaaaggacaacggtatcatgttccggaatggagaaatggtcctccacctaatggtgagcaagagctcttcaatcatttacactcaagtctacggaatgttgttgaacgcacatttggtgtatggaagatgaaatggagaattcttcttaagatgccaacttatcctatggacaaacaaaaaatgattgttgttgctacaatgtgtcttcacaatttcatccgtgagaatagtgcattggatgaggattttcagagatgtgatcgagacccagattatatccctactattccatcccgttataggcgacatgtccctcagaatgcatcagatacatctaccacagggtcgagtagtaggaacatgaataggttctgcgatgatgtatcgaaggtactttgggagtcgaggtgattagaaaaggtggttcgtgtcatattttggatatcgtgtcgtgctagttttatgcaatttatggattaaacatttgagaccattttatgcactaatatgatgggaatattttatatgttattgtttcatattttttctgtatatgcatcttacttattggtttgtaacaaagttgaactacaaagggtaaaacagacaatcgccacagaccaccaactttcaacatacaagaatcagtttacttgtcaaacggttttaaaaatgattctgattctctaggagaatcaggaggatcagctcctcaggaggatcatg

SEQ ID NO: 203135 - DNA, 1815 bp, Zea Mays
gtgatttgcattttttcaactagggtccaggattacgaaggaaaccaagaacgcaagaaacgtctaagaagaggggaggaaagatttgggtgtagattggtagatatattacacaggttttgttttggtgtaggttattagcaaataaatagctggagaagaagcctggcaaaaaaaaggtgaaatttgtggagaacatgtttgggatccaaaccagggatgtggcagaagatttcaactcctggaggaggacattaaggaacacacccaccgtctcaatgcccatgaacaaccacaacattatgtacaacacaggcaagagtttgttcaatgtacacctcatgtctgtcaagtttgaagacctgtatggattcatggtggagggcaatgtggacgatgtcaatgtgctgaatgaggtgcgggagaggatcagggagcaaggcagggtgtggtgggcgctggaggcaagcaagggtgcaaattggtatctccaaccaaagatttcttcaaacgagggggtgatcagtgtcacatcactcaagttgtcagtgctcactaatacaattacattgaggaggttgatcaggaaaggtgtccccccggtgttgaggccaaagatctggttatctgtgtcaggagcagccaagaagcggtcaacggtgccagaaacatactatgatgagctaattcgtgctacggaggggaaaaccacaccagccacaaggcaaatcgatcatgatcttcctcgcactttcccttgtcatccttggttgaacagtgacaaaggtcaggcatctctgcggcgagtacttgtggggtactcattccgtgattcagaagttgggtactgccagggtctaaactatgtagctgcactcttgttgcttgtgatgaagacagaggaggatgcattttggatgcttgctgtactccttgagaatgtacttgtcagtgattgctatactgacactctttctggatgtcatgtcgagcagagggtgttcaaagatctcctggctaagaagtgtccaaggattgctgctcaccttgaagcaatggggtttgatgtttcacttgttgctacagaatggtttttgtgcctcttctcaaagagcctgccttcagagacaacacttcgggtatgggatatattattcaatgaaggagccaatgttttgttccgtgttgctctcgcaattttcaagatgcgagaagatgatctactgcgcatccaacatatcggtgatgtgattgatattttgcaaacaaccacacatcatctatatgaccctgatgaactcctgacattcgcgtttgacaagattggttcaatgccaacaaatacaatcacaaaggaaaggaaaaagcaggagactgttgtcctggctgagcttgatcaaagaacaagacggctgagttcactcaagatggatggatagtttgtaaaatacaagttcttgaaagctgtagtcttggcctattcggcacctggtcccacagcgtatgcttcactgagcgaaaaatcatgggtctaccgaatactgggagatggaaagctgcagtatgtgtttgttgaacacgagtttttggacttcatattgtgtgcttttgtgtgttcttcctttgtgtttgcaattcatatttacaagatacgggccatggtgctgatttctcttattatgtatatgtctatttcatatctatttttatatatcttataattttaaaacctactaaaattctatcttggagtgcaacacatctacatcagcacactagtgcagtaactcgattgcgcatgcaactatagtaccg

SEQ ID NO: 203136 - DNA, 2171 bp, Zea Mays
aacaataataaacccgtatgctgagccggtgagccccaccatttcaccaaattggcaagaaagccgctagcaatccacagttgcgatttgcgggaacaactactactatcaaaaactttcgacattcgattatgctggcgatggaaatggagctcctggtccgatttcaatgagagccataggcctccaaaaatagggttcaaaaagggccagagagcaaggagtcatcccatttttagccgttgccgtagctggtcgtcgtcgtcgtcgctgctcccaatctgcggccgtcggtgttgccttcgactttaatccacaagggcgagcagcaccgaccgagccgatccgctcctcttcttggttcttcttcaataaatcagcagagcaggaaagatctgtgagcgttcttgcagccggcaggggtccaggattacgaaggaaaccaagaacgcaagaaacgtctaagaagaggggaggaaagatttgggtgtagattggtagatatattacacaggttttgttttggtgtaggttattagcaaataaatagctggagaagaagcctggcaaaaaaaaggtgaaatttgtggagaacatgtttgggatccaaaccagggatgtggcagaagatttcaactcctggaggaggacattaaggaacacacccaccgtctcaatgcccatgaacaaccacaacattatgtacaacacaggcaagagtttgttcaatgtacacctcatgtctgtcaagtttgaagacctgtatggattcatggtggagggcaatgtggacgatgtcaatgtgctgaatgaggtgcgggagaggatcagggagcaaggcagggtgtggtgggcgctggaggcaagcaagggtgcaaattggtatctccaaccaaagatttcttcaaacgagggggtgatcagtgtcacatcactcaagttgtcagtgctcactaatacaattacattgaggaggttgatcaggaaaggtgtccccccggtgttgaggccaaagatctggttatctgtgtcaggagcagccaagaagcggtcaacggtgccagaaacatactatgatgagctaattcgtgctacggaggggaaaaccacaccagccacaaggcaaatcgatcatgatcttcctcgcactttcccttgtcatccttggttgaacagtgacaaaggtcaggcatctctgcggcgagtacttgtggggtactcattccgtgattcagaagttgggtactgccagacagaggaggatgcattttggatgcttgctgtactccttgagaatgtacttgtcagtgattgctatactgacactctttctggatgtcatgtcgagcagagggtgttcaaagatctcctggctaagaagtgtccaaggattgctgctcaccttgaagcaatggggtttgatgtttcacttgttgctacagaatggtttttgtgcctcttctcaaagagcctgccttcagagacaacacttcgggtatgggatatattattcaatgaaggagccaatgttttgttccgtgttgctctcgcaattttcaagatgcgagaagatgatctactgcgcatccaacatatcggtgatgtgattgatattttgcaaacaaccacacatcatctatatgaccctgatgaactcctgacattcgcgtttgacaagattggttcaatgccaacaaatacaatcacaaaggaaaggaaaaagcaggagactgttgtcctggctgagcttgatcaaagaacaagacggctgagttcactcaagatggatggatagtttgtaaaatacaagttcttgaaagctgtagtcttggcctattcggcacctggtcccacagcgtatgcttcactgagcgaaaaatcatgggtctaccgaatactgggagatggaaagctgcagtatgtgtttgttgaacacgagtttttggacttcatattgtgtgcttttgtgtgttcttcctttgtgtttgcaattcatatttacaagatacgggccatggtgctgatttctcttattatgtatatgtctatttcatatctatttttatatatcttataattttaaaacctactaaaattctatcttggagtgcaacacatctacatcagcacactagtgcagtaactcgattgcgcatgcaactatagtaccg

SEQ ID NO: 203137 - DNA, 1809 bp, Zea Mays
cggtgtcagtgcgtcactactttccacacgcgcctctcgccccgtacgcagccgctctctcgtaaatcgtgatcttgtctgttgctctgctcttcgttcttcgcgtccgtccagcgacatcgtgcgcccggcaaggcaagaggaggcggcttgcgcggggggcatcgtgcaatggcgcggcggtgcccgtgcaggctgctgctagccgtggcggcggcggccgtgctcgtggccgcggcagcgcaggcgcaggagacgtgctcggggaccgtccccgcgccgccgcgccgcggggcgcgggtgtccgtggccagcttcggcggcgcgggcgacggacggacgctcaacacggcggcgttcgcgcgcgccgtcgccagcatcgagcgccgcgccgcgccgggcggggcggagctctacgtgccgcccggggtgtggctcacggggcccttcaacctcacctcgcgcatgacgctcttcctcgcgcgcggcgccgtcatccgcgccacgcaggacacatcaagctggcctctgattgaaccgctgccctcatacgggagaggacgtgagctgcccggcggaagatacacaagtttaatccatggcaatgggcttcaggatgttgtcatcacaggcgagaatggaactattgatggtcaaggcagcgcgtggtgggatatgtggaagaacaggacactgctctacacaaggcctcaccttcttgagctgatgagctcttctgatatcattgtctccaatgtcgtctttcaggattcgccattctggaacatccatcctgtttattgcagcaatgttgtgatcagaaacgtgactatcctagctccacatgactcccccaacacggatggaattgatccagattccagcagcaacatctgcatcgaggattgctacatttctactggtgacgattccatcgccatcaagagtggctgggatgagtatggaatcgcctatggccgcgccagttctggcatcaccgtgcggcggatcacaggctcctccccgtttgctggcttcgcggtcggaagcgagacatcaggtggcgtggagaacgtccttgcagagcacttgaacttcttcaactcagggtttgggatccatgtcaagaccaacacaggcaggggcggcttcatcaggaacatcactgtctcggatgtgacgctggataacgtccggtacggcctgcggatcgttggcgatgtcggcaatcaccccgacgacagctacaaccggagtgcgctcccgatcgtcgacgcccttacggtaaagaatgtccagggccagaacgtcagggaggctgggctgatcaagggcatccccaactcggccttctcccggatctgcctgtcgaacgtcaagttcactggtggcgcacctgtccggccgtggaagtgcgaggctgtcagcggtggcgctctcgacgtgcagccgtcaccatgcacagaactgacttcaacgtctgggacgagcttctgtacaaattcgctttgatgctttgccagctagctgagctgctgctatgcttctgtatctacgagtatgtatactggtgctttaaagcttgggcacccaagtatttatcttcccgaaaattaatttggttttactaatttatttgaacctctctatacgaagagaataattcttgactcgtataggactgaacaaaaaagtgtcactggttttcttatttacctgactcaatgttttattcacaaagtacttgtttctaagcatgtcctacccacatcctctccttattacatagctcgaacttgaagagctatc

SEQ ID NO: 203138 - DNA, 1026 bp, Zea Mays
cccaacaaagccagcacactgatcaatgttgtgatcagaaacgtgactatcctagctccacatgactcccccaacacggatggaattgatccagattccagcagcaacatctgcatcgaggattgctacatttctactggtgacgattccatcgccatcaagagtggctgggatgagtatggaatcgcctatggccgcgccagttctggcatcaccgtgcggcggatcacaggctcctccccgtttgctggcttcgcggtcggaagcgagacatcaggtggcgtggagaacgtccttgcagagcacttgaacttcttcaactcagggtttgggatccatgtcaagaccaacacaggcaggggcggcttcatcaggaacatcactgtctcggatgtgacgctggataacgtccggtacggcctgcggatcgttggcgatgtcggcaatcaccccgacgacagctacaaccggagtgcgctcccgatcgtcgacgcccttacggtaaagaatgtccagggccagaacgtcagggaggctgggctgatcaagggcatccccaactcggccttctcccggatctgcctgtcgaacgtcaagttcactggtggcgcacctgtccggccgtggaagtgcgaggctgtcagcggtggcgctctcgacgtgcagccgtcaccatgcacagaactgacttcaacgtctgggacgagcttctgtacaaattcgctttgatgctttgccagctagctgagctgctgctatgcttctgtatctacgagtatgtatactggtgctttaaagcttgggcacccaagtatttatcttcccgaaaattaatttggttttactaatttatttgaacctctctatacgaagagaataattcttgactcgtataggactgaacaaaaaagtgtcactggttttcttatttacctgactcaatgttttattcacaaagtacttgtttctaagcatgtcctacccacatcctctccttattacatagctcgaacttgaagagctatc

SEQ ID NO: 203139 - DNA, 2434 bp, Zea Mays
cccaaaataaaccattccttttttatctgcaaaatgcaaggtctagtctagtacacactcgacttgcaatatacaacacgcttgtggcctgaagaacggaagaactcggactcgagcaccccgaagcgagccaccgccgatctgctcctcctgagtcctgaccctcctccgtgcgctgcgcaggcatgaggctcctcctcgtcggcgccctactcctatgtgccaccgcggcggtggagtccaagccgcccctcgacaccctgggcatacccccgcaagatgaggcgtactacagaggcggcgtgattaaatgcagggacggatcaggcaggttctcccgggagcagctcaacgacgacttctgcgactgccccgacggcaccgacgagcccgggacatctgcgtgccctgaggcgaagttctactgcaagaatgcaggccacactccagtcacgatcttctcatcacgagtgaatgacggcatttgtgattgctgtgatgggagtgatgaatatgacagcaatatcacctgtaagaacacttgctgggaggctggcaaagcggcaagggagaaattgaagaagaaagtcgctacatacaaaagtggtgtagttattcggaatcaggaagttgagagggcaaaagaggcttatgctaaagacgaagcagagttagcaaaattgaagggtgaagagaaaatactccaaggacttgttgacaaactcaaagagcaaaagagacttatagagaaggcagaggaagaagaacgtttaagaaaagagaaggaagagaagagaataaaagaagctgaaaagcaagctgctgatgaaaagggaacacctgatgcctctccggatgtagattctaaggaaactcatgaccatgtgcaagaagatgaaaacaaggtagccgaagagcatgatgtacatgcaacggaccatgataatcatgcaacagaccatgataatcatgcagcagaaagcggagcatctgttgagcagcagggttctgtaaacaaagatgacattagcgttgaagctggaactttagatgaattgctgcacaaggagtctgcagtacctacattagagaaggatcatagctctgacaatcctgagggtttatcaagagaagagttaggtcgcatggtagcttcacgttggactggagaaagtgtaagtgaggttagtaaagatgataagaagggacatgaagatgagcaagaaataccagaacctgcaaaagaagcacttgaagacgaattagaaattccagaacctgctgaagaaaattatgatggttatcattcagaagttgaggatgacaggcataaatatgaagatgaagagtttgatcatgagtcagaagatgaatatgttgatgaccatgatgagcatgttgagtcctataaatctgatgatgaccagaaagatttaactgagccaggacatgcatcgtggttggacaaaattcagcagactgtacagaatgttttccaaaaattcaacttttttaggacccctgtagatttgtcagaggcttctcgtgttcgtaaggagtatgacgatgccaactcaaagctttcaaaaattcagtctaagatatccaatttagctgagaagctaaaacatgattttggcaaagacaaggagttctattccttttatgatcagtgctttgagaccaaggaaggaaagtatacttacaaggtctgtgcatataagaaagcatcacaggctgaagggcacagttccaccaacctggggagatgggacaaatttgaagaatcgtacagagtaatgcacttttcaggtggagacaaatgctggaatggtcctgaccgaagcctaaaggttaggcttagatgtgggctgagcaatgagcttaatgacgttgatgagcctagcagatgcgagtatgttgctgtattgtcgacgcccgcactctgcgtcgaggagaagctgaaggagctgcaaaacaaactggatgccatgtcttcgaagcagcccgggcatgatgaactttaaacggttccggcgtggacaaagaaaatttcaccaggaagcatagattgacagttacactcataaccttaagggtggaagtcaatgggggcatatggacaggaaagggccaagctgaagaaatgggaatgctcatcccgagttgtttggtggaggcgactgcaaccgtgcttttctttgtggtttaacattgctctatttaattagggagagacgctaggcttttgcgtctccagcttcattgccagccattacacatttgatggaatatatagtaagaaacagtacactctgaaccatcataatttgaagatgctagttaaccccgggttgttacatgatacaagtactttgttcagctcggtcatttggagcagaaggatttcccatttggaacagtgaatcgcccg

SEQ ID NO: 203140 - DNA, 2454 bp, Zea Mays
ctcgacttgcaatatacaacacgcttgtggcctgaagaacggaagaactcggactcgagcaccccgaagcgagccaccgccgatctgctcctcctgagtcctgaccctcctccgtgcgctgcgcaggcatgaggctcctcctcgtcggcgccctactcctatgtgccaccgcggcggtggagtccaagccgcccctcgacaccctgggcatacccccgcaagatgaggcgtactacagaggcggcgtgattaaatgcagggacggatcaggcaggttctcccgggagcagctcaacgacgacttctgcgactgccccgacggcaccgacgagcccgggacatctgcgtgccctgaggcgaagttctactgcaagaatgcaggccacactccagtcacgatcttctcatcacgagtgaatgacggcatttgtgattgctgtgatgggagtgatgaatatgacagcaatatcacctgtaagaacacttgctgggaggctggcaaagcggcaagggagaaattgaagaagaaagtcgctacatacaaaagtggtgtagttattcggaatcaggaagttgagagggcaaaagaggcttatgctaaagacgaagcagagttagcaaaattgaagggtgaagagaaaatactccaaggacttgttgacaaactcaaagagacttatagagaaggcagaggaagaagaacgtttaagaaaagagaaggaagagaagagaataaaagaagctgaaaagcaagctgctgatgaaaagggaacacctgatgcctctccggatgtagattctaaggaaactcatgaccatgtgcaagaagatgaaaacaaggtagccgaagagcatgatgtacatgcaacggaccatgataatcatgcaacagaccatgataatcatgcagcagaaagcggagcatctgttgagcagggttctgtaaacaaagatgacattagcgttgaagctggaactttagatgaattgctgcacaaggagtctgcagtacctacattagagaaggatcatagctctgacaatcctgagggtttatcaagagaagagttaggtcgcatggtagcttcacgttggactggagaaagtgtaagtgaggttagtaaagatgataagaagggacatgaagatgagcaagaaataccagaacctgcaaaagaagcacttgaagacgaattagaaattccagaacctgctgaagaaaattatgatggttatcattcagaagttgaggatgacaggcataaatatgaagatgaagagtttgatcatgagtcagaagatgaatatgttgatgaccatgatgagcatgttgagtcctataaatctgatgatgaccagaaagatttaactgagccaggacatgcatcgtggttggacaaaattcagcagactgtacagaatgttttccaaaaattcaacttttttaggacccctgtagatttgtcagaggcttctcgtgttcgtaaggagtatgacgatgccaactcaaagctttcaaaaattcagtctaagatatccaatttagctgagaagctaaaacatgattttggcaaagacaaggagttctattccttttatgatcagtgctttgagaccaaggaaggaaagtatacttacaaggtctgtgcatataagaaagcatcacaggctgaagggcacagttccaccaacctggggagatgggacaaatttgaagaatcgtacagagtaatgcacttttcaggtggagacaaatgctggaatggtcctgaccgaagcctaaaggttaggcttagatgtgggctgagcaatgagcttaatgacgttgatgagcctagcagatgcgagtatgttgctgtattgtcgacgcccgcactctgcgtcgaggagaagctgaaggagctgcaaaacaaactggatgccatgtcttcgaagcagcccgggcatgatgaactttaaacggttccggcgtggacaaagaaaatttcaccaggaagcatagattgacagttacactcataaccttaagggtggaagtcaatgggggcatatggacaggaaagggccaagctgaagaaatgggaatgtagggttcaggtcgcctacctggcaatgttagctggcatagagctgtttttttagctgaatttgattggatgttgcaatttttccaggctcatcccgagttgtttggtggaggcgactgcaaccgtgcttttctttgtggtttaacattgctctatttaattagggagagacgctaggcttttgcgtctccagcttcattgccagccattacacatttgatggaatatatagtaagaaacagtacactctgaaccatcataatttgaagatgctagttaaccccgggttgttacatgatacaagtactttgttcagctcggtcatttggagcagaaggatttcccatttggaacagtgaatcgcccg

SEQ ID NO: 203141 - DNA, 2188 bp, Zea Mays
ctcgacttgcaatatacaacacgcttgtggcctgaagaacggaagaactcggactcgagcaccccgaagcgagccaccgccgatctgctcctcctgagtcctgaccctcctccgtgcgctgcgcaggcatgaggctcctcctcgtcggcgccctactcctatgtgccaccgcggcggtggagtccaagccgcccctcgacaccctgggcatacccccgcaagatgaggcgtactacagaggcggcgtgattaaatgcagggacggatcaggcaggttctcccgggagcagctcaacgacgacttctgcgactgccccgacggcaccgacgagcccgggacatctgcgtgccctgaggcgaagttctactgcaagaatgcaggccacactccagtcacgatcttctcatcacgagtgaatgacggcatttgtgattgctgtgatgggagtgatgaatatgacagcaatatcacctgtaagaacacttgctgggaggctggcaaagcggcaagggagaaattgaagaagaaagtcgctacatacaaaagtggtgtagttattcggaatcaggaagttgagagggcaaaagaggcttatgctaaagacgaagcagagttagcaaaattgaagggtgaagagaaaatactccaaggacttgttgacaaactcaaagagcaaaagagacttatagagaaggcagaggaagaagaacgtttaagaaaagagaaggaagagaagagaataaaagaagctgaaaagcaagctgctgatgaaaagggaacacctgatgcctctccggatgtagattctaaggaaactcatgaccatgtgcaagaagatgaaaacaaggatcatagctctgacaatcctgagggtttatcaagagaagagttaggtcgcatggtagcttcacgttggactggagaaagtgtaagtgaggttagtaaagatgataagaagggacatgaagatgagcaagaaataccagaacctgcaaaagaagcacttgaagacgaattagaaattccagaacctgctgaagaaaattatgatggttatcattcagaagttgaggatgacaggcataaatatgaagatgaagagtttgatcatgagtcagaagatgaatatgttgatgaccatgatgagcatgttgagtcctataaatctgatgatgaccagaaagatttaactgagccaggacatgcatcgtggttggacaaaattcagcagactgtacagaatgttttccaaaaattcaacttttttaggacccctgtagatttgtcagaggcttctcgtgttcgtaaggagtatgacgatgccaactcaaagctttcaaaaattcagtctaagatatccaatttagctgagaagctaaaacatgattttggcaaagacaaggagttctattccttttatgatcagtgctttgagaccaaggaaggaaagtatacttacaaggtctgtgcatataagaaagcatcacaggctgaagggcacagttccaccaacctggggagatgggacaaatttgaagaatcgtacagagtaatgcacttttcaggtggagacaaatgctggaatggtcctgaccgaagcctaaaggttaggcttagatgtgggctgagcaatgagcttaatgacgttgatgagcctagcagatgcgagtatgttgctgtattgtcgacgcccgcactctgcgtcgaggagaagctgaaggagctgcaaaacaaactggatgccatgtcttcgaagcagcccgggcatgatgaactttaaacggttccggcgtggacaaagaaaatttcaccaggaagcatagattgacagttacactcataaccttaagggtggaagtcaatgggggcatatggacaggaaagggccaagctgaagaaatgggaatgctcatcccgagttgtttggtggaggcgactgcaaccgtgcttttctttgtggtttaacattgctctatttaattagggagagacgctaggcttttgcgtctccagcttcattgccagccattacacatttgatggaatatatagtaagaaacagtacactctgaaccatcataatttgaagatgctagttaaccccgggttgttacatgatacaagtactttgttcagctcggtcatttggagcagaaggatttcccatttggaacagtgaatcgcccg

SEQ ID NO: 203142 - DNA, 2412 bp, Zea Mays
aaaaaaaaaaaaacagcatcagggcggtagcgtaatttccctggccggttgcggccgacgacctcttcgagagaacgaacgattcttcctcccgtttgcttcccctgcccgcactctgcctcgtcaatctcgctccgcgtcccgcttccgctgttgctttcgtcgccatctcgctccggtccccgccgctgctccaagtgggagccaagtcatctctctggccgaagatccaggttgagtcggcgtcgccggcagaggcaagagactccggcgcgatgtcgttggactcggaggcttcctcgcagggtggggactaccgtagcttccgccagatcacgcgagatcgtttattatttgaaatgctcagatcaactaggaagaattcgaaatcaacatggaagtggtcgaagatttatataaacggaggcaaccattgccttcactggatgccatatatttcatccaaccaactaaagagaacattgtcatgttcctatccgacatgtcaggaagaagccctttgtacaagaaggcatatgtgtttttcagttctcccgtacataaagaattagttgctcaaataaaaaaggattcaagtgtactacctcgtattgccgcacttagtgagatgaatttggagtactttgctattgattcccagggtttcataactgaccatgagagggcattggaagaactttttagtgaaaatgcagaaggatctcacaagtataatgcttgtctgaacacaatggctactcgtatatccacagtatttgcatcaatgagggaattccctcgtgtacactaccgtattgccaagacgattgatgcttctacaatgacaacactacgagacttagtccccacaaagcttgctgccagtgtatggaattgtcttgcgaaatataaaacgacaatacctgaatttcctcaaacagaaacttgtgagctacttatagtagaccgttcaatagatcagattgcaccaattattcatgaatggacttatgatgctatgtgtcatgatctgctttgtatggatggcaacaagtatgttcatgaggttccaactaaaaatgggtcggcaactgaaaaaaaggaggtcctgttggaggatcatgaccctgtctggcttgagcttaggcatgcacatatagcagatgcaagtgagaggctacatgataagatgaccaacttcatttcaaagaacaaagctgcacaattgcatcaagcacgaaccgatggagaattatcgacaagagatttacaaaaaatggttcaggctcttccacagtacagtgatcaaattgataagctttccctgcatgttgagattgcaggaaaactcaataacataataagggaacaatgtcttcgggatgttggacagctagagcaagatcttgtgtttggcgatgctggaaccaaagaactaatcaactttttgagaacacaattggttgtaagtcgtgaaaataaattacgcttgctgatgatttatgcagcacttaacccagagaagtttgaaagcgacaagggtgcaaaattaatgcagttggcaggattatctgctgatgacatgattgctgtaaataatatgcgttgcttatgtgggcctgataccaaaaagtcttcagtagggggttttacactgaaatttgatgttcacaagaagaaacacacaaatcgaaaagagcgaacaggggaagaatcaacatgggcactctctcgattttaccctattttggagcaattgattgaaaatcttagcaaaggtgagctgccaaaagatgaatataactgtatgaatgaccctagtcctactgttcatggactgccaaccagtagctctgcccgaacaagccccgctcactcaatgcgatccagacgaacaggtggcacatgggcaagacctcgtggctctgatgatggatattcaagtgattctgtgttgaagcatgcctccagtgacttcaggaaacttggtcagcgtatatttgtttttgtaataggcggtgctactcgatcagagttacgtgctgcacacaagctttcatccaagctgaagcgagacatcatccttggttcatctagccttgatgatcctccccagttcatcacaaaattaaagttgatgtcagtagaagaattgacacttgatgaccttcagctgtaaatggtgtccgcccacacggagtgtaaccttttattttctctgttctgtcagctcttatttgtgggggcctgtcatattcattcggtgaaatgcattcttaataccacttttactggtgaatgtaagaaaaaaactgttatgcaattaatcttttcatgcaattattgtgcaaccaaaataccagaagtcatgagaagttctcaaaattttattgatgaattttatttactcaa

SEQ ID NO: 203143 - DNA, 2563 bp, Zea Mays
aaaaaaaaaaaaacagcatcagggcggtagcgtaatttccctggccggttgcggccgacgacctcttcgagagaacgaacgattcttcctcccgtttgcttcccctgcccgcactctgcctcgtcaatctcgctccgcgtcccgcttccgctgttgctttcgtcgccatctcgctccggtccccgccgctgctccaagtgggagccaagtcatctctctggccgaagatccaggttgagtcggcgtcgccggcagaggcaagagactccggcgcgatgtcgttggactcggaggcttcctcgcagggtggggactaccgtagcttccgccagatcacgcgagatcgtttattatttgaaatgctcagatcaactaggaagaattcgaaatcaacatggaaggttcttatcatggataagtttacagtcaagattatgtcatatgcatgtaagatggcagatattacagaagaaggtgtttcattggtcgaagatttatataaacggaggcaaccattgccttcactggatgccatatatttcatccaaccaactaaagagaacattgtcatgttcctatccgacatgtcaggaagaagccctttgtacaagaaggcatatgtgtttttcagttctcccgtacataaagaattagttgctcaaataaaaaaggattcaagtgtactacctcgtattgccgcacttagtgagatgaatttggagtactttgctattgattcccagaggagcgtactttttgatggacaattgaaagaaaaaagaaatagtttaaggaggtttctagaagcaacgggtttcataactgaccatgagagggcattggaagaactttttagtgaaaatgcagaaggatctcacaagtataatgcttgtctgaacacaatggctactcgtatatccacagtatttgcatcaatgagggaattccctcgtgtacactaccgtattgccaagacgattgatgcttctacaatgacaacactacgagacttagtccccacaaagcttgctgccagtgtatggaattgtcttgcgaaatataaaacgacaatacctgaatttcctcaaacagaaacttgtgagctacttatagtagaccgttcaatagatcagattgcaccaattattcatgaatggacttatgatgctatgtgtcatgatctgctttgtatggatggcaacaagtatgttcatgaggttccaactaaaaatgggtcggcaactgaaaaaaaggaggtcctgttggaggatcatgaccctgtctggcttgagcttaggcatgcacatatagcagatgcaagtgagaggctacatgataagatgaccaacttcatttcaaagaacaaagctgcacaattgcatcaagcacgaaccgatggagaattatcgacaagagatttacaaaaaatggttcaggctcttccacagtacagtgatcaaattgataagctttccctgcatgttgagattgcaggaaaactcaataacataataagggaacaatgtcttcgggatgttggacagctagagcaagatcttgtgtttggcgatgctggaaccaaagaactaatcaactttttgagaacacaattggttgtaagtcgtgaaaataaattacgcttgctgatgatttatgcagcacttaacccagagaagtttgaaagcgacaagggtgcaaaattaatgcagttggcaggattatctgctgatgacatgattgctgtaaataatatgcgttgcttatgtgggcctgataccaaaaagtcttcagtagggggttttacactgaaatttgatgttcacaagaagaaacacacaaatcgaaaagagcgaacaggggaagaatcaacatgggcactctctcgattttaccctattttggagcaattgattgaaaatcttagcaaaggtgagctgccaaaagatgaatataactgtatgaatgaccctagtcctactgttcatggactgccaaccagtagctctgcccgaacaagccccgctcactcaatgcgatccagacgaacaggtggcacatgggcaagacctcgtggctctgatgatggatattcaagtgattctgtgttgaagcatgcctccagtgacttcaggaaacttggtcagcgtatatttgtttttgtaataggcggtgctactcgatcagagttacgtgctgcacacaagctttcatccaagctgaagcgagacatcatccttggttcatctagccttgatgatcctccccagttcatcacaaaattaaagttgatgtcagtagaagaattgacacttgatgaccttcagctgtaaatggtgtccgcccacacggagtgtaaccttttattttctctgttctgtcagctcttatttgtgggggcctgtcatattcattcggtgaaatgcattcttaataccacttttactggtgaatgtaagaaaaaaactgttatgcaattaatcttttcatgcaattattgtgcaaccaaaataccagaagtcatgagaagttctcaaaattttattgatgaattttatttactcaa

SEQ ID NO: 203144 - DNA, 733 bp, Zea Mays
gtttaaggaggtttctagaagcaacgggtttcataactgaccatgagagggcattggaagaactttttagtgaaaatgcagaaggatctcacaagtataatgcttgtctgaacacaatggctactcgtatatccacagtatttgcatcaatgagggaattccctcgtgtacactaccgtattgccaagacgattgatgcttctacaatgacaacactacgagacttagtccccacaaagcttgctgccagtgtatggaattgtcttgcgaaatataaaacgacaatacctgaatttcctcaaacagaaacttgtgagctacttatagtagaccgttcaatagatcagattgcaccaattattcatgaatggacttatgatgctatgtgtcatgatctgctttgtatggatggcaacaagtatgttcatgaggttccaactaaaaatgggtcggcaactgaaaaaaaggaggtcctgttggaggatcatgaccctgtctggcttgagcttaggcatgcacatatagcagatgcaagtgagaggctacatgataagatgaccaacttcatttcaaagaacaaagctgcacaattgcatcaagcacgaaccgatggagaattatcgacaagagatttacaaaaaatggttcaggctcttccacagtacagtgatcaaattgataagctttccctgcatgttgaggatcatcgcacacgggctgtgattgggactgg

SEQ ID NO: 203145 - DNA, 1369 bp, Zea Mays
gcaagaaacactcagaagctgcccagagctaccacccttcttatccccacccctcctcctcctaccttttctccttcagacctcaaaatctgtgtgtctcctgccgcggctagctgataggaacaagagcatgcacatccgagaagaggaggctacaccatccacagtaacaggcatcatgtcgaccctgacttcggcggggcagcagaagctgaaggagcccatatcccctggtggcggctccgcgtcggtcgctgggtccgctgcggagaggaacaacggcggcaggggcaagggcaagactgagatcaagcgcatcgagaacacgaccaacaggcaggtcaccttctgcaagcgccgcaacggcctcctcaagaaggcgtacgagctctccgtgctctgcgacgccgaggtcgcgctcatcgtcttctccagccgcggccgcctctacgacgtgaagggcaccattgagaggtacaagaaggcaaccagtgacaactccagcgcagctggtacgattgcagaggtcaccattcagcattacaagcaggaatctgctaggctgaggcagcagatcgttaacttgcagaactccaacagggccctgataggtgattctatcacaaccatgagccacaaggaacttaagcacttggagactaggttagacaaagctctcggaaagattagagcaaaaaagaacgatgtgctgtgttctgaagtcgagtacatgcagagaagggaaatggagttgcagaatgacaacttgtacttaaggagccgggttgatgagaatgaaagggcacaacagacagcgaacatgatgggggcaccatcgacaagtgagtatcagcagcacggttttactccttatgatccaataaggagcttcctgcagttcaacatcgtgcagcagcctcagttctattctcagcaggaggaccggaaagacttcaacgaccaaggtggaagataaatattggacctctcaagcttcagtacttatccgtgatgatgcatgactgccagtgagaaactgagctacattactgtggaattatatgtaaagactagtactactgcttcatatatgtgcatgtgcgcacacgcgcacgtagtatgcacaatttcatcccactattatggcttggcaccaactatgtctccttaattatcataggagaaaaataagtcacgcacaaaaaaattctaaagatgaggcgcagtgttggatgactgaaactgaaagataggattctcgtggatggcggtggtcatatatatgtcatgcacatctgatctctgttccaaaatgccacatcttctttcccaacccactcgaatctacaccgagaatatatatgtttta

SEQ ID NO: 203146 - DNA, 994 bp, Zea Mays
cgcggctcttctcggtgaagtcgtcgcgctcatcgtcttctccagccgcggccgcctctacgagtacgccaacaacagcgtgaagggcaccattgagaggtacaagaaggcaaccagtgacaactccagcgcagctggtacgattgcagaggtcaccattcagcattacaagcaggaatctgctaggctgaggcagcagatcgttaacttgcagaactccaacagggccctgataggtgattctatcacaaccatgagccacaaggaacttaagcacttggagactaggttagacaaagctctcggaaagattagagcaaaaaagaacgatgtgctgtgttctgaagtcgagtacatgcagagaagggaaatggagttgcagaatgacaacttgtacttaaggagccgggttgatgagaatgaaagggcacaacagacagcgaacatgatgggggcaccatcgacaagtgagtatcagcagcacggttttactccttatgatccaataaggagcttcctgcagttcaacatcgtgcagcagcctcagttctattctcagcaggaggaccggaaagacttcaacgaccaaggtggaagataaatattggacctctcaagcttcagtacttatccgtgatgatgcatgactgccagtgagaaactgagctacattactgtggaattatatgtaaagactagtactactgcttcatatatgtgcatgtgcgcacacgcgcacgtagtatgcacaatttcatcccactattatggcttggcaccaactatgtctccttaattatcataggagaaaaataagtcacgcacaaaaaaattctaaagatgaggcgcagtgttggatgactgaaactgaaagataggattctcgtggatggcggtggtcatatatatgtcatgcacatctgatctctgttccaaaatgccacatcttctttcccaacccactcgaatctacaccgagaatatatatgtttta

SEQ ID NO: 203147 - DNA, 1352 bp, Zea Mays
agccatctcgctgccgttgatagagagggagggagcagacgagggccaagagagagatttcgccgccgctggcattccacgcctacgcagtggcgcggaagccaaggaggaggtaaggatgtgcgtcagggattgtagaacgtgtacgaagaggtttcgaggcgcaagagatggtgcttgatcgacgatgtctcgccggagtcgggaaaacaccggggagctacccttcgatgaggacaggacccctgcgtcgccaatttcagcactgaaaattcttccagcgaactctttatcctgtaagaaagttgagaggcgatcatgcatttccttggaggagttcatatgtaattactttttgcgcgacacccccgtcataattagtggcaccatcgaccattggcctgcaaggacaaaatggaaggacattgagtacctcaagaagattgctggagatcgtactgttcctgttgaagttggaaagaattacgtgtgtagtgagtggaagcaggagcttatcacattttctcagttcctggatagaatgtcgtcaactgtctgtccatcaaacttgacatatctggctcagcatccattgtttgagcagataaaagagctcagtgaagacataattgttcccgaatactgttacgctggtggaggtgcactccaatcacttaatgcttggtttggtccagaggggacagtgacaccattgcaccatgatccacatcacaatatcttagctcaggtattgggcaggaagtatattagactctatcctgctttcatagctgaggacttgtatccacacacagagactatgctaagcaataccagtcaggtagatcttgacaacattgatttgaaggagtttccaagggttgaaaacctggaattcattgactgcatattggaggagggcgacctgctttacatccctccaaaatggtggcactacgtcagatctctctccaccagtttctcggtgactccgcttttgaatggatgtacacacgtcatcaccaatgtccattgttagttttacttttaccacagtgattaaaatgttgaaattgcttatatgccgaccatcatgctatcatgtgattcttgaaagcagaggttgaaggatgtcttcactgctacaatgtcaaattcttgaaattgtaaaggtggacttactagctccgagaatttaatttagatgtattctcgatctgactaaataggtagataaaagtattaatttttataacatcaaatatatattatataagtatgtttcattacgaacctaatggtatttattttgtatgataagtattagtatttttatataaatttgatcaaat

SEQ ID NO: 203148 - DNA, 1104 bp, Zea Mays
tcgctattgcctttgcactgaaaattcttccagcgaactctttatcctgtaagaaagttgagaggcgatcatgcatttccttggaggagttcatatgtaattactttttgcgcgacacccccgtcataattagtggcaccatcgaccattggcctgcaaggacaaaatggaaggacattgagtacctcaagaagattgctggagatcgtactgttcctgttgaagttggaaagaattacgtgtgtagtgagtggaagcaggagcttatcacattttctcagttcctggatagaatgtcgtcaactgtctgtccatcaaacttgacatatctggctcagcatccattgtttgagcagataaaagagctcagtgaagacataattgttcccgaatactgttacgctggtggaggtgcactccaatcacttaatgcttggtttggtccagaggggacagtgacaccattgcaccatgatccacatcacaatatcttagctcaggtattgggcaggaagtatattagactctatcctgctttcatagctgaggacttgtatccacacacagagactatgctaagcaataccagtcaggtagatcttgacaacattgatttgaaggagtttccaagggttgaaaacctggaattcattgactgcatattggaggagggcgacctgctttacatccctccaaaatggtggcactacgtcagatctctctccaccagtttctcggtgactccgcttttgaatggatgtacacacgtcatcaccaatgtccattgttagttttacttttaccacagtgattaaaatgttgaaattgcttatatgccgaccatcatgctatcatgtgattcttgaaagcagaggttgaaggatgtcttcactgctacaatgtcaaattcttgaaattgtaaaggtggacttactagctccgagaatttaatttagatgtattctcgatctgactaaataggtagataaaagtattaatttttataacatcaaatatatattatataagtatgtttcattacgaacctaatggtatttattttgtatgataagtattagtatttttatataaatttgatcaaat

SEQ ID NO: 203149 - DNA, 902 bp, Zea Mays
ttcccttttaagctaatataaagttggaaagaattacgtgtgtagtgagtggaagcaggagcttatcacattttctcagttcctggatagaatgtcgtcaactgtctgtccatcaaacttgacatatctggctcagcatccattgtttgagcagataaaagagctcagtgaagacataattgttcccgaatactgttacgctggtggaggtgcactccaatcacttaatgcttggtttggtccagaggggacagtgacaccattgcaccatgatccacatcacaatatcttagctcaggtattgggcaggaagtatattagactctatcctgctttcatagctgaggacttgtatccacacacagagactatgctaagcaataccagtcaggtagatcttgacaacattgatttgaaggagtttccaagggttgaaaacctggaattcattgactgcatattggaggagggcgacctgctttacatccctccaaaatggtggcactacgtcagatctctctccaccagtttctcggtgactccgcttttgaatggatgtacacacgtcatcaccaatgtccattgttagttttacttttaccacagtgattaaaatgttgaaattgcttatatgccgaccatcatgctatcatgtgattcttgaaagcagaggttgaaggatgtcttcactgctacaatgtcaaattcttgaaattgtaaaggtggacttactagctccgagaatttaatttagatgtattctcgatctgactaaataggtagataaaagtattaatttttataacatcaaatatatattatataagtatgtttcattacgaacctaatggtatttattttgtatgataagtattagtatttttatataaatttgatcaaat

SEQ ID NO: 203150 - DNA, 3150 bp, Zea Mays
aaaaaatcgtctgttccaaacatattgaccattgatctagcccgtccgaaggaaccacttcacactactctccgcggctctgccgtccgttctcctctcgccgccgccggccgcgcctccaccctcgcggcactcgcatggcggcgccggctctccgtatcactgcgcggctgggacttgcacttgacggtgccaccgccgcgagacggcgcgaggcctcggcgcctgtggcggtgccggccgcgccgtggctgaagaaggcggcggtccggtgtcagcgagccgtcggtgccgctgttgccgagaagaaggatgcgccggtatcggttgcgcaggatagaagcggcgacgggggcgcggcgccggagctcaccgtcgtgatgaagttcggcgggtcgtcagtggcctcggccgagcggatgcgggaggtggcagacctcatcctcagcttccccgaggagcacccggtcgtcgtgctctcagcgatgggaaagaccaccaacaaactcctcatggctggggaaaaggcagtgggctgtggtgcgaccaacgtctcggagcttgatgagctctcctttgtaaaggaattgcatcttgggacgcttgatcagcttgggctagatagatcaattgtttgtggtttgttggatgaacttgaacaacttcttaagggaattgctatgatgaaagagctgactcttaggacacgagattatctagtttcatttggtgaatgcatgtctacaagaatatttgctgcacttttaaacaaaattggagtaaaagctcggcagtatgatgcatttgatcttggctttataactaccgatgatttcacaaatgcggatattctggaagcaacttatcctgctgttgcaaggaggctacatgtggaatggattaatgatcctgctatacctatagtcactggctttcttggcaagggatggagatctggtgcaataactaccttgggcaggggtggtagtgacttgacagctacaaccattggcaaagccttgggattaagagaaatccaggtttggaaagatgttgatggtgttttaacatgtgacccaaatatccatcctaaggcaaaacctgtgccatacttgacatttgatgaggcagctgaacttgcctattttggagcgcaggttttgcatccacaatcaatgcggccagctagagaaggcgatgtacctgtgagggttaagaattcttataaccgtcgagcccctggtacccttatcactaaagcaagagatatgaactgttttgactagcattgttttgaaatcaaatattacaatgcttgatatagtcagcacacgcatgcttggccagtacgggtttctagctaaggttttttcgatatttgaagacttgggcatctctgttgattgtgtggctaccagtgaagtcagcatatctttgacactggatccatcgaaactatggagttgtgaattggttcagcacaaaaatgtttgggcatcaatttattcattgttaatttcttgttcatgactatatttcgccaagatttatttttttttcttaatccgcgttaactagataaagatagcactttgcttcaagttttccttgtcttctttttagaaaaaaaactaactgtattattttctcaactgatgttatgtgagcttgacttgaacctatagtagcaccctaggattcacatcctgccattggtgcctcgtagggacagttttttttttcttgaacatagaggagagctgtctatcattatattaaagaacatggttaggaaactttacacacacatttggttacaagatcacccttgaagccaaagataactaaacgaccttgactaacaggactttggttacttgtggtattagactgttatttggctgggtcataatccatattcttgcaggatggattcattttattagcagctctatataaagaaatatttgtcactatattaaagaaaaaggcattatatatgattatgcgcatttctcaattcctcttcaacactttgacctcatttacaaccctagaagcaatacactaatgcacacaacacacgatcatcaggatctggaaggaatcaacaagtgtgaaatattttcctttgtactcaataagagacatgtttctaagaatttaagtcctttgtaatatggaaaattttcgatattgttaaatgacaattgactgaggccagagttggttcattatagcagatgatgatgatgcatcttggctttcgttcaaaaaaaaatgatgcatcttggcaaatttaattttgacctttctatataccaggaacttgatgatgtcattgaagagcttgagaagatagcagttgttcatctactgcagaacaggtcaataatatctttaattggaaatgtgcagaggtcgtctttgattcttgaaaaggctttcaatgttctacgaagaaacggtgtcaatgtccagatgatatcgcaaggggcgtccaaggtgaacatttccttggtggtccatgacagtgaggcaaaacagtgtgttcaagccctccactccgcgttctttgagaatggtttcttgttggaagctgatgagttggatgttctgcatgatggctttacatcgcattccaatggcacaatccacagccattagccgaggatttgatattcatctgtttggctactgtagtgccacttgtgatcaaatcctgatctttggtcgatatctaatgtttttatgaggctacgaaggattcggctttagagctactacccatcagaagtctaggaatttgttcagagccactacttaggattttggttagagattaatgatactgtttggttttctgtacaattgattgaaagtatatacttagttatcttggccaacctatcaaaccacggaggatgcaagcggatttgtccgtaaacctttaaggttagtttggaaacctcatttttgcaagggaaattagttcatttttttttgtgaaaataggaatcccaaaatggagtttctaaactagccataattgttacatgttactacataagccacaaaaaaaaggcctgtttatggggtcaagcccgattgcatttcacggaattgaagtactagcactacgaatttgtt

SEQ ID NO: 203151 - DNA, 3104 bp, Zea Mays
tgatctagcccgtccgaaggaaccacttcacactactctccgcggctctgccgtccgttctcctctcgccgccgccggccgcgcctccaccctcgcggcactcgcatggcggcgccggctctccgtatcactgcgcggctgggacttgcacttgacggtgccaccgccgcgagacggcgcgaggcctcggcgcctgtggcggtgccggccgcgccgtggctgaagaaggcggcggtccggtgtcagcgagccgtcggtgccgctgttgccgagaagaaggatgcgccggtatcggttgcgcaggatagaagcggcgacgggggcgcggcgccggagctcaccgtcgtgatgaagttcggcgggtcgtcagtggcctcggccgagcggatgcgggaggtggcagacctcatcctcagcttccccgaggagcacccggtcgtcgtgctctcagcgatgggaaagaccaccaacaaactcctcatggctggggaaaaggcagtgggctgtggtgcgaccaacgtctcggagcttgatgagctctcctttgtaaaggaattgcatcttgggacgcttgatcagcttgggctagatagatcaattgtttgtggtttgttggatgaacttgaacaacttcttaagggaattgctatgatgaaagagctgactcttaggacacgagattatctagtttcatttggtgaatgcatgtctacaagaatatttgctgcacttttaaacaaaattggagtaaaagctcggcagtatgatgcatttgatcttggctttataactaccgatgatttcacaaatgcggatattctggaagcaacttatcctgctgttgcaaggaggctacatgtggaatggattaatgatcctgctatacctatagtcactggctttcttggcaagggatggagatctggtgcaataactaccttgggcaggggtggtagtgacttgacagctacaaccattggcaaagccttgggattaagagaaatccaggtttggaaagatgttgatggtgttttaacatgtgacccaaatatccatcctaaggcaaaacctgtgccatacttgacatttgatgaggcagctgaacttgcctattttggagcgcaggttttgcatccacaatcaatgcggccagctagagaaggcgatgtacctgtgagggttaagaattcttataaccgtcgagcccctggtacccttatcactaaagcaagagatatgagtaagactgttttgactagcattgttttgaaatcaaatattacaatgcttgatatagtcagcacacgcatgcttggccagtacgggtttctagctaagacttgggcatctctgttgattgtgtggctaccagtgaagtcagcatatctttgacactggatccatcgaaactatggagttgtgaattggttcagcacaaaaatgtttgggcatcaatttattcattgttaatttcttgttcatgactatatttcgccaagatttatttttttttcttaatccgcgttaactagataaagatagcactttgcttcaagttttccttgtcttctttttagaaaaaaaactaactgtattattttctcaactgatgttatgtgagcttgacttgaacctatagtagcaccctaggattcacatcctgccattggtgcctcgtagggacagttttttttttcttgaacatagaggagagctgtctatcattatattaaagaacatggttaggaaactttacacacacatttggttacaagatcacccttgaagccaaagataactaaacgaccttgactaacaggactttggttacttgtggtattagactgttatttggctgggtcataatccatattcttgcaggatggattcattttattagcagctctatataaagaaatatttgtcactatattaaagaaaaaggcattatatatgattatgcgcatttctcaattcctcttcaacactttgacctcatttacaaccctagaagcaatacactaatgcacacaacacacgatcatcaggatctggaaggaatcaacaagtgtgaaatattttcctttgtactcaataagagacatgtttctaagaatttaagtcctttgtaatatggaaaattttcgatattgttaaatgacaattgactgaggccagagttggttcattatagcagatgatgatgatgcatcttggctttcgttcaaaaaaaaatgatgcatcttggcaaatttaattttgacctttctatataccaggaacttgatgatgtcattgaagagcttgagaagatagcagttgttcatctactgcagaacaggtcaataatatctttaattggaaatgtgcagaggtcgtctttgattcttgaaaaggctttcaatgttctacgaagaaacggtgtcaatgtccagatgatatcgcaaggggcgtccaaggtgaacatttccttggtggtccatgacagtgaggcaaaacagtgtgttcaagccctccactccgcgttctttgagaatggtttcttgttggaagctgatgagttggatgttctgcatgatggctttacatcgcattccaatggcacaatccacagccattagccgaggatttgatattcatctgtttggctactgtagtgccacttgtgatcaaatcctgatctttggtcgatatctaatgtttttatgaggctacgaaggattcggctttagagctactacccatcagaagtctaggaatttgttcagagccactacttaggattttggttagagattaatgatactgtttggttttctgtacaattgattgaaagtatatacttagttatcttggccaacctatcaaaccacggaggatgcaagcggatttgtccgtaaacctttaaggttagtttggaaacctcatttttgcaagggaaattagttcatttttttttgtgaaaataggaatcccaaaatggagtttctaaactagccataattgttacatgttactacataagccacaaaaaaaaggcctgtttatggggtcaagcccgattgcatttcacggaattgaagtactagcactacgaatttgtt

SEQ ID NO: 203152 - DNA, 2182 bp, Zea Mays
tgatctagcccgtccgaaggaaccacttcacactactctccgcggctctgccgtccgttctcctctcgccgccgccggccgcgcctccaccctcgcggcactcgcatggcggcgccggctctccgtatcactgcgcggctgggacttgcacttgacggtgccaccgccgcgagacggcgcgaggcctcggcgcctgtggcggtgccggccgcgccgtggctgaagaaggcggcggtccggtgtcagcgagccgtcggtgccgctgttgccgagaagaaggatgcgccggtatcggttgcgcaggatagaagcggcgacgggggcgcggcgccggagctcaccgtcgtgatgaagttcggcgggtcgtcagtggcctcggccgagcggatgcgggaggtggcagacctcatcctcagcttccccgaggagcacccggtcgtcgtgctctcagcgatgggaaagaccaccaacaaactcctcatggtattctactacaccactggtgcctggcttcattaccttcgatatgcgaggtgttaaattttgtgaggaatcctatacggctatactactaggatcgagattttggttgcaggctggggaaaaggcagtgggctgtggtgcgaccaacgtctcggagcttgatgagctctcctttgtaaaggaattgcatcttgggacgcttgatcagcttgggctagatagatcaattgtttgtggtttgttggatgaacttgaacaacttcttaagggaattgctatgatgaaagagctgactcttaggacacgagattatctagtttcatttggtgaatgcatgtctacaagaatatttgctgcacttttaaacaaaattggagtaaaagctcggcagtatgatgcatttgatcttggctttataactaccgatgatttcacaaatgcggatattctggaagcaacttatcctgctgttgcaaggaggctacatgtggaatggattaatgatcctgctatacctatagtcactggctttcttggcaagggatggagatctggtgcaataactaccttgggcaggggtggtagtgacttgacagctacaaccattggcaaagccttgggattaagagaaatccaggtttggaaagatgttgatggtgttttaacatgtgacccaaatatccatcctaaggcaaaacctgtgccatacttgacatttgatgaggcagctgaacttgcctattttggagcgcaggttttgcatccacaatcaatgcggccagctagagaaggcgatgtacctgtgagggttaagaattcttataaccgtcgagcccctggtacccttatcactaaagcaagagatatgagtaaggaacttgatgatgtcattgaagagcttgagaagatagcagttgttcatctactgcagaacaggtcaataatatctttaattggaaatgtgcagaggtcgtctttgattcttgaaaaggctttcaatgttctacgaagaaacggtgtcaatgtccagatgatatcgcaaggggcgtccaaggtgaacatttccttggtggtccatgacagtgaggcaaaacagtgtgttcaagccctccactccgcgttctttgagaatggtttcttgttggaagctgatgagttggatgttctgcatgatggctttacatcgcattccaatggcacaatccacagccattagccgaggatttgatattcatctgtttggctactgtagtgccacttgtgatcaaatcctgatctttggtcgatatctaatgtttttatgaggctacgaaggattcggctttagagctactacccatcagaagtctaggaatttgttcagagccactacttaggattttggttagagattaatgatactgtttggttttctgtacaattgattgaaagtatatacttagttatcttggccaacctatcaaaccacggaggatgcaagcggatttgtccgtaaacctttaaggttagtttggaaacctcatttttgcaagggaaattagttcatttttttttgtgaaaataggaatcccaaaatggagtttctaaactagccataattgttacatgttactacataagccacaaaaaaaaggcctgtttatggggtcaagcccgattgcatttcacggaattgaagtactagcactacgaatttgtt

SEQ ID NO: 203153 - DNA, 968 bp, Zea Mays
ctactatcatttgccgtcttccaccctccttccattccgttcggatacaccgtctcgtttctctctcctcccctcgcccgtcttccctcctgtgcgagctcagctcacggtcctcccacccccacgagcgcctccgcggcgaggaagagataatcagcaggcggagcggggggcgcgccgatggatctggagaggccgccgccggcgtcggcggcggaggcggccggggccgcggcgtgctccatctgcctggatccggtgctcgcctgcgtcgcgggccggtccgtcgccaagctgcaatgcggacacgagttccacctagattgtattgggtctgcattcaatgcaaaaggagcgatgcaatgccctaactgtcggaagattgagaaaggtcgctggctttatgcaagtggacgtcacccccctgctgatattgatatgggtggatgggtgactagcgacaactatgatatcacctccgagcttccttttggatttcaatggtgtccctttagtggattcacccagctagcatcaatgttaggggtgcgtgaagctgagccaacttaccacacaactggagatcactcaagtgctgcaagcagttcacttgtttgcccatatcttgccctgcgtggttttctccatcctgttaatgtgccttctacttctaattctggtgctgaaagcacttcatttcatcggcactcaactggcttggaaggacatgtcactcctgatttgaacaatgctccagttttccatgctaccgagtcaagaaatcatgacagtgagcacagacatttgagtaatcttcctgtatcaggaactcctgaatattctatgactccatttgggataggagtaccaagatatgacagtggcagccaacagggattccgatcatatgcacatcatcatcccctaatccatagaattggagcgcattagaagaaagattggcgagg

SEQ ID NO: 203154 - DNA, 958 bp, Zea Mays
ttccaccctccttccattccgttcggatacaccgtctcgtttctctctcctcccctcgcccgtcttccctcctgtgcgagctcagctcacggtcctcccacccccacgagcgcctccgcggcgaggaagagataatcagcaggcggagcggggggcgcgccgatggatctggagaggccgccgccggcgtcggcggcggaggcggccggggccgcggcgtgctccatctgcctggatccggtgctcgcctgcgtcgcgggccggtccgtcgccaagctgcaatgcggacacgagttccacctagattgtattgggtctgcattcaatgcaaaaggagcgatgcaatgccctaactgtcggaagattgagaaaggtcgctggctttatgcaagtggacgtcacccccctgctgatattgatatgggtggatgggtgactagcgacaactatgatatcacctccgagcttccttttggatttcaatggtgtccctttagtggattcacccagctagcatcaatgttaggggtgcgtgaagctgagccaacttaccacacaactggagatcactcaagtgctgcaagcagttcacttgtttgcccatatcttgccctgcgtggttttctccatcctgttaatgtgccttctacttctaattctggtgctgaaagcacttcatttcatcggcactcaactggcttggaaggacatgtcactcctgatttgaacaatgctccagttttccatgctaccgagtcaagaaatcatgacagtgagcacagacatttgagtaatcttcctgtatcaggaactcctgaatattctatgactccatttgggataggagtaccaagatatgacagtggcagccaacagggattccgatcatatgcacatcatcatcccctaatccatagccggtaacagagacaaccttgggtgcagctgggcattcttc

SEQ ID NO: 203155 - DNA, 1115 bp, Zea Mays
ttccaccctccttccattccgttcggatacaccgtctcgtttctctctcctcccctcgcccgtcttccctcctgtgcgagctcagctcacggtcctcccacccccacgagcgcctccgcggcgaggaagagataatcagcaggcggagcggggggcgcgccgatggatctggagaggccgccgccggcgtcggcggcggaggcggccggggccgcggcgtgctccatctgcctggatccggtgctcgcctgcgtcgcgggccggtccgtcgccaagctgcaatgcggacacgagttccacctagattgtattgggtctgcattcaatgcaaaaggagcgatgcaatgccctaactgtcggaagattgagaaaggtcgctggctttatgcaagtggacgtcacccccctgctgatattgatatgggtggatgggtgactagcgacaactatgatatcacctccgagcttccttttggatttcaatggtgtccctttagtggattcacccagctagcatcaatgttaggggtgcgtgaagctgagccaacttaccacacaactggagatcactcaagtgctgcaagcagttcacttgtttgcccatatcttgccctgcgtggttttctccatcctgttaatgtgccttctacttctaattctggtgctgaaagcacttcatttcatcggcactcaactggcttggaaggacatgtcactcctgatttgaacaatgctccagttttccatgctaccgagtcaagaaatcatgacagtgagcacagacatttgagtaatcttcctgtatcaggaactcctgaatattctatgactccatttgggataggagtaccaagatatgacagtggcagccaacagggattccgatcatatgcacatcatcatcccctaatccataggtcctctctcttcagtatggaaagaatgggtcaaatggtgtgtagagtttggcattgaagctaatgcaattatcgctgttccgtatgattggggactgcccccatcaatgcttgaggagagagatctgtactttcacaaattaaattgttgaaaaagctgcatattatgctcttgtatggatcaataggctgttgtct

SEQ ID NO: 203156 - DNA, 3782 bp, Zea Mays
ccgcaaacaagctcaacgaaacgcaacgcctcgctgcggaaatactcggagtaggtgcgccccgctctcgctcacgagtcctagcacagtcgcttcactgccaatccattgctctcgtatacacgaccaattgatgatggccgcggaaccctaggagcggcagcgcggctcagccttcgacatgggctccctcgaaaacggagccggagccggagccgcggcggcggcggggagctacaagcgcggcccgggcccggcgctgcgggctggcggcgcacgtaaggcgcgggcgagatccaggctcgcgcgcttcctgctgctggagaaggtggactatctccagtggatagccgccgccgctgccttcttcttcgtcgccatcgtctttgtcgcgttcctcccggggtcgggcgtcatcgagcggcccaggctgacgctcccctcgagccgcgcgggagagggacgcgtcggaggcggggttgaggaccgcagcggcctcgtccggtgggaggcgggcgcggcgttcgagttcgagccggccaggctgagggagaaatgggcgagggagcggagggaggaggccaagagcttggcggagctcgggacgcccgtaaggaggctcggggtacggaagccgcggcttgccatggtgttcggagacctgtatcccagcgcaatgcagcttcagatggttagcgtcgcctcggtgctggaggccatggggtacgaaatgaaggttttctcacttgaggatggcccatgtggtaacatctggggagccattggagtaccagtgagcatactacctgaggacgcaaacctacctatttcagtagattggttagactatgatggcatacttgtcaattctattgaggcaagaccagtattctcaagatgtttgatttggaccatgtgtctgtggcttcctacagtcttctgcatgagcctttcaaatctatacctatcatttggactgtgcatgaatattctcttgcacatcgtgctaaagaatataatgtgagtggaatgattcagctcataaatgcttggaaagatgtattcagcaggacaaatgttatagttttcccaaactatatattaccggtgatgtatgctgcatttgattctggtaactatttcgtgattccaggccccccatcagaagcatttcaggttgacagctttattgctaaaagttaccacgaagacgtgaagatcagcttgggcttgaatcctaaagattttttaattgctattgttggtaattcattttcatacggtgataatttgatggaagaggcacttgtcttgcaagcattgagtcctctgttacagagatatcgctctgagaatagcgcacaatctgaactgaaagtaaagatcttcactgggaacataactgagaagcataggatggcccttgagtctgttgctctaagtgttggcttcccaagaggtgcagtggagcatgttgctgctgaagataaggacaacctccttggtacagctgaccttgttatatattattcttgtctcgaggagcaattattccccagtgtgctagtccaagccatgagtcttgagaagctggttatagccccagaccttgcaattattagaaaacatatcaatgatggagtaaacggacttctgtttccaagaaagaatattggcatgttagctcaagttcttcttcgagcagtgtcaaatagtaaagtgtctctttcagggcaaaaaattgcttcagctgggaaggctcatgccaagaatcttatggcttctgagaccattgaaggctatgctatgctattgaaaaatgttgtcaagctccccactgatgcactaagccctttaactgctgatgagatacctttagctctgaaacaagagtggaaatggcacctatttgacgacgtgaagcatttacaccgtgtgaatacgagtttgtctggctacaagatactccagaaactagagcaggagtggcatagcaaccaaatggaaaactcttctttgagtacaaaaaatatcaatgacgcattctctgcaattgcctgggaggaacagagagtaaatgaggttatggacatcaaaagaaaaatggaggaagacgagttgaaggacaggaatgaccaacctcatggaacatgggaggaggtgtacagaaatgtgaaaagggtagagaggttaaaaaatgaattgcatgaaagagatgacaaggagcttgagcggacaggtcagccactttgtatatacgaacctttctttggggaggggacctggccctttctgcaccagagctctctttatcgtggagttggtctgtcttcaaaaggtcgaagaccaggagcggacgatattgatgcttcttctcgtcttccacttctcaataatgtttactacagagatattcttggtgaatttggagctttctttgctcttgccaacagaattgacagaatacataaaaattcttggatagggtttcagtcctggagagctacagcaagaaaggcaaacttgtcaaccaatgccgaatctgcaatcttagaagccattcaatctcaaaagcatagagattccttttatttttgggttcggatggatcaagatccaagaaaccacgctaataaagatttttggtccttctgtgacgtgatcaatgctgggaactgcaggttagctgttctggaggcctttcaaaggatgtatggtgtacatcttgatcgtgacctggatactctgttacatatgcctaatgatggagacacgtggtctgtgatgcaaagttgggttttgcctacacggtcattcctagaatttgttatgttctcaagaatgtttgttgatgcactggatgcacaaatgtatgacaagcaccatcaaactgggcattgcatcttgagtctccacaaggaccagcactgctactcccgtcttctggagttgattgtgaatgtttgggcattccacagtgcacgacggatggtctatgttaatcctgcaactggtcaaatgcaggagcagcaccatctcagcggcaggagaggtcaaatgtctgtgcagtttttctcctacgccactctgaagagcatggacgaggagcttgcagaagagtttgacttggatcacccagacaggaggtggctctggccacaaactggagaggtcttctggcagggtctctatgagagggagcgtagcatgcggcagcatgagaaggagcggcggaagcagcagagcagagagaagatccagagaatcaagagtagagctcggcaaaagacgttggggaagtatataaagccaccacctgatgatacagttgtctcgaacgatacaacgactgtagatttatagcattttgaccatactttagggtgataattcttaccgtggaaaattttggttcattctttcattgttacggctaatgtcctcggtcctcactgagtacccccggcaggtgtgaatatttttggtcagttttatcgtgccctctggtgttcagggtgctttacaggcgattttgtaacatatctaggccattaagtttaaatttgggttcccgtagcgtagatgcttttgttcttttcgcttacgagcttctcaataacaggcaacagctgctccgcgtttgcagtctccttggtacaaattgagttgacttgattgtgtcagtctgtcagatatttggttgaacctgcgctattatctacgtttcggtgttgagaattttgttcaacatcctgtaacatgaaaaaccacattatatcttc

SEQ ID NO: 203157 - DNA, 3744 bp, Zea Mays
ccgcaaacaagctcaacgaaacgcaacgcctcgctgcggaaatactcggagtaggtgcgccccgctctcgctcacgagtcctagcacagtcgcttcactgccaatccattgctctcgtatacacgaccaattgatgatggccgcggaaccctaggagcggcagcgcggctcagccttcgacatgggctccctcgaaaacggagccggagccggagccgcggcggcggcggggagctacaagcgcggcccgggcccggcgctgcgggctggcggcgcacgtaaggcgcgggcgagatccaggctcgcgcgcttcctgctgctggagaaggtggactatctccagtggatagccgccgccgctgccttcttcttcgtcgccatcgtctttgtcgcgttcctcccggggtcgggcgtcatcgagcggcccaggctgacgctcccctcgagccgcgcgggagagggacgcgtcggaggcggggttgaggaccgcagcggcctcgtccggtgggaggcgggcgcggcgttcgagttcgagccggccaggctgagggagaaatgggcgagggagcggagggaggaggccaagagcttggcggagctcgggacgcccgtaaggaggctcggggtacggaagccgcggcttgccatggtgttcggagacctgtatcccagcgcaatgcagcttcagatggttagcgtcgcctcggtgctggaggccatggggtacgaaatgaaggttttctcacttgaggatggcccatgtggtaacatctggggagccattggagtaccagtgagcatactacctgaggacgcaaacctacctatttcagtagattggttagactatgatggcatacttgtcaattctattgaggcaagaccagtattctcaagtcttctgcatgagcctttcaaatctatacctatcatttggactgtgcatgaatattctcttgcacatcgtgctaaagaatataatgtgagtggaatgattcagctcataaatgcttggaaagatgtattcagcaggacaaatgttatagttttcccaaactatatattaccggtgatgtatgctgcatttgattctggtaactatttcgtgattccaggccccccatcagaagcatttcaggttgacagctttattgctaaaagttaccacgaagacgtgaagatcagcttgggcttgaatcctaaagattttttaattgctattgttggtaattcattttcatacggtgataatttgatggaagaggcacttgtcttgcaagcattgagtcctctgttacagagatatcgctctgagaatagcgcacaatctgaactgaaagtaaagatcttcactgggaacataactgagaagcataggatggcccttgagtctgttgctctaagtgttggcttcccaagaggtgcagtggagcatgttgctgctgaagataaggacaacctccttggtacagctgaccttgttatatattattcttgtctcgaggagcaattattccccagtgtgctagtccaagccatgagtcttgagaagctggttatagccccagaccttgcaattattagaaaacatatcaatgatggagtaaacggacttctgtttccaagaaagaatattggcatgttagctcaagttcttcttcgagcagtgtcaaatagtaaagtgtctctttcagggcaaaaaattgcttcagctgggaaggctcatgccaagaatcttatggcttctgagaccattgaaggctatgctatgctattgaaaaatgttgtcaagctccccactgatgcactaagccctttaactgctgatgagatacctttagctctgaaacaagagtggaaatggcacctatttgacgacgtgaagcatttacaccgtgtgaatacgagtttgtctggctacaagatactccagaaactagagcaggagtggcatagcaaccaaatggaaaactcttctttgagtacaaaaaatatcaatgacgcattctctgcaattgcctgggaggaacagagagtaaatgaggttatggacatcaaaagaaaaatggaggaagacgagttgaaggacaggaatgaccaacctcatggaacatgggaggaggtgtacagaaatgtgaaaagggtagagaggttaaaaaatgaattgcatgaaagagatgacaaggagcttgagcggacaggtcagccactttgtatatacgaacctttctttggggaggggacctggccctttctgcaccagagctctctttatcgtggagttggtctgtcttcaaaaggtcgaagaccaggagcggacgatattgatgcttcttctcgtcttccacttctcaataatgtttactacagagatattcttggtgaatttggagctttctttgctcttgccaacagaattgacagaatacataaaaattcttggatagggtttcagtcctggagagctacagcaagaaaggcaaacttgtcaaccaatgccgaatctgcaatcttagaagccattcaatctcaaaagcatagagattccttttatttttgggttcggatggatcaagatccaagaaaccacgctaataaagatttttggtccttctgtgacgtgatcaatgctgggaactgcaggttagctgttctggaggcctttcaaaggatgtatggtgtacatcttgatcgtgacctggatactctgttacatatgcctaatgatggagacacgtggtctgtgatgcaaagttgggttttgcctacacggtcattcctagaatttgttatgttctcaagaatgtttgttgatgcactggatgcacaaatgtatgacaagcaccatcaaactgggcattgcatcttgagtctccacaaggaccagcactgctactcccgtcttctggagttgattgtgaatgtttgggcattccacagtgcacgacggatggtctatgttaatcctgcaactggtcaaatgcaggagcagcaccatctcagcggcaggagaggtcaaatgtctgtgcagtttttctcctacgccactctgaagagcatggacgaggagcttgcagaagagtttgacttggatcacccagacaggaggtggctctggccacaaactggagaggtcttctggcagggtctctatgagagggagcgtagcatgcggcagcatgagaaggagcggcggaagcagcagagcagagagaagatccagagaatcaagagtagagctcggcaaaagacgttggggaagtatataaagccaccacctgatgatacagttgtctcgaacgatacaacgactgtagatttatagcattttgaccatactttagggtgataattcttaccgtggaaaattttggttcattctttcattgttacggctaatgtcctcggtcctcactgagtacccccggcaggtgtgaatatttttggtcagttttatcgtgccctctggtgttcagggtgctttacaggcgattttgtaacatatctaggccattaagtttaaatttgggttcccgtagcgtagatgcttttgttcttttcgcttacgagcttctcaataacaggcaacagctgctccgcgtttgcagtctccttggtacaaattgagttgacttgattgtgtcagtctgtcagatatttggttgaacctgcgctattatctacgtttcggtgttgagaattttgttcaacatcctgtaacatgaaaaaccacattatatcttc

SEQ ID NO: 203158 - DNA, 4368 bp, Zea Mays
ccgcaaacaagctcaacgaaacgcaacgcctcgctgcggaaatactcggagtaggtgcgccccgctctcgctcacgagtcctagcacagtcgcttcactgccaatccattgctctcgtatacacgaccaattgatgatggccgcggaaccctaggagcggcagcgcggctcagccttcgacatgggctccctcgaaaacggagccggagccggagccgcggcggcggcggggagctacaagcgcggcccgggcccggcgctgcgggctggcggcgcacgtaaggcgcgggcgagatccaggctcgcgcgcttcctgctgctggagaaggtggactatctccagtggatagccgccgccgctgccttcttcttcgtcgccatcgtctttgtcgcgttcctcccggggtcgggcgtcatcgagcggcccaggctgacgctcccctcgagccgcgcgggagagggacgcgtcggaggcggggttgaggaccgcagcggcctcgtccggtgggaggcgggcgcggcgttcgagttcgagccggccaggctgagggagaaatgggcgagggagcggagggaggaggccaagagcttggcggagctcgggacgcccgtaaggaggctcggggtacggaagccgcggcttgccatggtgttcggagacctgtatcccagcgcaatgcagcttcagatggttagcgtcgcctcggtgctggaggccatggggtacgaaatgaaggttttctcacttgaggatggcccatgtggtaacatctggggagccattggagtaccagtgagcatactacctgaggacgcaaacctacctatttcagtagattggttagactatgatggcatacttgtcaattctattgaggcaagaccagtattctcaagtcttctgcatgagcctttcaaatctatacctatcatttggactgtgcatgaatattctcttgcacatcgtgctaaagaatataatgtgagtggaatgattcagctcataaatgcttggaaagatgtattcagcaggacaaatgttatagttttcccaaactatatattaccggtgatgtatgctgcatttgattctggtaactatttcgtgattccaggccccccatcagaagcatttcaggttgacagctttattgctaaaagttaccacgaagacgtgaagatcagcttgggcttgaatcctaaagattttttaattgctattgttggtaattcattttcatacggtgataatttgatggaagaggcacttgtcttgcaagcattgagtcctctgttacagagatatcgctctgagaatagcgcacaatctgaactgaaagtaaagatcttcactgggaacataactgagaagcataggatggcccttgagtctgttgctctaagtgttggcttcccaagaggtgcagtggagcatgttgctgctgaagataaggacaacctccttggtacagctgaccttgttatatattattcttgtctcgaggagcaattattccccagtgtgctagtccaagccatgagtcttgagaagctggttatagccccagaccttgcaattattagaaaacatatcaatgatggagtaaacggacttctgtttccaagaaagaatattggcatgttagctcaagttcttcttcgagcagtgtcaaatagtaaagtgtctctttcagggcaaaaaattgcttcagctgggaaggctcatgccaagaatcttatggcttctgagaccattgaaggctatgctatgctattgaaaaatgttgtcaagctccccactgatgcactaagccctttaactgctgatgagatacctttagctctgaaacaagagtggaaatggcacctatttgacgacgtgaagcatttacaccgtgtgaatacgagtttgtctggctacaagatactccagaaactagagcaggagtggcatagcaaccaaatggaaaactcttctttgagtacaaaaaatatcaatgacgcattctctgcaattgcctgggaggaacagagagtaaatgaggttatggacatcaaaagaaaaatggaggaagacgagttgaaggacaggaatgaccaacctcatggaacatgggaggaggtgtacagaaatgtgaaaagggtagagaggttaaaaaatgaattgcatgaaagagatgacaaggagcttgagcggacaggtcagccactttgtatatacgaacctttctttggggaggggacctggccctttctgcaccagagctctctttatcgtggagttggtctgtcttcaaaaggtcgaagaccaggagcggacgatattgatgcttcttctcgtcttccacttctcaataatgtttactacagagatattcttggtgaatttggagctttctttgctcttgccaacagaattgacagaatacataaaaattcttggatagggtttcagtcctggagagctacagcaagaaaggcaaacttgtcaaccaatgccgaatctgcaatcttagaagccattcaatctcaaaagcatagagattccttttatttttgggttcggatggatcaagatccaagaaaccacgctaataaagatttttggtccttctgtgacgtgatcaatgctgggaactgcaggttagctgttctggaggcctttcaaaggatgtatggtgtacatcttgatcgtgacctggatactctgttacatatgcctaatgatggagacacgtggtctgtgatgcaaagttgggttttgcctacacggtcattcctagaatttgttatgttctcaaggtatgggttttgtttttaggaatcttactgacaatcaagcaagtgttattacatgtataactagataaaatatgtatgcactggtttattatctgatgttatatgcatatatcaaacatactgtgaatgagcacttggatatagctgatctaagcatatttatgtcagcattgctagcagtatattgctaatgataatttggggttgtgtactttgtggaaaaattacctgttaaagcacagccttgctttaattgactcggggtccaaaaaagattagttttcaactagtatctggtcatttgatcatttcgaaggattatgttgttataacaggcatccagcatcctagatgtcaacaaggttaaagtctttttggtcgctatttgcttgcttacattgttctatgttcattccttttacctgataggactgtcatatgccatagaaattcaggcttttctatatgcttcattagggctagtttgggaactccaattccccaagggatttctattttcttaaaggaaaataaactaatttcccttggaaaaatgaaaaccccttagaaaaatgaggttcccagattagcccttagtgtttacattatgctgttgattttcagaatgtttgttgatgcactggatgcacaaatgtatgacaagcaccatcaaactgggcattgcatcttgagtctccacaaggaccagcactgctactcccgtcttctggagttgattgtgaatgtttgggcattccacagtgcacgacggatggtctatgttaatcctgcaactggtcaaatgcaggagcagcaccatctcagcggcaggagaggtcaaatgtctgtgcagtttttctcctacgccactctgaagagcatggacgaggagcttgcagaagagtttgacttggatcacccagacaggaggtggctctggccacaaactggagaggtcttctggcagggtctctatgagagggagcgtagcatgcggcagcatgagaaggagcggcggaagcagcagagcagagagaagatccagagaatcaagagtagagctcggcaaaagacgttggggaagtatataaagccaccacctgatgatacagttgtctcgaacgatacaacgactgtagatttatagcattttgaccatactttagggtgataattcttaccgtggaaaattttggttcattctttcattgttacggctaatgtcctcggtcctcactgagtacccccggcaggtgtgaatatttttggtcagttttatcgtgccctctggtgttcagggtgctttacaggcgattttgtaacatatctaggccattaagtttaaatttgggttcccgtagcgtagatgcttttgttcttttcgcttacgagcttctcaataacaggcaacagctgctccgcgtttgcagtctccttggtacaaattgagttgacttgattgtgtcagtctgtcagatatttggttgaacctgcgctattatctacgtttcggtgttgagaattttgttcaacatcctgtaacatgaaaaaccacattatatcttc

SEQ ID NO: 203159 - DNA, 650 bp, Zea Mays
atggccgatggggaggacatcggccacgcgagacctcaacaccccatgaagcagtcacgcttcgacttcaccaagctgagggccctttcctccgcctgcgacactcacccaccagagcatcttatctctggatgtgagtgccatgaaagtgatacccaacagacaactaactctggaacacctttgcttttctctgcggtaaattgctggcttaaatgcatgctgcttgaaccctataatcagacagaccatcccgaatgcaagtcaaggcctgatagtggtctttctgcaattacagagctggaccctggttatataacaggatcagtaagagttaatggcccagtgacggattcaaggtatcctgctcaccaacagatcccacaagcatacggttaccgccaaatgcctgcaaggttggacagtaccaacccatcgcaggccatgggaggttacacgctgcagtcacagaaggaaacattatttgaagagttgccattttgaagagttactcgaatccaatattttgctcttttgaattccttggtgtacactggcaaatattagcatatttgaagagttgccattttgatcatcatcttcatttgtactttttgggtcagatctaataaagcatcaacattaaattt

SEQ ID NO: 203160 - DNA, 2655 bp, Zea Mays
cagtactgtttttctcataaatcttactgtaaatctgtatttatcttgtgctactacagtctagagtatgttttttaagctaggaagtttagcggagttgcttaattttcgtggataatccactggacattgttgataacttgatactggattttcttccttctcgaacctgtagagggctctgctttatttgattagaccttatatggtttgagtgccacaactgaaactttgcacctaaaacccgaggccaagttcactactttattatatccttccatacacagaaagtggagagacatggatcgtgatgatatagctggtttcgtcagtggaggttgctatgagtcctgaatttctaacccagtatatataacagagttatgatatccagaaggcagacaattgtttcttttcgttttctagttggtttgcatttgatgtttcataattggaatggatacaactactcaaggccttgagtttggtggtggtatcaactctccgaagccatattgctattggagcacaactcaagacactactgtgcacaaagatagtacaccagaggcatattccaccttttctatttccaactcaaaagcgtcaaaaaggaagcaaggtgccatgtctggagcaaaaggtggaaaccctttactcactttgggtctaggctgctcaccaagttcatcttataacagcaagctaagttctggcactgcttgcataacatcatcatctttattaaaggagattgatgaagagtcttcaatagatcttggccttaaccttgggttgtatattggaaatgatattggacactgccaacagaaatcccatgctggttttgaaaatgtgctctcgacaaactctcctaaactggatcttcagttgagtttgtctaccagttcgcctgaatcagttgtcattgatgcaaataggtcaccagatggcttggcgatgccgatggccaattcaccactcgccattgtagaagaaggatcagtaccacatagttgggttttcgagcattcaattgtttcatcatcacatgcttctaaggcaacgcatggctttccattatcaaagaaaaccaatggaggcaatgcctctgtgccttctcatgtcatgtcatcaactatgtttacaagtgtgaaaggtccagttgcctctgcttctgagacaactaactcccaacaacgcaacagtaacgctaaaagctgtcagtttccaggatgtgtgaaaggagcaagaggggcatcagggcgttgcatagcacatggcggcggtaggcgttgccagaaacctggttgtgagaagggcgctgaagggaggacaatctattgcaaggcccatggtggaggcaggagatgtcaatttctcgggtgtacaaagagtgctgaagggcgcacagaccactgcatagctcatggtggtggccgccgctgcagccatgaaggttgctcccgagctgctcgtggaaaatctggcctgtgtatcaagcatggtggtggcaaaaggtgtcagaaggagaactgtaccaaaagtgcagaaggccattctggactctgcattgcccatggtggtggaaggcggtgccagtttccagactgcacaaagggtgctcagggaagcacaaagttctgcaaggcacatggtggaggaaagcgctgcacattcgtcggatgcaccagaggggctgaaggcagcacttcattttgtaagggccatggtggaggcaagcgctgtgcctttcagggcggtggcgtgtgcccaaagagcgtgcatggtggcactcagtattgtgttgcacatggtggtgggaaaaggtgtgctagctttggttgcactaagagtgctagagggcgcacagagtattgtgtgcgccatggaggtggcaagaggtgcaagttcgagagctgcaccaagagtgcgcaggggagcactgatttctgtaaggctcatgggggaggtacacgatgcctgtggggccaggcggacacaagctttggtgctggtgcacagcaatgcgataaatttgttcggagcaagaccggtctctgctcagctcatagtgctttgatccaggaccactgtgttcatggcggtggtacattaggttccgctatctaccagtctgtgcatgtcaaaccgactgagatgatcaatggtgataaaactttactggatccggctatccctgttacaaacagtggtgttcatcctcctgtcctagctcagtctatgatcgatccgctgccagagggcagagttcatggtggtggcctgttggctttactttcgcggggcggaagcagaacaagcgctggtggctcagaattgtgcttcgggcaagatcgtgtggatctgaggctatcaggatctccatgaaactgatgactgcctgcagttttgatccaaattgtgttgctcatgctcgggttccataggatctacccggacgtgtactgtgaatctacccagacgtgtactatgaaaataagagggtagctcctagagcagatgtgttgttttattttagttaattgtttcagtgcatgtaatcacttactttaatgctcatgtttggacttgattaactctcagcaacttaaggttgaaatataatgtgcattttgctgcttattctgctga

SEQ ID NO: 203161 - DNA, 2806 bp, Zea Mays
ctggcctcgactctgcgtgcgtgcgtgcgtgcgtgcatagctcgtttcgtttgggatcctttcttccggttcttgtttgattcgtggaattactttcgctcgccgtctgttcctcgccgcaagggcgaggtgagccttttgttttcagccttttcatcgtgtgatctgtgatggacgaactcgtacaactcttcttggttcgattggccatacaataaaaagtgacaatactatcggccggtactcctgctggccaggcctagattggataacaacgacattgttgataacttgatactggattttcttccttctcgaacctgtagagggctctgctttatttgattagaccttatatggtttgagtgccacaactgaaactttgcacctaaaacccgaggccaagttcactactttattatatccttccatacacagaaagtggagagacatggatcgtgatgatatagctggtttcgtcagtggaggttgctatgagtcctgaatttctaacccagtatatataacagagttatgatatccagaaggcagacaattgtttcttttcgttttctagttggtttgcatttgatgtttcataattggaatggatacaactactcaaggccttgagtttggtggtggtatcaactctccgaagccatattgctattggagcacaactcaagacactactgtgcacaaagatagtacaccagaggcatattccaccttttctatttccaactcaaaagcgtcaaaaaggaagcaaggtgccatgtctggagcaaaaggtggaaaccctttactcactttgggtctaggctgctcaccaagttcatcttataacagcaagctaagttctggcactgcttgcataacatcatcatctttattaaaggagattgatgaagagtcttcaatagatcttggccttaaccttgggttgtatattggaaatgatattggacactgccaacagaaatcccatgctggttttgaaaatgtgctctcgacaaactctcctaaactggatcttcagttgagtttgtctaccagttcgcctgaatcagttgtcattgatgcaaataggtcaccagatggcttggcgatgccgatggccaattcaccactcgccattgtagaagaaggatcagtaccacatagttgggttttcgagcattcaattgtttcatcatcacatgcttctaaggcaacgcatggctttccattatcaaagaaaaccaatggaggcaatgcctctgtgccttctcatgtcatgtcatcaactatgtttacaagtgtgaaaggtccagttgcctctgcttctgagacaactaactcccaacaacgcaacagtaacgctaaaagctgtcagtttccaggatgtgtgaaaggagcaagaggggcatcagggcgttgcatagcacatggcggcggtaggcgttgccagaaacctggttgtgagaagggcgctgaagggaggacaatctattgcaaggcccatggtggaggcaggagatgtcaatttctcgggtgtacaaagagtgctgaagggcgcacagaccactgcatagctcatggtggtggccgccgctgcagccatgaaggttgctcccgagctgctcgtggaaaatctggcctgtgtatcaagcatggtggtggcaaaaggtgtcagaaggagaactgtaccaaaagtgcagaaggccattctggactctgcattgcccatggtggtggaaggcggtgccagtttccagactgcacaaagggtgctcagggaagcacaaagttctgcaaggcacatggtggaggaaagcgctgcacattcgtcggatgcaccagaggggctgaaggcagcacttcattttgtaagggccatggtggaggcaagcgctgtgcctttcagggcggtggcgtgtgcccaaagagcgtgcatggtggcactcagtattgtgttgcacatggtggtgggaaaaggtgtgctagctttggttgcactaagagtgctagagggcgcacagagtattgtgtgcgccatggaggtggcaagaggtgcaagttcgagagctgcaccaagagtgcgcaggggagcactgatttctgtaaggctcatgggggaggtacacgatgcctgtggggccaggcggacacaagctttggtgctggtgcacagcaatgcgataaatttgttcggagcaagaccggtctctgctcagctcatagtgctttgatccaggaccactgtgttcatggcggtggtacattaggttccgctatctaccagtctgtgcatgtcaaaccgactgagatgatcaatggtgataaaactttactggatccggctatccctgttacaaacagtggtgttcatcctcctgtcctagctcagtctatgatcgatccgctgccagagggcagagttcatggtggtggcctgttggctttactttcgcggggcggaagcagaacaagcgctggtggctcagaattgtgcttcgggcaagatcgtgtggatctgaggctatcaggatctccatgaaactgatgactgcctgcagttttgatccaaattgtgttgctcatgctcgggttccataggatctacccggacgtgtactgtgaatctacccagacgtgtactatgaaaataagagggtagctcctagagcagatgtgttgttttattttagttaattgtttcagtgcatgtaatcacttactttaatgctcatgtttggacttgattaactctcagcaacttaaggttgaaatataatgtgcattttgctgcttattctgctga

SEQ ID NO: 203162 - DNA, 2890 bp, Zea Mays
gtggcctcagcgattttgctgccccccatctcctttttttagcacatcgcttgcgttctctctctggtttcctcctctgctctgcgctccgcttcccaccgctcctcccctgccgtctctcctaccacaaagccgtggcccgtgggcgctgttcgcggcggcgacgggtctctcatctcctctaccctctctcgcgcgcaacggcctaaaaaaaccctagcgactcggtcggcgctcgacttggatcgtgccggggggctaggggcaggggcagctctcttctctcgtcgtcgtccagcacagtgacaatactatcggccggtactcctgctggccaggcctagattggataacaacgacattgttgataacttgatactggattttcttccttctcgaacctgtagagggctctgctttatttgcagattagaccttatatggtttgagtgccacaactgaaactttgcacctaaaacccgaggccaagttcactactttattatatccttccatacacagaaagtggagagacatggatcgtgatgatatagctggtttcgtcagtggaggttgctatgagtcctgaatttctaacccagtatatataacagagttatgatatccagaaggcagacaattgtttcttttcgttttctagttggtttgcatttgatgtttcataattggaatggatacaactactcaaggccttgagtttggtggtggtatcaactctccgaagccatattgctattggagcacaactcaagacactactgtgcacaaagatagtacaccagaggcatattccaccttttctatttccaactcaaaagcgtcaaaaaggaagcaaggtgccatgtctggagcaaaaggtggaaaccctttactcactttgggtctaggctgctcaccaagttcatcttataacagcaagctaagttctggcactgcttgcataacatcatcatctttattaaaggagattgatgaagagtcttcaatagatcttggccttaaccttgggttgtatattggaaatgatattggacactgccaacagaaatcccatgctggttttgaaaatgtgctctcgacaaactctcctaaactggatcttcagttgagtttgtctaccagttcgcctgaatcagttgtcattgatgcaaataggtcaccagatggcttggcgatgccgatggccaattcaccactcgccattgtagaagaaggatcagtaccacatagttgggttttcgagcattcaattgtttcatcatcacatgcttctaaggcaacgcatggctttccattatcaaagaaaaccaatggaggcaatgcctctgtgccttctcatgtcatgtcatcaactatgtttacaagtgtgaaaggtccagttgcctctgcttctgagacaactaactcccaacaacgcaacagtaacgctaaaagctgtcagtttccaggatgtgtgaaaggagcaagaggggcatcagggcgttgcatagcacatggcggcggtaggcgttgccagaaacctggttgtgagaagggcgctgaagggaggacaatctattgcaaggcccatggtggaggcaggagatgtcaatttctcgggtgtacaaagagtgctgaagggcgcacagaccactgcatagctcatggtggtggccgccgctgcagccatgaaggttgctcccgagctgctcgtggaaaatctggcctgtgtatcaagcatggtggtggcaaaaggtgtcagaaggagaactgtaccaaaagtgcagaaggccattctggactctgcattgcccatggtggtggaaggcggtgccagtttccagactgcacaaagggtgctcagggaagcacaaagttctgcaaggcacatggtggaggaaagcgctgcacattcgtcggatgcaccagaggggctgaaggcagcacttcattttgtaagggccatggtggaggcaagcgctgtgcctttcagggcggtggcgtgtgcccaaagagcgtgcatggtggcactcagtattgtgttgcacatggtggtgggaaaaggtgtgctagctttggttgcactaagagtgctagagggcgcacagagtattgtgtgcgccatggaggtggcaagaggtgcaagttcgagagctgcaccaagagtgcgcaggggagcactgatttctgtaaggctcatgggggaggtacacgatgcctgtggggccaggcggacacaagctttggtgctggtgcacagcaatgcgataaatttgttcggagcaagaccggtctctgctcagctcatagtgctttgatccaggaccactgtgttcatggcggtggtacattaggttccgctatctaccagtctgtgcatgtcaaaccgactgagatgatcaatggtgataaaactttactggatccggctatccctgttacaaacagtggtgttcatcctcctgtcctagctcagtctatgatcgatccgctgccagagggcagagttcatggtggtggcctgttggctttactttcgcggggcggaagcagaacaagcgctggtggctcagaattgtgcttcgggcaagatcgtgtggatctgaggctatcaggatctccatgaaactgatgactgcctgcagttttgatccaaattgtgttgctcatgctcgggttccataggatctacccggacgtgtactgtgaatctacccagacgtgtactatgaaaataagagggtagctcctagagcagatgtgttgttttattttagttaattgtttcagtgcatgtaatcacttactttaatgctcatgtttggacttgattaactctcagcaacttaaggttgaaatataatgtgcattttgctgcttattctgctga

SEQ ID NO: 203163 - DNA, 2753 bp, Zea Mays
cgcgtgtggtggtggcctcagcgattttgctgccccccatctcctttttttagcacatcgcttgcgttctctctctggtttcctcctctgctctgcgctccgcttcccaccgctcctcccctgccgtctctcctaccacaaagccgtggcccgtgggcgctgttcgcggcggcgacgggtctctcatctcctctaccctctctcgcgcgcaacggcctaaaaaaaccctagcgactcggtcggcgctcgacttggatcgtgccggggggctaggggcaggggcagctctcttctctcgtcgtcgtccaggacattgttgataacttgatactggattttcttccttctcgaacctgtagagggctctgctttatttgcagattagaccttatatggtttgagtgccacaactgaaactttgcacctaaaacccgaggccaagttcactactttattatatccttccatacacagaaagtggagagacatggatcgtgatgatatagctggtttcgtcagtggagttggtttgcatttgatgtttcataattggaatggatacaactactcaaggccttgagtttggtggtggtatcaactctccgaagccatattgctattggagcacaactcaagacactactgtgcacaaagatagtacaccagaggcatattccaccttttctatttccaactcaaaagcgtcaaaaaggaagcaaggtgccatgtctggagcaaaaggtggaaaccctttactcactttgggtctaggctgctcaccaagttcatcttataacagcaagctaagttctggcactgcttgcataacatcatcatctttattaaaggagattgatgaagagtcttcaatagatcttggccttaaccttgggttgtatattggaaatgatattggacactgccaacagaaatcccatgctggttttgaaaatgtgctctcgacaaactctcctaaactggatcttcagttgagtttgtctaccagttcgcctgaatcagttgtcattgatgcaaataggtcaccagatggcttggcgatgccgatggccaattcaccactcgccattgtagaagaaggatcagtaccacatagttgggttttcgagcattcaattgtttcatcatcacatgcttctaaggcaacgcatggctttccattatcaaagaaaaccaatggaggcaatgcctctgtgccttctcatgtcatgtcatcaactatgtttacaagtgtgaaaggtccagttgcctctgcttctgagacaactaactcccaacaacgcaacagtaacgctaaaagctgtcagtttccaggatgtgtgaaaggagcaagaggggcatcagggcgttgcatagcacatggcggcggtaggcgttgccagaaacctggttgtgagaagggcgctgaagggaggacaatctattgcaaggcccatggtggaggcaggagatgtcaatttctcgggtgtacaaagagtgctgaagggcgcacagaccactgcatagctcatggtggtggccgccgctgcagccatgaaggttgctcccgagctgctcgtggaaaatctggcctgtgtatcaagcatggtggtggcaaaaggtgtcagaaggagaactgtaccaaaagtgcagaaggccattctggactctgcattgcccatggtggtggaaggcggtgccagtttccagactgcacaaagggtgctcagggaagcacaaagttctgcaaggcacatggtggaggaaagcgctgcacattcgtcggatgcaccagaggggctgaaggcagcacttcattttgtaagggccatggtggaggcaagcgctgtgcctttcagggcggtggcgtgtgcccaaagagcgtgcatggtggcactcagtattgtgttgcacatggtggtgggaaaaggtgtgctagctttggttgcactaagagtgctagagggcgcacagagtattgtgtgcgccatggaggtggcaagaggtgcaagttcgagagctgcaccaagagtgcgcaggggagcactgatttctgtaaggctcatgggggaggtacacgatgcctgtggggccaggcggacacaagctttggtgctggtgcacagcaatgcgataaatttgttcggagcaagaccggtctctgctcagctcatagtgctttgatccaggaccactgtgttcatggcggtggtacattaggttccgctatctaccagtctgtgcatgtcaaaccgactgagatgatcaatggtgataaaactttactggatccggctatccctgttacaaacagtggtgttcatcctcctgtcctagctcagtctatgatcgatccgctgccagagggcagagttcatggtggtggcctgttggctttactttcgcggggcggaagcagaacaagcgctggtggctcagaattgtgcttcgggcaagatcgtgtggatctgaggctatcaggatctccatgaaactgatgactgcctgcagttttgatccaaattgtgttgctcatgctcgggttccataggatctacccggacgtgtactgtgaatctacccagacgtgtactatgaaaataagagggtagctcctagagcagatgtgttgttttattttagttaattgtttcagtgcatgtaatcacttactttaatgctcatgtttggacttgattaactctcagcaacttaaggttgaaatataatgtgcattttgctgcttattctgctga

SEQ ID NO: 203164 - DNA, 1623 bp, Zea Mays
gaaaacatcttttaatgtttgcagatgcttcactccagggttcaccagaatctcccaaatctgttgtactggtcacaggggagggggaatataacatggtatccctgcgtaaaaccatcagagcctaccttttggaaatgggctccccattcttgccatgtagagctcggtcaggtcgctttgtggtaaaggattactctcttaagatgtggctgaaagattctcctttctgcatggaccttgagttaaaagatgctccagctcatcctaagttaaactcaatgaagctgatcgaaggatatttcatgagagctggttttgtatcagcatttaaagatatacatgagagacttggggaagtatggccaaaaaagttttccaggttagctctgttgtcagaagaatgtagggatgaggttatcaaggctgatatacaaggaaggaaagaaaaactggagagaatgaagaagaagggtattgtcacagcaagaaaatctaaaacaagagcacgacgaggaaaatttgttaggcagcagaaataaaacacgaaagtagtgttggagtagtcgtggcctgttattttttgcttcaacacatgacattttctcaaacagcacctggcatctacatgaaaattttctgataggggtggggatggaggtgtggaaacaaagaatgaattatgattgctgctattttagcattggttacggttggttctgtaaacttcttactggaacaaacgatgtggttcatgttctccaagatttactgagcagcgggcacagctgggtaaccagctcatactgagatgaacaagctttggatattattcggcagtgtgcacctatgcagtgcgccttgggctgcgctgatgctttcatggggagcgcactagtgtggcagtaagatcggtgattgctgcagtgtggccttgccatggaagctgcgagcttctacaaacaaatgttgagggccggtgagaaggaaaatggctctgcttcattaatgtgctcagcatttgatgcccttgtgagtctcgagcatggcaagatggttcattgtcgcagcatgaagtctaggttttgttttgaaatgatgcacttcaagtgtggcaggctggcagctcagttaatactcaaattgtcttctaatgggaaaataggtctagtggagtggtgagagttttctccctaagtcatcaggtcatgagttcgacatagcctcttcgtatttacggctgaatgttgccttggtttatccctttccaagagccaactcatgtgggagccttcagcactaagtctgttctttcacttagcttatctttatgctgctttgaatccgataatttcatttgcggcttatgacaaggaaaaacttattgaacctgcaaaatttcatcctcaatatttgacaactataaatttggtccaactttgttcccaacttaatatgttcatttaatgtagtttgaaaacgcaggagagctacattcattgtattagagagagagaaagcagccatacaacaccagcttctcctatggggacatatatataagaggttgttacagactcaagagactagccttataaaaagaaatgacaagacctgactgag

SEQ ID NO: 203165 - DNA, 2550 bp, Zea Mays
gttgcagtcagtctaaaccacccattccccgtctcgtgcacctcctccgaaatccgcctcctctcacgcacgcggcccaaccaacctgccccaaaacctagctagatttagaaaaacaaaaaacctgtccccaacccgaaccgtgagatggctgagtacggcgagcgctaccagggcaacggcgaccaggccacggccgagggtggctatgcgcagaccgagtacgccgccggcgccggtggctcgccgccctccgacagcaatccctccgtgttctccgaccacgccgacggccgctcctcccagccccagcatgagacccaatcacatgacagtggttcctccaaatctcaagaaagggaccgagaacgtgataagggcaaggacagggagcgaggcagagaccgtgtccgcgaaaaggagaggggccgagacagggacaaggatcgtgaaagaggtgacagagacagggatcgtgatcgccaccacagggatcgtcgcgagcgcagcgagataagggaacaccgtgatcgttctgatgatcgtgaccgtcgcaggagtcatgattctgagaggagaagagatcgtgacagagatggccatcgtaggcatcgctcccgttccccttctaagggtcgtgaccgtgaccgcagatctagttctcattcacgctctagatcgaagagcaagcgtgtgagtggttttgaccaagcacctacacaacaggcagttcctattgttgctgctggtgttatccctggaggcaaacttggcccacattgtcatcggcttccactggattgagctgactgctgtagctttaatgtcagctgcctggtgtcaccgctcctattcctggggttggggtgcttccaaacttgtataatttggctgcaggacagttcaacccccatgttattcagccacaagccatgacacaacaggctacccggcatgctcggcctgtctatgtgggcggacttcctccaactgctaatgagcagaccgttgccatattcttcaatggagttatggctgctattggaggaaacacagctggtccaggtgatgctgttcccagtcaaccaccgctatggcctaggggcttcattcagcagcatcctttggattgcaacatgatgagaaacattaatttttctaatgcatcctatggtccaacaacaatgtgggctcccattcagacaggaaatataagttccgaatcaaccatgctaccagccacacaatctgcagtatattggaatcattatatgaactttgtcaggaatcctcttggttcagttcaaggaaatccttttccagattcgttttcaggtacaaatactagtacacctttgcagggttcgaatacaataccttcaatacctgtcaacttggagtccgctgctgaacatagtgttcaggacatcaatagtcctataaagacttctgcccctgttacaaaaccaaagaaaacaaaggaacaaaattatactgctgctgaagaccttctactttgcacaacctggttgcaaattagcagtgatcctattgtccacactggacaaaggaagaagggactttgggcacgaatagaaaaaaggtacaacgaacaaaggggcgagtacccttgtagaatgaatcgagcccttagcagcagatgggacaagattagagcagatgttggtaagttctcaggctgttacgcaagagtgctgcgagagaaacaaagtggtttgacagacgacgataagacttccaaggcggcaactttgtttgcacatgaggagaacaaaccatttcattttatgcattgctggcataagctgaagggggaacctaaatgggagagcatttgtcaaggacctttccgaggattacatggaaaagcaattggatcttctggtggtccttttattggtgtagaagaatcagatagtgggtctgctggtttgactggtaaacggcctctctgtcgtgattcttctaaatcagagagaaagaaggctgcgtcatcaacgacgacggaatacttaagccgtcttcaagaattaactgaaaaactaattcagcgcatcatagaaaagggtgagaagaaatataagtacaatgaacaggacatggagctagagaagaagaggttggacttggaagcaaaaaaattaagcattcgtaaaagggaattgagattaaaagaactaagtatggccgaacaacaactcgagatgctggagcgtactcgtgaagacgaggtcgatccagaagtatggagtatgatgaaggagcgcaaaaaacatttgcagcagttcatatttagtttttgctaaatttactgttgtttaacatgtcgtgcttctgtttccatatccggtttgcgaagaaatttataagtgcattgtcttatttgctttctaaaacattataaagttgttgtatgcttatgtcttgcaagacatgtcagtgttattaaagtttgtaacgttaattctgaaaggaaatgggcattaactattttctataatcgattttggtggttgacttacaacataa

SEQ ID NO: 203166 - DNA, 1800 bp, Zea Mays
gtagtttcatagtttgattttcttgaagcaatacgccacaactgatgtggagttttgaggaaaagggtttcctatgtcagctgcctggtgtcaccgctcctattcctggggttggggtgcttccaaacttgtataatttggctgcaggacagttcaacccccatgttattcagccacaagccatgacacaacaggctacccggcatgctcggcctgtctatgtgggcggacttcctccaactgctaatgagcagaccgttgccatattcttcaatggagttatggctgctattggaggaaacacagctggtccaggtgatgctgttcccagtcaaccaccgctatggcctaggggcttcattcagcagcatcctttggattgcaacatgatgagaaacattaatttttctaatgcatcctatggtccaacaacaatgtgggctcccattcagacaggaaatataagttccgaatcaaccatgctaccagccacacaatctgcagtatattggaatcattatatgaactttgtcaggaatcctcttggttcagttcaaggaaatccttttccagattcgttttcaggtacaaatactagtacacctttgcagggttcgaatacaataccttcaatacctgtcaacttggagtccgctgctgaacatagtgttcaggacatcaatagtcctataaagacttctgcccctgttacaaaaccaaagaaaacaaaggaacaaaattatactgctgctgaagaccttctactttgcacaacctggttgcaaattagcagtgatcctattgtccacactggacaaaggaagaagggactttgggcacgaatagaaaaaaggtacaacgaacaaaggggcgagtacccttgtagaatgaatcgagcccttagcagcagatgggacaagattagagcagatgttggtaagttctcaggctgttacgcaagagtgctgcgagagaaacaaagtggtttgacagacgacgataagacttccaaggcggcaactttgtttgcacatgaggagaacaaaccatttcattttatgcattgctggcataagctgaagggggaacctaaatgggagagcatttgtcaaggacctttccgaggattacatggaaaagcaattggatcttctggtggtccttttattggtgtagaagaatcagatagtgggtctgctggtttgactggtaaacggcctctctgtcgtgattcttctaaatcagagagaaagaaggctgcgtcatcaacgacgacggaatacttaagccgtcttcaagaattaactgaaaaactaattcagcgcatcatagaaaagggtgagaagaaatataagtacaatgaacaggacatggagctagagaagaagaggttggacttggaagcaaaaaaattaagcattcgtaaaagggaattgagattaaaagaactaagtatggccgaacaacaactcgagatgctggagcgtactcgtgaagacgaggtcgatccagaagtatggagtatgatgaaggagcgcaaaaaacatttgcagcagttcatatttagtttttgctaaatttactgttgtttaacatgtcgtgcttctgtttccatatccggtttgcgaagaaatttataagtgcattgtcttatttgctttctaaaacattataaagttgttgtatgcttatgtcttgcaagacatgtcagtgttattaaagtttgtaacgttaattctgaaaggaaatgggcattaactattttctataatcgattttggtggttgacttacaacataa

SEQ ID NO: 203167 - DNA, 707 bp, Zea Mays
tgggcccactgcaaaaaaatccccactcgacagcaggctcttcttcctcccaatcccgaactccatctcaaccgcaaccgcccgtcgcttcgtggccgcccactcaccacgcccgcctcgcccgccgcgggagggaacaagcgctcaggctgctttgtgggggcgccccgccgggagggcgaatcccggtggaggtgaaccctgtttgccagcagatctcgccgttgggaggccagagctgggcggcagaaagaaacgttgtgctcgagttcgaggtcctcgcggagatagccaaggcgagagggaagaccgtggcgcagagccgccaggagggaggaagacgtcgccgggacctactgctccgtgcctccagttggtacgcgtcccacgctccgtgcctctagccataggctacttcgtgggggcgccccgccgggagggaggaagccgccactgggagggactcgttgctccgtgcctccggttggtccgtgcctcgtgctctcgatgccttcagcgggtctgcgcccctactcgcactccagatccagaggcactgcaagctttcggcctgctgctcctatgtgagatccagtcgtcgacgtgatcttcttaacagtagtgtgtgagatccagacaccgacgcgatcttcttgacagcagcagcagtctcctccagacggacttttgcagcagaagcagatcag

SEQ ID NO: 203168 - DNA, 1796 bp, Zea Mays
ctagatcccatccagtgattattgtgaccttgtgcttggcagcctaactagatcaatggctgacggtgaggatatccagccacttgtgtgtgacaatggcactggaatggtcaaggctggctttgctggtgatgatgcgcccagagcagtgttccctagtatagtcggccgccctcggcacacgggtgtgatggttggaatgggccagaaggacgcctatgtaggtgacgaggcacagtcaaaaagaggtatcttgaccttgaagtaccccattgagcacggtatcgtgaacaactgggatgatatggagaaaatctggcaccacaccttctacaatgaactgcgtgttgctcctgaagagcacccagttctgctgacagaagcacctctgaacccaaaggcaaacagagagaagatgacccaaattatgttcgagacattcaatgcaccagcaatgtatgttgctatccaagctgtcctttccctgtatgccagcggtcgcactacaggtattgtgctcgattctggtgatggtgtgacccacaccgtgccaatctacgagggatacgcgctccctcatgccattcttaggctggatcttgctggccgtgatctgactgactgcctaatgaagatcctcacggaaaggggttattccttcaccacgacggcagaacgggaaatcgtgagagacataaaggagaagctggcctttgtggccctagactacgagcaggagctggagaccgctaagagcagctcctccgtcgagaagagctacgagctgcccgatgggcaggtcatcacgatcggcgcggagaggttcagatgcccagaggtgcttttgcagccgtcgctgatcgggatggaagctcccggcatccacgagaccacctacaactcgatcatgaaatgtgacgttgatatcaggaaggacctgtacgggaacatcgtcctcagtggagggacgaccatgttccctggcatcgctgacaggatgagcaaggagattactgccctcgcgccgagcagcatgaagatcaaggtcgtggcgcctcctgagagaaaatacagtgtttggattggtggctcgatccttgcgtcgctcagtacgttccagcagatgtggatatccaaggatgagtacgatgagtctggccctgctatcgtccaccgaaaatgcttctgagctagctatctgccgcgcctttcatagcgtgtcaagctgttgagatctgcgttgttgagttgagtgtctctatggagtatcacatactttctgcatgaggggggaagagtatacccaactaagcgcatgcctttcggatgccctgcttcgtgattcagatgctgctttctttcaagtgatatgtcgatgtagtgtgcgagcaatgtatttggtttggctacagctgttcctgtcgtctgtgcgtaaaacattagctatgtatctatccatatctgcatatttgaatgtatggtcgttttctcatatggtgtcaagttaaaattcttatgttctcttattaaattttagttacccatatgtggccataatagccatgatatcttgtgaaagggtctttagctgggttggttggttggtctaataagtataatattttgtgaaaggggatttagctgtggtggttggatgatctgaataacacttctcctgtcctgagtttaaaaatatcttgtctgttattctagggacttttttttaatataataccaatgagctatcttatgagtttgttttgcacaaaaaatgaatcaaatttgacaaaagtact

SEQ ID NO: 203169 - DNA, 5609 bp, Zea Mays
cttttgttcctcccgcttccttccctacgcgcaggtaaggtaacacccaagatgccaagacccaatccccatggagtcatggacaaggcaggctccacgtcctttgtccctgtccacgccgaggacaaagtcacgacaccaaatccctcccaggcatcacagaccccattctccccccacatcagcacagctcaggaagcttcccatcctccatggcctaaatcatgtctgacacttgacagttcacaaaaaggtcccgtttcgtggaccaatgtcttgcttcggttgaaaggcgcggtatctgctgctgcttctgtggagttattaggcttcgatttgggggtgggggccggtggtttcagcgtgggaggaccgcgaaaggcgatgctttcagcagcatgatccaggagatgaagggcgagatcggcgccatctcgtcgcgcggcgtgctacggctccggccggggagccacgccggggccgggcgagcgccggcagccgagccggacgaggcgccgcgggagggctgctgggcgcagttgcctctcgagcttctgcgtatggtgctggtcagggtcgaggaccaggagccgcggtggccgggccgcagcgccgtcgtggcgtgcgcctgcgtctgccgctgctggagggccgccgtcaaggagatcgtgcgcgtgctggaggcgtctgggaaactcaccttccccatctctctcaagcaggttgttttggttccctctcatcaactctgaacccgaataaaaaattgtgattttgccactcacacacctttgctattatgccatctgagtgggcaaattatccaatgcacatagactacttatgctgtcatgcacatatgcacacataaaatccagatcctccatctagaatccaacggcacctgactcttttacaaaaagaacctcccccaacagctgccaacggttgttgcaaaaagaacctcccgtaccgttcgattcaatatgtacgatctggatgttacgtgtgcacatgtgcatttcttggctatgtgcattcgatactttgccagtgtgtatgatttgtttgggcctggaattctattcatcgatttattcgggttttattaacttgcaatttcaaatctgtaacctgcaacctggcccaagggatgcccctctcaaatgtttcatcaggaggaaccgggctgctcagtcgtattctttgtgccttggagtcactgatgggttagctgatgatgggaaattttctacttgctgcacgcaaatgccgtaggcctgcatgcactgaatacctgatctcgcttgatgcgaagaacacatcagctggttcctacattggcaagctaagatcaaacttcttgggaacaaagtttaccgtctatgatgcccatccaccttgtgccagagctgcggtttcaaaggggtacatgatcggctcagcccatgtttctcctggggtacctgctgggaattatccggtttctcacatttcttactatgcgactttgggttctagggtgccaagaaagatgaagtgtgtcatggacagcatccccgtctcagcgattaaaggaggagggactgctcccacgcagaccgagttcccatccatgagctccagctccttcgcatcggttccattcttcactaggaaaccaggccaccgtccggacagttgtccaggtgttccgccgggtacccagaacgaaaccaagacggtgctgaagaacaagtcccccaggtggcaccagccgctgcagtgctggtgcctcaacttccacgggcgggtcacggtcgcgtctgtgaaagaacttccagctggtggtggcttcgggcgagagtaaggctagctgcagcggcatccgccacactcgcactccttagccctgtagccatttaggatgacgcctgaagctctgtagccatttagggtgacgcctgagctgtaacggcgtgcgctaaacgggtccctacctgctacagccgtaggtgaagacgcgcacgtcccccagataagggaagcactgtagcgcccccacagtgctctcctatttaatagttgaacaaaaatagaaataaaagatgaatagggttagataataatattttatagttgtagtggggtataggggataatatagggagaaccgctgcgggagatgaaaatttagggggtgaaatgttgatgatgtgacacaaaaaagtgatataagaggaaaaatttagagaaagccgctgcggatagcctaaccaggacgacgacgtgatactccagttcgggaaggacctgttcaccatgacttccggtatccgatctccgcgttccaggcattcgccatctgcctgagcagctttgacaccaaaatcactcgcgagtgagtttgtctcccagagagacacgctctagcaccctgctttgacacagaatgtccgtattggcactgatgatctgcgctgtttaccactgtcctccactagtacttttcaggggtatccaagtcatttattacttttgatcctatagtgtcttgtcttttattcgtgggagtgtgttcaagctgcaccatttttgtttacttccacgtctcatttctcagcaggtgaaccagctagcagatacagcaaggaattaatagcctaatatagacttacctgagctttatgccggagagtttggtgatcaagtatacttttgttcagtacaatcgtgatgtaaatagcaatctagctggaccagatcatacttgtatctatctatgcaaccctacagttgtatcctaaagcatttattttgtacagttctttcttaaaatgacccttctgaggcgccagacgagtatatacatacatttgcaagtattttggcactctaaaaaaaatactgagacggctggctaaggtggcatggtggtgatgagttcaaagttgaagcttcaaacggcctcctggcctggctgcagatgattgtgatatagagtaatgaattttgctaacaagtatataatattatttttagggtagaaatttagagtaatatgagtgaggatagtctaagtatcctagatttattatcttcctatttgactacagtcagttatgcacaaatttgaaatcgagatgaaacttggtggtggatcggagctgaatgtgcaagagtagacgacgacaacataggtcagggccagccagccaaggaagccgaatgtactcaacgcagactagtaagtagtacagtgcactacagtacgtcgtggatttatttctgctgcacagagagaggaggacagtgaagtatcgccgtcctcgcgagcgaccggccggcggcaacaacacgtgcgagcagcgaccgacctgcaacaccaaaccaaccaagcaacccacgagacgagacgagaagcacatgctgcgctgtcgccctggtagagcgagcgaggcacgggccacgccacggtccccctactcctccggatcgatcgggggagtagtgtctcagacctcgccggacttggcgaaccgccccttgatccgcatccggccgtcagcgcgggccttgcgcgactcgtaccggatctgcttgccgaacctgtgcgcaagcaagagcagcgagagctagcgacgtgagagcgactgtggtgtcgatcggagctaccactactccggctcgcccgctcacctcctgttcttccgcttctccttgtagcgcgagatcaccgtgccgcggtcggggtgggccacgtcgtagccgcccttcttttccgtcaccggcaccagcgccgtcgtggccaacagctgcggtcgcggggccgtttcctcgtctggcttgttgccgctattgtccacgtcgccgccgctgctgagcgtgacgctggcggggaagatctccgacatgtccacgaacgaggacaggcacggctcgtccggcgccggagcagcctgctcgcgcgcctcctccacctccacctccgcccggcgcgcgtcgacgtcacaggcggtcgcgatccacgcctcctgctcctgtcaccagttcatgcatgtcgttgcttagaaatttgatgagatcctgttgcccttggaaatatgtagtttagaattgccatatataaactagtagatgctgtaatgtgtgcagctgcagcagagaagtgactgaacactgaaccaaacctcgtgggaaggcactgctgcgaaagccatggtcgctgcatcatgccaggcggcgtcagcgtcagcagcgtcgagagccccgaagtctgcggcggctccaatgtcgagctccggcgacgcccatggaggcagctgctcgccgtcacccggctccagctccgcgtaagacgccgccacggccgccgcctccgacttggcgagctcctccagctgccggattaccacgtcagccagctcaccgccggagctccggttctaggtcgccatatcaagacaaccattagagaagaggaaaaagaatcccgttttttttttgtttggtttcatttaacaatggctcttgtagcagggcagcagccgaagcagcaccgtacctttggggacggcggtgcgaggagcggatggaggccatgacaagatgtggtaggaacgaccacgtcctccaagcacaccacctggggctcctcccaggtggaccaccaaccgacgtccccgcccgccgccgccgccttctcgtcgtacccggcgacgccgaggatggccgcgagctcggcgatcgaagggcacccggcgtactcttccaccgcgtcatggtcgtggtggagcggccgcgggtcccggtgctcctcccccttctcctcgtcctccttctccaagcagtagcagtcggcgcagacgaagccgccgccgccgccgcggggggacgcgacggcggtggcggcggctgcgcggcacctggcgcagagcggcgcccgggcgtggcgggtggacaccgtgttggcgccgtgcacgtggcggtcgcacggcaggcacagcctcgcggagtcggcccggcagtacaccacggccggcaggcccatgcagtagtcgcatctcggcgcctccttgctgccggccgcgtccgcgtcggacatggcttccgccacctgcggcggatcacggcagcggacaagacccccgggggatctggttgggacgagcgcgatttgttgcagtgaggacggaggaggcacaggattgatggcgcgaaagggagaggggacgatagaggcctacaactcgcacggtcgtcaccctcactcgtcgctactgtcttgtagttgttgtaggtcgatggtgggtgccagtacaaagacactctgtagtctgtagatggccatgcagcagcagcagcacgccgccccgtagttgagcgcgaagcccgctattttggctcagcgtttaccagagctgtatgtattctacatatatgtctactgttgatatttgattttctaaaggtgtcgaaaacaagttaagtatttggaccttcgtcctttgatttaatgcgtaggatgaaggttcttaaaggagatggaaataaaaacgataacatgccatataagccaaaaagataatatgtcatacaatttaatgaagagagatataagagagtttaac

SEQ ID NO: 203170 - DNA, 5081 bp, Zea Mays
acacccaagatgccaagacccaatccccatggagtcatggacaaggcaggctccacgtcctttgtccctgtccacgccgaggacaaagtcacgacaccaaatccctcccaggcatcacagaccccattctccccccacatcagcacagctcaggaagcttcccatcctccatggcctaaatcatgtctgacacttgacagttcacaaaaaggtcccgtttcgtggaccaatgtcttgcttcggttgaaaggcgcggtatctgctgctgcttctgtggagttattaggcttcgatttgggggtgggggccggtggtttcagcgtgggaggaccgcgaaaggcgatgctttcagcagcatgatccaggagatgaagggcgagatcggcgccatctcgtcgcgcggcgtgctacggctccggccggggagccacgccggggccgggcgagcgccggcagccgagccggacgaggcgccgcgggagggctgctgggcgcagttgcctctcgagcttctgcgtatggtgctggtcagggtcgaggaccaggagccgcggtggccgggccgcagcgccgtcgtggcgtgcgcctgcgtctgccgctgctggagggccgccgtcaaggagatcgtgcgcgtgctggaggcgtctgggaaactcaccttccccatctctctcaagcagggatgcccctctcaaatgtttcatcaggaggaaccgggctgctcagtcgtattctttgtgccttggagtcactgatgggttagctgatgatgggaaattttctacttgctgcacgcaaatgccgtaggcctgcatgcactgaatacctgatctcgcttgatgcgaagaacacatcagctggttcctacattggcaagctaagagctgcggtttcaaaggggtacatgatcggctcagcccatgtttctcctggggtacctgctgggaattatccggtttctcacatttcttactatgcgactttgggttctagggtgccaagaaagatgaagtgtgtcatggacagcatccccgtctcagcgattaaaggaggagggactgctcccacgcagaccgagttcccatccatgagctccagctccttcgcatcggttccattcttcactaggaaaccaggccaccgtccggacagttgtccaggtgttccgccgggtacccagaacgaaaccaagacggtgctgaagaacaagtcccccaggtggcaccagccgctgcagtgctggtgcctcaacttccacgggcgggtcacggtcgcgtctgtgaaagaacttccagctggtggtggcttcgggcgagagtaaggctagctgcagcggcatccgccacactcgcactccttagccctgtagccatttaggatgacgcctgaagctctgtagccatttagggtgacgcctgagctgtaacggcgtgcgctaaacgggtccctacctgctacagccgtaggtgaagacgcgcacgtcccccagataagggaagcactgtagcgcccccacagtgctctcctatttaatagttgaacaaaaatagaaataaaagatgaatagggttagataataatattttatagttgtagtggggtataggggataatatagggagaaccgctgcgggagatgaaaatttagggggtgaaatgttgatgatgtgacacaaaaaagtgatataagaggaaaaatttagagaaagccgctgcggatagcctaaccaggacgacgacgtgatactccagttcgggaaggacctgttcaccatgacttccggtatccgatctccgcgttccaggcattcgccatctgcctgagcagctttgacaccaaaatcactcgcgagtgagtttgtctcccagagagacacgctctagcaccctgctttgacacagaatgtccgtattggcactgatgatctgcgctgtttaccactgtcctccactagtacttttcaggggtatccaagtcatttattacttttgatcctatagtgtcttgtcttttattcgtgggagtgtgttcaagctgcaccatttttgtttacttccacgtctcatttctcagcaggtgaaccagctagcagatacagcaaggaattaatagcctaatatagacttacctgagctttatgccggagagtttggtgatcaagtatacttttgttcagtacaatcgtgatgtaaatagcaatctagctggaccagatcatacttgtatctatctatgcaaccctacagttgtatcctaaagcatttattttgtacagttctttcttaaaatgacccttctgaggcgccagacgagtatatacatacatttgcaagtattttggcactctaaaaaaaatactgagacggctggctaaggtggcatggtggtgatgagttcaaagttgaagcttcaaacggcctcctggcctggctgcagatgattgtgatatagagtaatgaattttgctaacaagtatataatattatttttagggtagaaatttagagtaatatgagtgaggatagtctaagtatcctagatttattatcttcctatttgactacagtcagttatgcacaaatttgaaatcgagatgaaacttggtggtggatcggagctgaatgtgcaagagtagacgacgacaacataggtcagggccagccagccaaggaagccgaatgtactcaacgcagactagtaagtagtacagtgcactacagtacgtcgtggatttatttctgctgcacagagagaggaggacagtgaagtatcgccgtcctcgcgagcgaccggccggcggcaacaacacgtgcgagcagcgaccgacctgcaacaccaaaccaaccaagcaacccacgagacgagacgagaagcacatgctgcgctgtcgccctggtagagcgagcgaggcacgggccacgccacggtccccctactcctccggatcgatcgggggagtagtgtctcagacctcgccggacttggcgaaccgccccttgatccgcatccggccgtcagcgcgggccttgcgcgactcgtaccggatctgcttgccgaacctgtgcgcaagcaagagcagcgagagctagcgacgtgagagcgactgtggtgtcgatcggagctaccactactccggctcgcccgctcacctcctgttcttccgcttctccttgtagcgcgagatcaccgtgccgcggtcggggtgggccacgtcgtagccgcccttcttttccgtcaccggcaccagcgccgtcgtggccaacagctgcggtcgcggggccgtttcctcgtctggcttgttgccgctattgtccacgtcgccgccgctgctgagcgtgacgctggcggggaagatctccgacatgtccacgaacgaggacaggcacggctcgtccggcgccggagcagcctgctcgcgcgcctcctccacctccacctccgcccggcgcgcgtcgacgtcacaggcggtcgcgatccacgcctcctgctcctgtcaccagttcatgcatgtcgttgcttagaaatttgatgagatcctgttgcccttggaaatatgtagtttagaattgccatatataaactagtagatgctgtaatgtgtgcagctgcagcagagaagtgactgaacactgaaccaaacctcgtgggaaggcactgctgcgaaagccatggtcgctgcatcatgccaggcggcgtcagcgtcagcagcgtcgagagccccgaagtctgcggcggctccaatgtcgagctccggcgacgcccatggaggcagctgctcgccgtcacccggctccagctccgcgtaagacgccgccacggccgccgcctccgacttggcgagctcctccagctgccggattaccacgtcagccagctcaccgccggagctccggttctaggtcgccatatcaagacaaccattagagaagaggaaaaagaatcccgttttttttttgtttggtttcatttaacaatggctcttgtagcagggcagcagccgaagcagcaccgtacctttggggacggcggtgcgaggagcggatggaggccatgacaagatgtggtaggaacgaccacgtcctccaagcacaccacctggggctcctcccaggtggaccaccaaccgacgtccccgcccgccgccgccgccttctcgtcgtacccggcgacgccgaggatggccgcgagctcggcgatcgaagggcacccggcgtactcttccaccgcgtcatggtcgtggtggagcggccgcgggtcccggtgctcctcccccttctcctcgtcctccttctccaagcagtagcagtcggcgcagacgaagccgccgccgccgccgcggggggacgcgacggcggtggcggcggctgcgcggcacctggcgcagagcggcgcccgggcgtggcgggtggacaccgtgttggcgccgtgcacgtggcggtcgcacggcaggcacagcctcgcggagtcggcccggcagtacaccacggccggcaggcccatgcagtagtcgcatctcggcgcctccttgctgccggccgcgtccgcgtcggacatggcttccgccacctgcggcggatcacggcagcggacaagacccccgggggatctggttgggacgagcgcgatttgttgcagtgaggacggaggaggcacaggattgatggcgcgaaagggagaggggacgatagaggcctacaactcgcacggtcgtcaccctcactcgtcgctactgtcttgtagttgttgtaggtcgatggtgggtgccagtacaaagacactctgtagtctgtagatggccatgcagcagcagcagcacgccgccccgtagttgagcgcgaagcccgctattttggctcagcgtttaccagagctgtatgtattctacatatatgtctactgttgatatttgattttctaaaggtgtcgaaaacaagttaagtatttggaccttcgtcctttgatttaatgcgtaggatgaaggttcttaaaggagatggaaataaaaacgataacatgccatataagccaaaaagataatatgtcatacaatttaatgaagagagatataagagagtttaac

SEQ ID NO: 203171 - DNA, 1027 bp, Zea Mays
gacgcgatgcccgtcccgttcccatccttgagaaccgagcggacgccgagctgcaagtaactgcaccgactttcaaccggaagagccgagccgaaccaaagtcgcctcttcttctccaacctcccctcgcctcttgactaggccagggttccatcccaaccccgccgccatccgatccgatggagggcggcgactcgtccggcgccggcgccggctccggtggcgccgtggcggcggcggccaagtggcggagcgacgcgtcgcggtcgttccagtactacctggaccgctccacgcctcacgccactgggcggtggctcggcacgctcgccgccgcggcaatctacgcgctgcgggtctacatggcgcagggcttctacatcgtcacctacgggcttgggatctacctcctcaacctcctcatcggtttcctctcccccatggtcgaccccgagctcgacccctccgccgccgccgaggggccggcgctgcccacccgggggtctgacgagttcaagcccttcatcaggcgtctccccgagttcaagttctgcgccagattgtgcatatgatcaaatacaaatatgtgcctttcagtatcgggaaacagaaatacggtgtgaagaagagtgtcgcaagcaccagttcctcgaaagactgattatgagtctacctcagtaggaacttggcaggggaacaagatacggtggatgatgatgtgctaaatacctaagtgtaatactccattcatatctagatgtagacggatattcgctcctgtttctgactctgggctcactgtttaattcgatattgtgcttagctccctcctatgcttgtatagcgaattccgcatctcagataaattatttcgtttatttactagatatctgggccccgaaaacaataacctccatgctctcagcgagtttcttggttgtgagttggagtgaattaggcgggttttttttataaaaaaaatcaaactgaacagaatgctaaagtttagacgcataacgtttgagcc

SEQ ID NO: 203172 - DNA, 1317 bp, Zea Mays
atgcgtatagcagtagcagcggcggcgaaggcggcgtagcaggcttcttcctctgaactggaccgtcggcatgccggggatcctagcagcgacggtcgaggacacgctgatcgcgtcggtgccgggcagctagcttcttgtttctcccataaaccaaatctttcgattcacatgtctgctttgttttcacccatgaggtaatgaaaacaccacgcaaatgttgtctgctttcttttccgtgcttcctttcaggtatgcggcgattgctgatcagtcaaaaccaagccctttgcagcagcctgaactgaacctgcccatgctgacacgcacgaggtccatgcccagcatcaggctcgccaaatacgcaaagtggttcgacgacagctcggaggacatcaggagcctctgcgggaaggcgctgcagatgctgcgcacgcactacggctgggagagcgtggacgtcaccgtccctgagatcgaagagatgcggctggcgcactacgtgaccatgggctcggagtgcactgcctccctcgccgccaagtacctggacagcatggacaggtccgaggtcgggtgggacgtgcggatcgcgctcagcgcctacgggtccttcagcagccgagactacctcagcgcgcagcgtctccgatgccggcagatgtacttccacgagaagatcttcgagactgccgacgccatcgtcacgccgatgacaggggtgacggcgtacgcgctgcaggacgacgcgctgagcacgggggagctggactacatcaacggagctgcgctggtgaggtactcgatcgcgggcaacttcctggggctgccagcgatcaccgtgcccgtcgggtatgacaggggagggctccccgtggggctccagttcatcggccgcccgtggtcggaggccacgctgctgcacctcgcctacgccatgcaggaggcgtgcgggaagaaggtgctccggaagcccaaggtgcactacgacctcctcaccaaagagtagctccagcgagcatcgatccggcagattgctctctatgaggcgcgcggttgctgattgcatgcacctctagtgtgattgattgtttgtttgattgattgagcttgtgatgagagagtgggggaagttgaatggaatgccgtcaatgtcggacaactctcaactaggagaagaaaaaaaaacatggttgccagcaccatgcatgtgcaccaccattcgttttttaatgtcgtcctcattgaaacattatgtaagtattgtgtatacgtgtgctttagattcgtttttcactgcccaccggaaaatgaacc

SEQ ID NO: 203173 - DNA, 3313 bp, Zea Mays
gaaaccatccctgcaggtccctgctccctggttatattaagcagctcccaatctttggcatttgcaggcacacaacacaacacagttctccctttccactccagtccaaccaaccgtccatgggtttcttcatcccgccgcccaaggtgtacaagccggcggcagaggtcgacctcgggccggacagcgacgagcactacatcagccccaacgtgaaagcgccccgcgtggccgggttcctggtgaagatgctggcctgggtgctggagacgccggtgcttggctggatcgtgctcggcgtcctcaagagggacaacctcgtctacaagctcgtctcggacgctgagatcccggagccgccgctattcacggccacccacacatggcaagcgatccaggagcagagcgtgcgcgtgacggagtcgaggctgtcgccggcggagcgcgtgcaggaggccgtcgcctgcgtcccagctgctgcccaggcccagttggagccggcggcggggttcaggcgctggacggtgcgggacttccacagggcgtacagatcaggacaggctacccctaccatggtggcgcggcgattcctggcagccgtggaggaatgttcagggccggacctgaacatgggcttcttcatcagctgcgaccctgcggacgtgctgcggcaggccgaggactccacccgcagataccagcaagctaggcagaaccggccgttaatggatcacggccgtaaaagcaccaacaagtgacagtggtataactatatagcaccatatacatgcgtactcactactcagcaaagctcagcagtcactagtcagcttcaactctgcttctagaagatgtcaggctgtcaccgtaagggttcagctctgctactggatagtattggatagtatgctgcggtcaagcactagatatagctaagaaaacttctttatataatacaatatatctaagccttgtattttatctactagacttctcaaaacacgactcgtttatgtggattatataagtaaaactatatctagatttagacaaccgtgctaaagatgttacttcaccaaaatatatctcttatatctttttacacttattttttaataatttttttaagatataaatcatttatgtgtgatgtagaggcccctgagtagaaacccagcactacttttaccgcaccaccagagtggcccctgcctggtacaagcgccaacaggcccatgaggcatgctccagtgttgcgtagcagctcagaacagtggcggcagctgctttaggcctcggttacgtctagattaaagaggattgacagacattaaatcctttctatctaattttgactatatagccagttcggtccagacgacgaacgaagcgttttgagaggaacggaggagccgtctgcactgaatgtccttggacggaaaaaccggtgctgaattaatcgctagcctgcgcaagatttgatcgcgcagtacgcgtacgtggatgtctgcatgattgatgtccggtccatccctcatcgctggatggagtgggcattcatccattgctgcatcagcatgtggctggccctggccgtagtgacgaaggactccggtccagtaggaattacctgccctgctgacctgtaggaattcaaggagggggacagggccacgtacagcccccacagcagagagatcgcatcgcctccttcgttcccgcgccgtcactgtatcgggcgccgctgtccgccatggacggagtactggtcgccgtcaaggacgagctcgattgcctgccgtacccgaccagcggcggcacgcggtggctggggtcggcgcggcggtgcgcggcggacgcggcgtgcgtggcgcagctgcgcgcgtgcggcgccgtgatggccggcaaggccaacatgcacgagctgggcgcgggcaccagcggcatcaacccgcaccacggcgccacgcgcaacccctacaacgtgggcagggtgtcgggcggctcctcgggcgggtccgccgccgccgtctgcgccgggctctgccccgtcgccctcggcgccgacggaggcgggtccgtgcgcatgccggcggcgctctgcggcgtcgtcgggttcaagcccactgccggccgcctctccaactccgggcttcttcctctgaactggaccgtcggcatgccggggatcctagcagcgacggtcgaggacacgctgatcgcgtcggtgccgggcagctagcttcttgtatgcggcgattgctgatcagtcaaaaccaagccctttgcagcagcctgaactgaacctgcccatgctgacacgcacgaggtccatgcccagcatcaggctcgccaaatacgcaaagtggttcgacgacagctcggaggacatcaggagcctctgcgggaaggcgctgcagatgctgcgcacgcactacggctgggagagcgtggacgtcaccgtccctgagatcgaagagatgcggctggcgcactacgtgaccatgggctcggagtgcactgcctccctcgccgccaagtacctggacagcatggacaggtccgaggtcgggtgggacgtgcggatcgcgctcagcgcctacgggtccttcagcagccgagactacctcagcgcgcagcgtctccgatgccggcagatgtacttccacgagaagatcttcgagactgccgacgccatcgtcacgccgatgacaggggtgacggcgtacgcgctgcaggacgacgcgctgagcacgggggagctggactacatcaacggagctgcgctggtgaggtactcgatcgcgggcaacttcctggggctgccagcgatcaccgtgcccgtcgggtatgacaggggagggctccccgtggggctccagttcatcggccgcccgtggtcggaggccacgctgctgcacctcgcctacgccatgcaggaggcgtgcgggaagaaggtgctccggaagcccaaggtgcactacgacctcctcaccaaagagtagctccagcgagcatcgatccggcagattgctctctatgaggcgcgcggttgctgattgcatgcacctctagtgtgattgattgtttgtttgattgattgagcttgtgatgagagagtgggggaagttgaatggaatgccgtcaatgtcggacaactctcaactaggagaagaaaaaaaaacatggttgccagcaccatgcatgtgcaccaccattcgttttttaatgtcgtcctcattgaaacattatgtaagtattgtgtatacgtgtgctttagattcgtttttcactgcccaccggaaaatgaacc

SEQ ID NO: 203174 - DNA, 688 bp, Zea Mays
gtttttatcagctctgatcttgagctagctatagcactccaacagcaagagtttgagcggcaaccacaaaggtttcaagctccacagccgcagcagcaacagcaacaacagcaacaaccaccacctcagacgcagtaccagactcaatctggccgaccaggacttgttgttggtccaaggaggtccaacgccccacctccgtccagaagtgaatcgaagaaagagagatgcatcgtgatgtaaaaataccttcaacagaaatgtagaagaaaaagagagaaggaactcattaagtcattatactgtaaagaaatgttttcttctgcggaggcagtgtctgcgtttagtcaccttgagccatctcccatttgagctttttttttggttttactttctctgatgtatgtaaataacctaaacgaataaagtgtagaaacagatgctgtcaaagtgatggccccatgcaatgtgatttcattcatcgccccgtgcaatttgattttttttcgtagccctctgaaatcgattgattctatttcacttgtcacaatgtaacgctaatttttgaattctaaaattgtgggttattttgataacctgtttagttgtatttattttcagaaaagaactacatatttacttttcacgataaatgaaagtttcgtaaaaataaactaaaaataaaggt

SEQ ID NO: 203175 - DNA, 2184 bp, Zea Mays
gactgacttcatctgcatagagaagttgtacccttgtgtgggtattaggaaaccaccaaaattcgaatctggtcggttgtgtccatcagttaggaaaccatgaaaatttgaagctgatcggccatgtccatcaatttaacagtcaaggtttctgtttttgaatgagaatggggctatcctcagtttgagaaaaaggatactgaaactgctaccgctattggatcaaagtcctacaatgctcttgcttctggacttgctgaattcaagtcaggtaaaccaacagaagaaaacaaatatgtggaggaagaaactgttgattttgctgccgcaacaactgcagctttaaagattccatctcccagtgtttctcgtgggagatcgtttgatgaacatactctctcaaactcatcaactgtaccacataaaaggcgaggtgaccttgaggaagaagaggaactgatgagagtcctcaatctatctaaagctaaaagtggggatgtagaagtttcttttgacacttcacatagtcattcatcctccaatattgagacaccacaaaatgagagttttcagtcagaagcactcgagttggtggtggcgacaaaaaaagaggaatatggtaatcacgctacgagtgatcatgtctctatgctatcagtcacaaatgttgctattaatggcagcgaagttgtacccgaagaatcccaagaaaatttgatatctaaagaaccagaggacaatggaataaagaaccttgatatacccattcaattttcagaaactactccttatccgtctcatgaatcctttgctagcagtgaccaccaacctgctattcctacccttgttgaaggtgataaagaaacctgcaaagaacagttcgatgtacaaattcatggccagtctaatgatactgaggtcgcttgtgactcatcagttacaacttgtgaagctgttccagatcatgctacaacagaactggatgtgaaaagtgattctttagataattctcagtctctaccttcaagcattcaggaatgtgaaccaatataccaaggtgaagagcacatacttggcaccacaaatatggtgtatgaaaatcaagagccagtgtatgagggggaggtggttcttgctgagcaggctgacaagattggggaaagcagttcttctggggatgacaaggccacagaacatcaattctcttctgtttacaagagggacttaacgaaagtgagctttgtgtcttcttccgcaataaccactttaacaccatgttcaagtacaacggaagtctatatctcctagcaactgatcaaggttttataagccaaactgatttggtatggcaaaggttggatgaggtgaatggagatggcgtttttcttactagcaacttcacaccatttaatgctgaaactccaagaaatgattcatggaatgaacagcaagctatgacgagtactgctgattatcttgctcaatttgacaactccacttctggaaactctgatcttgagctagctatagcactccaacagcaagagtttgagcggcaaccacaaaggtttcaagctccacagccgcagcagcaacagcaacaacagcaacaaccaccacctcagacgcagtaccagactcaatctggccgaccaggacttgttgttggtccaaggaggtccaacgccccacctccgtccagaagtgaatcgaagaaagagagatgcatcgtgatgtaaaaataccttcaacagaaatgtagaagaaaaagagagaaggaactcattaagtcattatactgtaaagaaatgttttcttctgcggaggcagtgtctgcgtttagtcaccttgagccatctcccatttgagctttttttttggttttactttctctgatgtatgtaaataacctaaacgaataaagtgtagaaacagatgctgtcaaagtgatggccccatgcaatgtgatttcattcatcgccccgtgcaatttgattttttttcgtagccctctgaaatcgattgattctatttcacttgtcacaatgtaacgctaatttttgaattctaaaattgtgggttattttgataacctgtttagttgtatttattttcagaaaagaactacatatttacttttcacgataaatgaaagtttcgtaaaaataaactaaaaataaaggt

SEQ ID NO: 203176 - DNA, 2517 bp, Zea Mays
gcaaattcgcctcggtcgttcaaccaaacaagctcactcccggccatcaggcgcacaccgctctcccgccgccgtcctgcgtcggagcgatatccctacatccccacctcatttgcacccggattggcttcttcttctactactactgtacagaactttttatgtggctgcaaagttctgtaattctagaggagcaaaatggagattattatcattatctcacttgtcattcttttggcactaggagctctctttgcgatcccaaaatcgcaaaataaaggtaaatcaaaaggaaccgacttaggagctggaatgacatctaggagctttacgaaggaagagatctctaaacataacacaaggaaggactgttggatcgtcatcaaggacaaggtctatgatgtcactccttatgtagaggagcatccaggcggagatgccattctaaataatgctggtggtgattccacagagggcttttttgggccacagcacggcactagggtcttcgatatcatcgaggatttctgcatcggtcagttgaaggcatagggtagcttgtattgaattcgtggaattttccggaaatcaagttttgagaagctacatgttatccaacattttaagcattgcaaccttcaagcatttgagatgtcagtgtaattgttccacaattgtcatcggggctgctaggagctgtgatgtagcactgcgtttttattctgctgttgtgtgactgtgtctttacatttctgttgttggacaagactccaaaacgcttgtaattgttctggctaagggcccgttcggttattcaggaatctactccagaaaggatttcagctggaataattgtataatttgtataacaattagtaacctggaatagttcctagttttgttccagcctaaccgaacggggcttaaatcagaatctgtttcacacgatcatttctcgagtgatgttacattgaagatgtcccgagtttgattttaacttggctgttgaatgcgttatttaagatttgtcgtgctctaaggaattgatggtatgcaaacatgaaagtgaacagtatgaagagaacataatttctgagattgagctgattgttccgtgagtagtaaaaattaacttttctcttgctgagtgaaatcaacaaaacccaacccatgaaagggaaagaaagaaagaaagaaaagataatgagacattaaaatgtatcctaaaagctttgctggcttctgctactgcacagttctcaggaataggctcctctgctgcagctctgctcctccctcctgtcttggagaagtggacagtgctgccgatcagttgctcttctcatggatagtagaggcttggcattgcggtgtcaatgtcgaagttctggtcgaatacgtattcgacgcattcgagaggcatgaattcgtcgtcaggcaccggaaggggcgcaaccgacgagacggcggcgaacgccgatgacaccacctcctggaggtccacgtccgaggtccagtccctgtacccgggcaccgggcaaggcgagatgccctggtgcaggcagccgttgaagtcggagccgacgggcgacgcgagggaccacggggacgaggcgccccgcacggggcagctctcgggcgtcatcggcgggagcccggcggcgttgtccgtggtggtggtggccaccgtgagccgcgcggcgaggccctgcagcgcggcctgcgcgtgcgggttgtgctgctgcgccctcttggacccgccgccggcggcggcgggcctgcaggtgtgctcgccgtggtagacgacgtcgaagagcgcggggtggtcgtcggcgcgctgcacctgcttggtggccaggcagttctgcgagttgcggtgcgtgcagcggtagtaggcccgcgggtgcctggcgccgaggatgtccttctggccgtacttgcgccagctgtggccgtcgtcggcgctgacgcgcacctgctggctggtccagcgcgccgtggccttgcgcttcttggggctggcgccggcggggcggaaggggtggtggtcggaggcggcgtcactgcttatcgggctccccgtggcggtcagcggcgagggggcgaggtccggtgacgagtggagcatgccgatggagcggtcggtgagcgcgacgatctgttgcacgaggcagcggcagaggtcgacggagtccgcgtccgcgggcgcgcgcagctgcagctcgagctggctcaccaggtcctgcacgcggcccaactccgagaccaggagcgcccgcccgccgctctccacggcttcagccattgctgcttcgaggataggtgagagctggagcaggggagtccggtcgtgaggtggcgagcgatcggagatcaggactcaggagtggcttggctcgacgtggaggaagaggaggatgtttttatagcaagcgaaagcgagggagggaggccggagggggaagcgcgtccgcgtgggggaatttcaagtgagctgaggcgaggcgaggcgagcag

SEQ ID NO: 203177 - DNA, 632 bp, Zea Mays
aagctcactcccggccatcaggcgcacaccgctctcccgccgccgtcctgcgtcggagcgatatccctacatccccacctcatttgcacccggattggcttcttcttctactactactggtaaggagttcctagcctagtctcgcttggatgggatgttcgtgctgtcctctaatcaggatcttcctttgtgctattgggatagtcgctccaaaatccgaatccatagtcacggtgttcctcttttttggatcgtacagaactttttatgtggctgcaaagttctgtaattctagaggagcaaaatggagattattatcattatctcacttgtcattcttttggcactaggagctctctttgcgatcccaaaatcgcaaaataaaggtaaatcaaaaggaaccgacttaggagctggaatgacatctaggagctttacgaaggaagagatctctaaacataacacaaggaaggactgttggatcgtcatcaaggacaaggtctatgatgtcactccttatgtagaggagcatccaggcggagatgccattctaaataatgctggtggtgattccacagagggcttttttgggcaaaaatggtcagtttttttagttccggtgctgcctatcc

SEQ ID NO: 203178 - DNA, 1577 bp, Zea Mays
tttattgttcgatgggagcttcgatttggattcttgcttggtctcttggtttctgctcgttttgtttggggactgtgcgctgaggggggtatgggacatgattcttgcacctgcacctgtccttccgttgattccttcctggatggctggataactgtcatcatgaggatggtgtgaggcgatctttgggatgtgttctcctgggcgttcagtgcaatcgaatgctcaattgatggcgatggagggacctgttttctgccgtcctgcaatgcaagcgaaactgcctgctgctgcgctgatcaacaactccctgaccaaatccgggcagcttgggactgcattgtttggtgccatttcaaaatacagaaacatttcaagattcatttctcccatctctcaaacatctacgaagaacataggtccatgctgtagcttcagctcgtcttctgatggtaatggatacatggctggaaactctagcgagagtgatgaagactatgttaattctactgtgctagaagcagttgaggtgagaagtggatcagaaggatatgtgataaagatgcgagatggaaagaacttgcgttgtgtccatagtaattttcaagggagaaatattccagagaatacaccacaacctgctattgttttgaggattgaagatggaagcggaactttactcccgatcattgttttggagatgccaagcgttcttctgatggcagctattcgtaatgtccacattgcacgaccgaccatatatcaagttgtcaaggaaatgattgataaaatgggttatgaggtaaaacttgttagggtaaacaaaagaattcaagaagcctactgtgctgaactttatttaacaaaggtcaatgatcctacagacaacatcaccttcgatcttcggccttcagatgccataaacattgctgttcgttgcaaggttcctgtacaagtccatagaagtcttgcatacagtgatgggattagaccagtcgagccagcaagaatggcagtaacagctggcctatcagatgggttgttatttacagagcttgacagacctgatggacagccatgtgtggaggctcaagagtttggactggtgaggaacatgctcattgcagctatcgaagagagatacaaggatgctgcatcatggaaggacaaactgattcggctcaggtctaagcgggagaactgggcctgagagcgtcgcatgtctggatggtgtaaataaagatgacgctcagctgaattccagtatgcactccagacaattgatactgtttatggctctatgtaactagctgtacatattgtaactagctgtacatattgtacgtactatgctcaggtctcagctaaattcagactaagatttgaagtgaaaaactaatccttttgtaatcttggccgtattaatttgtatgttagtctgttaggttgaatgtttggcatgaatttttagctcatcgacctgcggtgagatatgcagaatttcggttgtacacggaactaagcagcgctaatattttcacaggctgctgttaagaagagagattgctgctttgttt

SEQ ID NO: 203179 - DNA, 1620 bp, Zea Mays
actgggagaccgatgctcgccgtcgttcgcccaccgctttgcgattcttctctcttccggataaagcgaaagacgacctctcctcgtgccttttccaaatcaggcttgttcttgatgcggtctgcgatccgattcttgtggcttccattcactctcttgggattcttttaccatttcgtggactcttttgtttcttctcgttttctccccccgttaattggagcagcgacggcttgctcctcttcgtgtaacgagatttagtttccttcggattgatggcgatggagggacctgttttctgccgtcctgcaatgcaagcgaaactgcctgctgctgcgctgatcaacaactccctgaccaaatccgggcagcttgggactgcattgtttggtgccatttcaaaatacagaaacatttcaagattcatttctcccatctctcaaacatctacgaagaacataggtccatgctgtagcttcagctcgtcttctgatggtaatggatacatggctggaaactctagcgagagtgatgaagactatgttaattctactgtgctagaagcagttgaggtgagaagtggatcagaaggatatgtgataaagatgcgagatggaaagaacttgcgttgtgtccatagtaattttcaagggagaaatattccagagaatacaccacaacctgctattgttttgaggattgaagatggaagcggaactttactcccgatcattgttttggagatgccaagcgttcttctgatggcagctattcgtaatgtccacattgcacgaccgaccatatatcaagttgtcaaggaaatgattgataaaatgggttatgaggtaaaacttgttagggtaaacaaaagaattcaagaagcctactgtgctgaactttatttaacaaaggtcaatgatcctacagacaacatcaccttcgatcttcggccttcagatgccataaacattgctgttcgttgcaaggttcctgtacaagtccatagaagtcttgcatacagtgatgggattagaccagtcgagccagcaagaatggcagtaacagctggcctatcagatgggttgttatttacagagcttgacagacctgatggacagccatgtgtggaggctcaagagtttggactggtgaggaacatgctcattgcagctatcgaagagagatacaaggatgctgcatcatggaaggacaaactgattcggctcaggtctaagcgggagaactgggcctgagagcgtcgcatgtctggatggtgtaaataaagatgacgctcagctgaattccagtatgcactccagacaattgatactgtttatggctctatgtaactagctgtacatattgtaactagctgtacatattgtacgtactatgctcaggtctcagctaaattcagactaagatttgaagtgaaaaactaatccttttgtaatcttggccgtattaatttgtatgttagtctgttaggttgaatgtttggcatgaatttttagctcatcgacctgcggtgagatatgcagaatttcggttgtacacggaactaagcagcgctaatattttcacaggctgctgttaagaagagagattgctgctttgttt

SEQ ID NO: 203180 - DNA, 1162 bp, Zea Mays
cacggaacaacccctttctttttcttaattcctcatccactcgccgcacgacgaagagagcggctcccattccccaccacctactcggaccggagcagcagattctcgaagcgaccggtgaaacattctcgcgccaattgtgggggccatgggcgccaacggacacccgccggcgagcaccgtcgcgcagaacggatcccactctggcggaggcggaggagggggagggggagtgaaccctagcaacggcggcacgggggcggctcttcggcacgaccctggtctggcgcgggagtggtcgacggaggagcagaccatcctcgacgagctgctggtcaagtatgcatccgatttacccgttgttcgttatgcaaaagttgcaatgaagttgccagagaaaacagttcgggatgtagccttgcgctgcagatggatgaataaaaaggagagcgccaaaagaaagaaagaggatcacaactcgtctaagaaaagcaaggacaaaaaggagaaggtttcagattcttcgtcgaaaccacctgtgcatatggtgggtaggcctaatgttcctccataccctcttccagttcttccaatggacgatgatgaaatctcatccaaagccattggaggtccaacgggtgaaatacttgaaactaatgcccatgttttgggtcaaatttcgtcaaaccttagcaacatgcaggacaatatctctctgctctgccaaactcgcgataatatactcagggtcttgaaagagataaacgatgctccagatatcatgaagcagatgcccccgctacctgtgaagataaacgaggagctcgtcaactcgttgctccctagaccaactgtacctatgcagtagtgatagcaaaatgagcttttaagataggcagctgaaataaaaaaaaaaaggggcagccctggtacttttttgttcgttttgtagctccatcctctcgccttctgtattgtatgtttcgtctggatgcttatgtttgttccaaccttttgcaagtcaggcggttggaacgtgtaccaagttaccaagggctgcttccacataagtatcaggtcctgactctgttttgtaatctatagctgtttggtaatgccatggaatcggagtacactttagggtctgtttggttgggcggtg

SEQ ID NO: 203181 - DNA, 1589 bp, Zea Mays
cgtttctttacccagcgaaggcactgcatctcccatcttcgtcttccacgcagcgccggcgctccatcttccgcaggcgacggcggcggtgctcaggcgcgggctcttagccgcggcggcggtgctcaggctcgggctcgtagaggcggcgtcagcgtcttcccctcccgcctctcatcagtcacctcgcgccttcgcctccggtcctccgcacaccggccggtgttctgcgtgcgtgcttctctctctcctcccgcctccggtggatcgtcaacggcgcccgacccctcaggctgcgccgcgcgcggcctgagggcagcgggagccagcagccgctgctccaacaaaggggttgcgccgctttgggagcgcttatgccccaaagcgaagcgttacacgtcctcttagcgcttcagcttgctgaagcgtgcgcttagtgccgctttttggaacctggcagtaactatgtggacgaacattttcaaaataggggagctccaaacagtttcttggtttcagtttcttcctatcgaacccgatgcaagtgcagcgtctgagaaaagttcaaaggtcgagcagaaagatgctcttaatagcattgtgctttcggcttatcttcacttacaaagtgaaggttttctaagtacttggactaattcctttgttggtccatgggatccatctcaaggagagcataaccctgatgagaagatcaagctctggctgtttcttcctggctgccactcatcggtatctgaaatcgcccaacctgctgtaaacaagctgagagttgcttcaaatggtttatgggtagccccaggcaactcggaagaggtagcagctgcactatcacaggctttaagaaattctttagaaagatcactgaaagggctttcatatgcaaggtttggtgatgtttttacaaaatacaacccccctacaagaaatcaaaacagctttaggagagcacagcctacagtcgagtttgtctttgctgccaccgaggaagcaatatttgttcacgttgtaatatctgctaggtatgttcggaacctttgtagtgatgacatagagaaagttctcgctcattctcctccctccatcggtgaaggtcttccagcaaatcattgacgcctaatttaccaggttttagtcaacctactgtatgccagctgagaggccaaagttactatgttgaagttgcgcttggctttccagctgcttcagccaaaaaagtttctgagtttgagcatattcatataaaaaaagaattggatccagtgaaggatgctatggtcggttctgatggacagcgtaaggtagaatcacctgatggccttccaattcttgagaggacatttatttacccacctgaagctgttttggtacctatggtccatcaagcatttgttcgcttttcgagcaaacgaatgtgtttacagggctcgctgggaagttcatcatgggaggcatggccattctggaattttgctccgtcttcttactttcagaacaggtcagtctcaaattatttgtttctttggcatgctgtatcaacaatactaccaagaattgattattcgttgtaa

SEQ ID NO: 203182 - DNA, 3239 bp, Zea Mays
aagagagttgcactctctgctctagcttcgccgctgatttgtgtgatgcatccaaactatagtttcctttggagcgaagcaaaccgacgtctcccgcagggccaagttgtctgcgatagcaaacagcgaaacccgtcgtcagcgcaaaccgcgacgttaaccaacccctaagtatccctgtcagccgtacacgtgtcccaatcgaacggctgggctccctcgtcagcgtagcaggtgccgcccgtcccgtcgaccgacctgacggacgtcgccgcaagcgcccggctgggcttcacctctccaccccatcgctcaccactccccccttcgtctccaaccagatcgccccccgccgcataaatcccccgctgacacccgatcgagcaaaccctcgcttacctcccgtcacgtcgcgtccgaacggcgacgctgcgccgtgatggacgccttcttcggcaagggcggcggcggcggcggcttccgcggcgccaagtgcaagacgctgctgaagctgtcgatcccgcggataaagctgctgcggaaccggcgggagctgcagctgcgccagatgcgccgggacatcgccaagcttctcgaggccggccaggaggccaccgcgcggatcagggtggagcacatcatccgggaggagaacatgatggccgcgcaggagatcctcgagctcttctgcgagctcatcgctgtgcgcctgcccatcatcgagacccaaaggttcgcccctctggccctctatctgacttcaattttacagcctgtaattgcgatcactgtttgcttgttcatgaggccacggcccacgggtgtgctttgttgcccctggatatggcaaactgtgctggaccaccagctcccttgaggccttgagatttccagtaactggtttttatagcgaacataaccttgcttgactgctatagtggactatggctgtgtttgttccattccaatgtgttcttagcagagacttggaccctaaagataaccattactttaagggtgtttcgttccagcgactaaagttcagtatatgtcatatcgaatgttaaatatgagtattaaatatagtctaattataaaaataactatatagatgaagactaaataataagacacaaattttaatcctaattaatctatgattagcaaatgtttactgtagcatcacattagcgaatcattgactaattaggtttaatagatttgtcttgtcgttaagtttttatctatataattagttttttgattaaattatatttaatacttataactagcatctaaacattcgatgtgataggtgctaaaatttagcatagggaaacgaacgggcccaatatgtccatttggcaacagggacaagttatcttcgttcttataccctctgcattcttacattccttatttgtttgaagacataaccattgtaatcccaactccaaggatgttactgatgatattttctttgctgctgccttttttatagggcgtattatcttgaagtataaagcagggatcctgaatcctgctcgtgaatacaaatgggctatagttgataaaattgattaactgttttgtgactaaaaattctgcaagagatgcagataagtctgactgaattgtgtttccttgttttgttggcttcagggagtgtcctattgatctcaaagaagcaatatcaagtatctgtttcgctgctccaagatgtgcagatctacctgaactgatacaagttcaaatgatgtttgcaactaaatatgggaaggaatttgtcgctgcagcttcagagttgatgcctgattgcggggtcaatcgtcagataattgaactactttctattcgtcctcctcctgtccatgcaaagttgaaactgctgaaggagatagctgaggaacatgaagttgactgggatccatcagagacagagatagaatttctcaaacctcatgaagatctattgaatggcccgacctacttcaacggctccacactacctcttcccaaggagaaacacgaggaaacagtagcggcaagtgctgccgagcggcctgacaaagactgcgagtcagataccggtcttgactcactggattttcctgaagtcccaaaagcagcaatacgtccaccttctaacacaccattgaccccagatattggtccccatgctccgggctctcagccgcttcctcgtgagttctcagaccgtactaacttggaggagaatccaacagctggcggcgcttttaatgttattcagatgaaaagcctggaacatcttatctctgcaccatctgctcagccaaacacaccagatttgccagatgaaaagaagcaatttattccttttgcatctccaccgccagttgttgctactccattggaaaaaactgagacagttccctcaccttcaatgtctcctccagtgaagccaacagagccaaaaatctccacaaagcgggttgatgaattggccacacctccagtacctcccactgattatacgttcacaaaacaaccagaacaagtacggccaatctcttccgagagtgaggcaagtatcgacttggacgatgtactatctgctgctcagacagctgctgaatcagcggagcgagctgcgtccgcagcccgcgccgctgcgaaccttgtgcagctacgcattgcagacctaaagaagaattcaagggtctataacaagtacaccgacagtgctcaaaaggaaagccctcatcaggccgagggtacacagaaaccagtatttgatcaccaggactccttcaccaacgagacacaggactatgtgccgtctcatgtgccgcagaggtcgccgtctctggaggacgatccgtatttctcctaccccaacttgttctcggcgccaaaaccttgaaggcggaaactagtggcctgtaactgctagtagtagtcctattatgtcttggtcttcgctgttgcctcggaatttctgtgtgttgctgagtttggtacataacggtacaaaaggagactactgggttattacttggctacgaaacctgtctagtttgagtctctgtaaactgtacatgtacggtgtctgtatcagttttctgaaacatttctgcagttctacacgtaagtaatgccagatcatctagtttggttgggctgggcccaaaacaacatcttgtaatttggaatggacttggaataaaggaagtacctggagatcaacacaacaaaga

SEQ ID NO: 203183 - DNA, 1441 bp, Zea Mays
atggggaagctctcctccgtgggcagcaacttcatggcgtccgctggcagccgcagcaccagcgacggccaccaagaacttccgtccggacagcgtcctcggcgaaggagggttcgggagagtctacaaagggtgggtggatgagaagaccatggcgccgaccaggaacggcaccgacatggttgttgcggtcaagaagctcaactcagagagcatgcaggggtttgaggaatggcagatgcagtatatgatcgtcgacggcgtttctagctcctggtacatcaagtttgatacatttactcctgcagctgagcgggggctcccggtcacaagggtcattagtcgcatgacgctgcaacagatccttgctcgagcagttgggtatgacgctatattgaatggaagccatgtagtcaattttacagatgatggcagtaaggttactgccatattggaggacgatagaatatttgaactgccatattggaggacggtagaatatttgaaggtgaccttttggttggtgccgatggaatatggtcaaaggtgaggaagacactattcgggcactcagatgccacctattcaggttacacctgctacactggaattgcagattttgtgccgcctgatatcgatacggttggtgagagtgcaaatgagtacacagatgatgaggatgcaagctggaaagtccgtagggcatcatcaaagtgcctatctgcaattatagtgtctcgtcctgaaatgttggtgaagatgtttctagaggcttgtccaaagttaattgaacgatttcgggaaagagaagagaatgtaaagccctcgctggttgctgaagcaagaggtccaaaagttgtcaagtctatcaacaggcagttacgtgaaaaatcaatcaagacaaaggttgggacattttcagtactgaaggagcttgtggttgtattaccagactgtcttgctgatcattttggatcacttgttcctgggattgagaaggctttgaatgacaagtcttctacctccaacctgaagattgaagcacttgtattaacaaggcttgttatggcttcacattcgccatctgtgtttcatccatacatcaagtggatgaatatgcctgatcttctggaagttatagatttcaaggacacttttcttgatgccaaccatgttcagcaaagttttccagactaccaggagatgtacgaggatgcaagacaagtggcgactgatgctgtcggcagtatcggaactgtggcgtcgttctgtgtagagaaaagagtggtcgcagcgtacagggacaagtgtgaggctctaaggaaacagggcatccgaatgagaattttttctgcgtactggaattctggttctgatttcagcgtacaggcatgcatcagcagagcccacagacctgcattgacatgacaagagtccctcg

SEQ ID NO: 203184 - DNA, 2780 bp, Zea Mays
gcgtgtggtcgcgcgtgatgcggaccagttccaggttccagcgagagtgcgcggatgtcggcggcgcggccttggcctagtgcgcaaacaaggaggggggagggccgcgggcaggcggccttgacttgcggcgcgggcaccgccatcgctgtctgaggccgcgcgggctcgctcgctcgctcgcaaactagggtcggtggaccgtgcttgcgcacgttttctcccctcctcctcgcccaccgctgccaccaatcacgccgctgccggctcagccgttggagccgcctcgatccggactcacccgcgttggacctctccgttcccctctactaggaattggagatcggtccagatacctctcacaattttgcctctatctatttgacttttcaaagagagattaatactatacccctactggctaaagggttacagagtattcctatggacatgatatcatcctgtcccatctgcaatatacaagttcttacggttgagctggaatggcatgccaatagccactttgatgacgatcaactccaaagggacatcgaattagcacatcagatagcagttgctgaatcaagtacagataccatgaatgacccaaaacattatagtggatcattcactagtgactctaatactataggggcctcatcgagtcatagtggatactcacaccattacagtgagctattggatgaacaaatctcttgtatggtcagagcacaaattcgaagcaaagttcaagaagtggaaggcggtattatgagcttgttgaggagctgcttggagtcagaagctggttcctcaaaaagtatgatatcaggctatattgaccatcatcagagtctttcatcagaagataagggatggggctgtggatggagaaatattcagatgctgagctctcatctattgaagcaaagacaagaagctagagaagtattatttggtggttctggatttgttcctgacatcccttcactccagaggtggcttgagattgcttgggataaaaaatttgatacgattggctccagccactttcacaacaaagtttatggtgccaagaagtggatagggactacagaatgtgctaccctcttccgctcttttggcctccgtgcaaagattgtagattttgatagcacagaatcatccgacctccaaagtaagaacagtagccatgcagcaagtcaagtacgaggacttatggataagttcttaataaagagtaattcccctaaatcatcgtctgaattttgtcaagaggatgctgaaagtatgagaggccaacacgcccttgttgactgggtttggaactattttgcatgtgagcgctctgatagattaaccacacagcgtgccactgtcagcaataaaacaccactctattttcaacatcaaggtcattcaaggacaattgttgggattcaaaaggaaatggttcaccgtggatctcaagaacaatacacccttttgattttagatcctggtcatgtaagttacagttaccactcattttattggtctgaactatttcccctttattgtcacttagctgtgatttagtttcacattctatttgaagctcagctcatggtgtaagttggtttgtttcactagtgactctaatactgtttggtattttcgttctttacactttttgctgaacaatcactttgaatatcaccaacataaactgaacatctggtgtctacctcggcatgcatgtatgtttaaccctgtagaaaatcttgaggcccacttgcttctcatgtgaatggactcttgccttgtggtattgattgagaaacagcaacttagatttcaaaagcacctgcccacattcggtgtaacaagtcgttgttttgatgtgttgcggtgtattgtgcattatattttctttgcccgattcctttttaagtatgcatagtctattttgaaacttctagaatagactatgaattgttgtttctccatcagtatgctattcaaatgttttcccgtaatatgccacagagaactgcagatctagaaaggtccctaagaagcaaaaatggatggcagcgtctggtgaagagaggtgtccacacgctcaggaagccacagtatcagttatgttatgtggatcctggaattgctagttcagaagagatggagcaactgaagactattgatagtatgcttgtcaggttttaggttcctgggcactcccctggttgaagaaacaagaacatctaatccattgccgaacggtgcgctgtacgaatgacacagcaaggatgggcctgcagaaaactggatctactgttgtttggaggaccttagaagggtcctgactgctttcgtaactggacctgcccgttgggcttgttcggttatctgaacgactgaacctgtggtgtaggtaaacgaagcagagcttgatgtacagtacagtcgcttgtgttgaagtggagagaataaaagtgtttgtacatataataacatcctgcagttgttaatcttttgttacacatctgatgccgcccgcgcactcagctcagttgactggaatattgactcaaggatcgtattctgcacaagttggaatctggccatatgtttgttgtttgttgggtgtcgagccatcccttctttcgattaaatatagtcgcacgtatgagtacaaaatttgttgatcctatgtgtatttgcagtacggcctgttttaaggggcatttggcagagctcttatagctccgcttcaaacgagaatcactctagcagag

SEQ ID NO: 203185 - DNA, 2300 bp, Zea Mays
gcgtgtggtcgcgcgtgatgcggaccagttccaggttccagcgagagtgcgcggatgtcggcggcgcggccttggcctagtgcgcaaacaaggaggggggagggccgcgggcaggcggccttgacttgcggcgcgggcaccgccatcgctgtctgaggccgcgcgggctcgctcgctcgctcgcaaactagggtcggtggaccgtgcttgcgcacgttttctcccctcctcctcgcccaccgctgccaccaatcacgccgctgccggctcagccgttggagccgcctcgatccggactcacccgcgttggacctctccgttcccctctactaggaattggagatcggtccagatacctctcacaattttgcctctatctatttgacttttcaaagagagattaatactatacccctactggctaaagggttacagagtattcctatggacatgatatcatcctgtcccatctgcaatatacaagttcttacggttgagctggaatggcatgccaatagccactttgatgacgatcaactccaaagggacatcgaattagcacatcagatagcagttgctgaatcaagtacagataccatgaatgacccaaaacattatagtggatcattcactagtgactctaatactataggggcctcatcgagtcatagtggatactcacaccattacagtgagctattggatgaacaaatctcttgtatggtcagagcacaaattcgaagcaaagttcaagaagtggaaggcggtattatgagcttgttgaggagctgcttggagtcagaagctggttcctcaaaaagtatgatatcaggctatattgaccatcatcagagtctttcatcagaagataagggatggggctgtggatggagaaatattcagatgctgagctctcatctattgaagcaaagacaagaagctagagaagtattatttggtggttctggatttgttcctgacatcccttcactccagaggtggcttgagattgcttgggataaaaaatttgatacgattggctccagccactttcacaacaaagtttatggtgccaagaagtggatagggactacagaatgtgctaccctcttccgctcttttggcctccgtgcaaagattgtagattttgatagcacagaatcatccgacctccaaagtaagaacagtagccatgcagcaagtcaagtacgaggacttatggataagttcttaataaagagtaattcccctaaatcatcgtctgaattttgtcaagaggatgctgaaagtatgagaggccaacacgcccttgttgactgggtttggaactattttgcatgtgagcgctctgatagattaaccacacagcgtgccactgtcagcaataaaacaccactctattttcaacatcaaggtcattcaaggacaattgttgggattcaaaaggaaatggttcaccgtggatctcaagaacaatacacccttttgattttagatcctggtcatagaactgcagatctagaaaggtccctaagaagcaaaaatggatggcagcgtctggtgaagagaggtgtccacacgctcaggaagccacagtatcagttcagaagagatggagcaactgaagactattgatagtatgcttgtcaggttttaggttcctgaaaacaggatgaggattatatgtgttttgcacacagggcactcccctggttgaagaaacaagaacatctaatccattgccgaacggtgcgctgtacgaatgacacagcaaggatgggcctgcagaaagatctttgacgctgcctaactgaatctgcttgcagactggatctactgttgtttggaggaccttagaagggtcctgactgctttcgtaactggacctgcccgttgggcttgttcggttatctgaacgactgaacctgtggtgtaggtaaacgaagcagagcttgatgtacagtacagtcgcttgtgttgaagtggagagaataaaagtgtttgtacatataataacatcctgcagttgttaatcttttgttacacatctgatgccgcccgcgcactcagctcagttgactggaatattgactcaaggatcgtattctgcacaagttggaatctggccatatgtttgttgtttgttgggtgtcgagccatcccttctttcgattaaatatagtcgcacgtatgagtacaaaatttgttgatcctatgtgtatttgcagtacggcctgttttaaggggcatttggcagagctcttatagctccgcttcaaacgagaatcactctagcagag

SEQ ID NO: 203186 - DNA, 2295 bp, Zea Mays
gcgtgtggtcgcgcgtgatgcggaccagttccaggttccagcgagagtgcgcggatgtcggcggcgcggccttggcctagtgcgcaaacaaggaggggggagggccgcgggcaggcggccttgacttgcggcgcgggcaccgccatcgctgtctgaggccgcgcgggctcgctcgctcgctcgcaaactagggtcggtggaccgtgcttgcgcacgttttctcccctcctcctcgcccaccgctgccaccaatcacgccgctgccggctcagccgttggagccgcctcgatccggactcacccgcgttggacctctccgttcccctctactaggaattggagatcggtccagatacctctcacaattttgcctctatctatttgacttttcaaagagagattaatactatacccctactggctaaagggttacagagtattcctatggacatgatatcatcctgtcccatctgcaatatacaagttcttacggttgagctggaatggcatgccaatagccactttgatgacgatcaactccaaagggacatcgaattagcacatcagatagcagttgctgaatcaagtacagataccatgaatgacccaaaacattatagtggatcattcactagtgactctaatactataggggcctcatcgagtcatagtggatactcacaccattacagtgagctattggatgaacaaatctcttgtatggtcagagcacaaattcgaagcaaagttcaagaagtggaaggcggtattatgagcttgttgaggagctgcttggagtcagaagctggttcctcaaaaagtatgatatcaggctatattgaccatcatcagagtctttcatcagaagataagggatggggctgtggatggagaaatattcagatgctgagctctcatctattgaagcaaagacaagaagctagagaagtattatttggtggttctggatttgttcctgacatcccttcactccagaggtggcttgagattgcttgggataaaaaatttgatacgattggctccagccactttcacaacaaagtttatggtgccaagaagtggatagggactacagaatgtgctaccctcttccgctcttttggcctccgtgcaaagattgtagattttgatagcacagaatcatccgacctccaaagtaagaacagtagccatgcagcaagtcaagtacgaggacttatggataagttcttaataaagagtaattcccctaaatcatcgtctgaattttgtcaagaggatgctgaaagtatgagaggccaacacgcccttgttgactgggtttggaactattttgcatgtgagcgctctgatagattaaccacacagcgtgccactgtcagcaataaaacaccactctattttcaacatcaaggtcattcaaggacaattgttgggattcaaaaggaaatggttcaccgtggatctcaagaacaatacacccttttgattttagatcctggtcatagaactgcagatctagaaaggtccctaagaagcaaaaatggatggcagcgtctggtgaagagaggtgtccacacgctcaggaagccacagtatcagaagagatggagcaactgaagactattgatagtatgcttgtcaggttttaggttcctgaaaacaggatgaggattatatgtgttttgcacacagggcactcccctggttgaagaaacaagaacatctaatccattgccgaacggtgcgctgtacgaatgacacagcaaggatgggcctgcagaaagatctttgacgctgcctaactgaatctgcttgcagactggatctactgttgtttggaggaccttagaagggtcctgactgctttcgtaactggacctgcccgttgggcttgttcggttatctgaacgactgaacctgtggtgtaggtaaacgaagcagagcttgatgtacagtacagtcgcttgtgttgaagtggagagaataaaagtgtttgtacatataataacatcctgcagttgttaatcttttgttacacatctgatgccgcccgcgcactcagctcagttgactggaatattgactcaaggatcgtattctgcacaagttggaatctggccatatgtttgttgtttgttgggtgtcgagccatcccttctttcgattaaatatagtcgcacgtatgagtacaaaatttgttgatcctatgtgtatttgcagtacggcctgttttaaggggcatttggcagagctcttatagctccgcttcaaacgagaatcactctagcagag

SEQ ID NO: 203187 - DNA, 2090 bp, Zea Mays
gtatgcgtctctttttcttagtcaatcgacctatctatccgcgcgctacagagtcttctgcttttccaacttcatgcctgctgcttgcgatggacgaaaacgtaatcgttgttcatcatttaacggattttgctatgctacttcatcatgcttcaaacggagacctactaggagatcggtccagatacctctcacaattttgcctctatctatttgacttttcaaagagagattaatactatacccctactggctaaagggttacagagtattcctatggacatgatatcatcctgtcccatctgcaatatacaagttcttacggttgagctggaatggcatgccaatagccactttgatgacgatcaactccaaagggacatcgaattagcacatcagatagcagttgctgaatcaagtacagataccatgaatgacccaaaacattatagtggatcattcactagtgactctaatactataggggcctcatcgagtcatagtggatactcacaccattacagtgagctattggatgaacaaatctcttgtatggtcagagcacaaattcgaagcaaagttcaagaagtggaaggcggtattatgagcttgttgaggagctgcttggagtcagaagctggttcctcaaaaagtatgatatcaggctatattgaccatcatcagagtctttcatcagaagataagggatggggctgtggatggagaaatattcagatgctgagctctcatctattgaagcaaagacaagaagctagagaagtattatttggtggttctggatttgttcctgacatcccttcactccagaggtggcttgagattgcttgggataaaaaatttgatacgattggctccagccactttcacaacaaagtttatggtgccaagaagtggatagggactacagaatgtgctaccctcttccgctcttttggcctccgtgcaaagattgtagattttgatagcacagaatcatccgacctccaaagtaagaacagtagccatgcagcaagtcaagtacgaggacttatggataagttcttaataaagagtaattcccctaaatcatcgtctgaattttgtcaagaggatgctgaaagtatgagaggccaacacgcccttgttgactgggtttggaactattttgcatgtgagcgctctgatagattaaccacacagcgtgccactgtcagcaataaaacaccactctattttcaacatcaaggtcattcaaggacaattgttgggattcaaaaggaaatggttcaccgtggatctcaagaacaatacacccttttgattttagatcctggtcatagaactgcagatctagaaaggtccctaagaagcaaaaatggatggcagcgtctggtgaagagaggtgtccacacgctcaggaagccacagtatcagttatgttatgtggatcctggaattgctagttcagaagagatggagcaactgaagactattgatagtatgcttgtcaggttttaggttcctgggcactcccctggttgaagaaacaagaacatctaatccattgccgaacggtgcgctgtacgaatgacacagcaaggatgggcctgcagaaaactggatctactgttgtttggaggaccttagaagggtcctgactgctttcgtaactggacctgcccgttgggcttgttcggttatctgaacgactgaacctgtggtgtaggtaaacgaagcagagcttgatgtacagtacagtcgcttgtgttgaagtggagagaataaaagtgtttgtacatataataacatcctgcagttgttaatcttttgttacacatctgatgccgcccgcgcactcagctcagttgactggaatattgactcaaggatcgtattctgcacaagttggaatctggccatatgtttgttgtttgttgggtgtcgagccatcccttctttcgattaaatatagtcgcacgtatgagtacaaaatttgttgatcctatgtgtatttgcagtacggcctgttttaaggggcatttggcagagctcttatagctccgcttcaaacgagaatcactctagcagag

SEQ ID NO: 203188 - DNA, 2126 bp, Zea Mays
gtatgcgtctctttttcttagtcaatcgacctatctatccgcgcgctacagagtcttctgcttttccaacttcatgcctgctgcttgcgatggacgaaaacgtaatcgttgttcatcatttaacggattttgctatgctacttcatcatgcttcaaacggagacctactaggagatcggtccagatacctctcacaattttgcctctatctatttgacttttcaaagagagattaatactatacccctactggctaaagggttacagagtattcctatggacatgatatcatcctgtcccatctgcaatatacaagttcttacggttgagctggaatggcatgccaatagccactttgatgacgatcaactccaaagggacatcgaattagcacatcagatagcagttgctgaatcaagtacagataccatgaatgacccaaaacattatagtggatcattcactagtgactctaatactataggggcctcatcgagtcatagtggatactcacaccattacagtgagctattggatgaacaaatctcttgtatggtcagagcacaaattcgaagcaaagttcaagaagtggaaggcggtattatgagcttgttgaggagctgcttggagtcagaagctggttcctcaaaaagtatgatatcaggctatattgaccatcatcagagtctttcatcagaagataagggatggggctgtggatggagaaatattcagatgctgagctctcatctattgaagcaaagacaagaagctagagaagtattatttggtggttctggatttgttcctgacatcccttcactccagaggtggcttgagattgcttgggataaaaaatttgatacgattggctccagccactttcacaacaaagtttatggtgccaagaagtggatagggactacagaatgtgctaccctcttccgctcttttggcctccgtgcaaagattgtagattttgatagcacagaatcatccgacctccaaagtaagaacagtagccatgcagcaagtcaagtacgaggacttatggataagttcttaataaagagtaattcccctaaatcatcgtctgaattttgtcaagaggatgctgaaagtatgagaggccaacacgcccttgttgactgggtttggaactattttgcatgtgagcgctctgatagattaaccacacagcgtgccactgtcagcaataaaacaccactctattttcaacatcaaggtcattcaaggacaattgttgggattcaaaaggaaatggttcaccgtggatctcaagaacaatacacccttttgattttagatcctggtcatagaactgcagatctagaaaggtccctaagaagcaaaaatggatggcagcgtctggtgaagagaggtgtccacacgctcaggaagccacagtatcagttatgttatgtggatcctggaattgctagttcagaagagatggagcaactgaagactattgatagtatgcttgtcaggttttaggttcctgaaaacaggatgaggattatatgtgttttgcacacagggcactcccctggttgaagaaacaagaacatctaatccattgccgaacggtgcgctgtacgaatgacacagcaaggatgggcctgcagaaaactggatctactgttgtttggaggaccttagaagggtcctgactgctttcgtaactggacctgcccgttgggcttgttcggttatctgaacgactgaacctgtggtgtaggtaaacgaagcagagcttgatgtacagtacagtcgcttgtgttgaagtggagagaataaaagtgtttgtacatataataacatcctgcagttgttaatcttttgttacacatctgatgccgcccgcgcactcagctcagttgactggaatattgactcaaggatcgtattctgcacaagttggaatctggccatatgtttgttgtttgttgggtgtcgagccatcccttctttcgattaaatatagtcgcacgtatgagtacaaaatttgttgatcctatgtgtatttgcagtacggcctgttttaaggggcatttggcagagctcttatagctccgcttcaaacgagaatcactctagcagag

SEQ ID NO: 203189 - DNA, 586 bp, Zea Mays
agtattggaggtggtcctagcaaaggaagatgaggtattttcagcattggaaaagctacagtgacgaagatggacaaaaactccaaaaataaggataagcagttgaagtctcatcctccaaagaacgttgaatcggaaatcttgcgtgagcatatcaagaaagagagggaggcagcaaaggctggaaaaagaccatattatctgaagaaatttggtgatcagcgagatcgactcgtcagccgctacctcgctgcaggtcgtgaagctgctcgctctgtacctcactggagacaaggaaggtgctatctccagtctcaaggaatggttgagtgattcagcaattggaagcaatcctgttctgcgattgattgccggaattatatttatgcatgagcaggactacaatgaggctctcaagcacacacactctggaggaactctggatttggaagcgataattgatcctgcagcaatttttgaacagttagaaaagagaaaattgatcccccaaccattagcagcaaaaaggtttctggaacagaaaattacagtattgatgctaagcatgctaaatagagaattctga

SEQ ID NO: 203190 - DNA, 2469 bp, Zea Mays
aggggggcgcccccgcggtgttccagtccgcgcactgcccgcgctggaccctccccccgcacgacggccaggggggtggcgggggaaagagcatccctatggggtgccacgtggcggcggatcgcggccgccgccggtcccaggaggaccgtgccgtctgtgccctcggcatccgcatccccttcgtagagaacatgagaattaaggaggttgatgtgggagtggtggcaatatttgacggtcataatggagctgaggctagtgagatggcttctaagctttttctggattacttcttgctccatgtttattttcttctcgatggcatacactctctgcggttcagaaaatctactgggaaactgacatatagggaagttactatttttaacaatgtatttaatctgtacaagcatggccaatccgaccatgcagagaggtcatgttgggcatcaccagccattctagaccggtcatttcatacggaaattctgaaggaatcactaatgagggcagttcatgatattgatttaacattctccaaggaggcattacagaacaattttgaatctggttcaacagcgaccgtggtcttgatagctgatggacaaattatatctgccaatgttggagattcaaaagcttttctgtgctccgaaggatataatctgcaccatcgaaataggaaacgaaggagaaagagaaactcaattaatcacgaggaatttgctttggcaaattatgatggaccgttgtatcatgcaagggagttgacaaaggaccatcatcctaatagagaagacgagagaaaccgtgtggaggctgctggtggttatgttcttgagtgggctggtgtatatcgtgttaatggcgagctagcactatcaagagctattggtgatgttccttacaaaagatacggtgtaatatcaacacctgaattgacaggctggcagattctgtcagaaaatgacagttttcttattgcgtcatctgatgggatctttgagaaaatgactatgcaagatgtttgtgacctaatgctgcatgcaaaaattcgtgttaaacatgattttggatcctctgccataacacaacgtaatttggcagattacgtagttcatgttgctttacagaaaggcacaacagacaatgtggctgctgtggttgttccattgggatcacctggtagcactggtactacattaaaagattcgtcccagttcgaagaagatctcaagatatctatttctccaatgttgaatgttccatatggattgaagcctgatcatggacatagttcagctgtcattgacatggagtatttcaagcgctcatcaataaagttccagaggttcttggttgaagcaaaacctaagaaacttggttgtttctatttatccgagagtctggatgaagatatggactatatatttagggtgccggaagcataccagcgtgaagaagtccatgacttcaaccacataccagctgagactgccttatattctgatggtaatctggaaaaatacaaggacaaacacttttgcttgtaccttggtcccgaagatggcgaaatgggacagtgcaatggtcctgaagcttttgcaaacttttttggtctacttgactcccttccgcataatggaagcaaaccaaatggttcacactcctttggcaacacgatcgatttcaggtacaagctcaagagaaggtttgatcgtgggtcgtacggtgaagtctggttggcatttcattggaattgttctgaagatacagatgttcataaagagcctccacactttacaaatatatctcaatcagagatgtataattgcacaagttcaggcagaatgtcatctgatgaagatcatggttcaggcacagtaaatggtgatttattcatactgaagcgcataatggtggagaggggaaatgcagcttacttgagtggattgcgggagaaatactttggggaattattttcaaatgcttccaggactcttgaaggtttgtcgaggatagaatcatcgactatctcagtggacatgctatatgatcctgatatccatctagaaaagaacttgtcagctactgaagaaccacttaagcatgtggctaggtttatagaatcttttgaatcagaatcaagggaaatttggctggtgtatcacaatgaaggccactcattatcaaaattgatatatacagctgaagaaacgaagttagtcactggcaacaataatgagagggtcagacatatccaagttttgcacccatcgaagtggtggcattggctaaggacaacaaaagctgggctaaagcagatgcaaaacctcttatggcagctggcgtctgattgacttcggcagtgccattgatgattacacgttgaagaatctttatggtccaggacctactcgatctgaacagacatttgagtacactcctccagaggcactccttaat

SEQ ID NO: 203191 - DNA, 2944 bp, Zea Mays
gttccagtccgcgcactgcccgcgctggaccctccccccgcacgacggccaggggggtggcgggggaaagagcatccctatggggtgccacgtggcggcggatcgcggccgccgccggtcccaggaggaccgtgccgtctgtgccctcggcatccgcatccccttcgggttgataagatggaaagcaccgaagtccaaactggacgctgattccagatagtaacaccaggaacattctggaggtttactgttcaaagatacacaccataagctgggtgtcaatcgtaacactgtgaatttgctggagagaacatgagaattaaggaggttgatgtgggagtggtggcaatatttgacggtcataatggagctgaggctagtgagatggcttctaagctttttctggattacttcttgctccatgtttattttcttctcgatggcatacactctctgcggttcagaaaatctactgggaaactgacatatagggaagttactatttttaacaatgtatttaatctgtacaagcatggccaatccgaccatgcagagaggtcatgttgggcatcaccagccattctagaccggtcatttcatacggaaattctgaaggaatcactaatgagggcagttcatgatattgatttaacattctccaaggaggcattacagaacaattttgaatctggttcaacagcgaccgtggtcttgatagctgatggacaaattatatctgccaatgttggagattcaaaagcttttctgtgctccgaaggatataatctgcaccatcgaaataggaaacgaaggagaaagagaaactcaattaatcacgaggaatttgctttggcaaattatgatggaccgttgtatcatgcaagggagttgacaaaggaccatcatcctaatagagaagacgagagaaaccgtgtggaggctgctggtggttatgttcttgagtgggctggtgtatatcgtgttaatggcgagctagcactatcaagagctattggtgatgttccttacaaaagatacggtgtaatatcaacacctgaattgacaggctggcagattctgtcagaaaatgacagttttcttattgcgtcatctgatgggatctttgagaaaatgactatgcaagatgtttgtgacctaatgctgcatgcaaaaattcgtgttaaacatgattttggatcctctgccataacacaacgtaatttggcagattacgtagttcatgttgctttacagaaaggcacaacagacaatgtggctgctgtggttgttccattgggatcacctggtagcactggtactacattaaaagattcgtcccagttcgaagaagatctcaagatatctatttctccaatgttgaatgttccatatggattgaagcctgatcatggacatagttcagctgtcattgacatggagtatttcaagcgctcatcaataaagttccagaggttcttggttgaagcaaaacctaagaaacttggttgtttctatttatccgagagtctggatgaagatatggactatatatttagggtgccggaagcataccagcgtgaagaagtccatgacttcaaccacataccagctgagactgccttatattctgatggtaatctggaaaaatacaaggacaaacacttttgcttgtaccttggtcccgaagatggcgaaatgggacagtgcaatggtcctgaagcttttgcaaacttttttggtctacttgactcccttccgcataatggaagcaaaccaaatggttcacactcctttggcaacacgatcgatttcaggtacaagctcaagagaaggtttgatcgtgggtcgtacggtgaagtctggttggcatttcattggaattgttctgaagatacagatgttcataaagagcctccacactttacaaatatatctcaatcagagatgtataattgcacaagttcaggcagaatgtcatctgatgaagatcatggttcaggcacagtaaatggtgatttattcatactgaagcgcataatggtggagaggggaaatgcagcttacttgagtggattgcgggagaaatactttggggaattattttcaaatgcttccaggactcttgaaggtttgtcgaggatagaatcatcgactatctcagtggacatgctatatgatcctgatatccatctagaaaagaacttgtcagctactgaagaaccacttaagcatgtggctaggtttatagaatcttttgaatcagaatcaagggaaatttggctggtgtatcacaatgaaggccactcattatcaaaattgatatatacagctgaagaaacgaagttagtcactggcaacaataatgagagggtcagacatatccaagttttgcacccatcgaagtggtggcattggctaaggacaacaaaagctgggctaaagcagatgcaaaacctcttatggcagctgtagcttttgggcatttccctacatcaggataacctccacaaagttgatgggactgaaggcttgtcatgatcgtaatatcacccaccgggatatcaaacctggtagaaatgatgtcgctgcctattttttccttgttttctatacttcttgaatccttttctgttaacaatttctattaactagtcatgttaacattgcttatttttacgccatggaagagaacatgatcatttgctttgaggacatggagactggaaagtgtctaagagaggttccatctgaagcaaagcaaaataagctgaacatgcgtctgattgacttcggcagtgccattgatgattacacgttgaagaatctttatggtccaggacctactcgatctgaacagacatttgagtacactcctccagaggcactccttaattcaaactggtttcaaggatcaagaagtgcaaggcttaagtatgacatctgg

SEQ ID NO: 203192 - DNA, 2349 bp, Zea Mays
gggttgataagatggaaagcaccgaagtccaaactggacgctgattccagatagtaacaccaggaacattctggaggtttactgttcaaagatacacaccataagctgggtgtcaatcgtaacactgtgaatttgctggagagaacatgagaattaaggaggttgatgtgggagtggtggcaatatttgacggtcataatggagctgaggctagtgagatggcttctaagctttttctggattacttcttgctccatgtttattttcttctcgatggcatacactctctgcggttcagaaaatctactgggaaactgacatatagggaagttactatttttaacaatgtatttaatctgtacaagcatggccaatccgaccatgcagagaggtcatgttgggcatcaccagccattctagaccggtcatttcatacggaaattctgaaggaatcactaatgagggcagttcatgatattgatttaacattctccaaggaggcattacagaacaattttgaatctggttcaacagcgaccgtggtcttgatagctgatggacaaattatatctgccaatgttggagattcaaaagcttttctgtgctccgaaggatataatctgcaccatcgaaataggaaacgaaggagaaagagaaactcaattaatcacgaggaatttgctttggcaaattatgatggaccgttgtatcatgcaagggagttgacaaaggaccatcatcctaatagagaagacgagagaaaccgtgtggaggctgctggtggttatgttcttgagtgggctggtgtatatcgtgttaatggcgagctagcactatcaagagctattggtgatgttccttacaaaagatacggtgtaatatcaacacctgaattgacaggctggcagattctgtcagaaaatgacagttttcttattgcgtcatctgatgggatctttgagaaaatgactatgcaagatgtttgtgacctaatgctgcatgcaaaaattcgtgttaaacatgattttggatcctctgccataacacaacgtaatttggcagattacgtagttcatgttgctttacagaaaggcacaacagacaatgtggctgctgtggttgttccattgggatcacctggtagcactggtactacattaaaagattcgtcccagttcgaagaagatctcaagatatctatttctccaatgttgaatgttccatatggattgaagcctgatcatggacatagttcagctgtcattgacatggagtatttcaagcgctcatcaataaagttccagaggttcttggttgaagcaaaacctaagaaacttggttgtttctatttatccgagagtctggatgaagatatggactatatatttagggtgccggaagcataccagcgtgaagaagtccatgacttcaaccacataccagctgagactgccttatattctgatggtaatctggaaaaatacaaggacaaacacttttgcttgtaccttggtcccgaagatggcgaaatgggacagtgcaatggtcctgaagcttttgcaaacttttttggtctacttgactcccttccgcataatggaagcaaaccaaatggttcacactcctttggcaacacgatcgatttcaggtacaagctcaagagaaggtttgatcgtgggtcgtacggtgaagtctggttggcatttcattggaattgttctgaagatacagatgttcataaagagcctccacactttacaaatatatctcaatcagagatgtataattgcacaagttcaggcagaatgtcatctgatgaagatcatggttcaggcacagtaaatggtgatttattcatactgaagcgcataatggtggagaggggaaatgcagcttacttgagtggattgcgggagaaatactttggggaattattttcaaatgcttccaggactcttgaaggtttgtcgaggatagaatcatcgactatctcagtggacatgctatatgatcctgatatccatctagaaaagaacttgtcagctactgaagaaccacttaagcatgtggctaggtttatagaatcttttgaatcagaatcaagggaaatttggctggtgtatcacaatgaaggccactcattatcaaaattgatatatacagctgaagaaacgaagttagtcactggcaacaataatgagagggtcagacatatccaagttttgcacccatcgaagtggtggcattggctaaggacaacaaaagctgggctaaagcagatgcaaaacctcttatggcagctgatctgaacagacatttgagtacactcctccagaggcactccttaat

SEQ ID NO: 203193 - DNA, 2561 bp, Zea Mays
taagatggaaagcaccgaagtccaaactggacgctgattccagatagtaacaccaggaacattctggaggtttactgttcaaagatacacaccataagctgggtgtcaatcgtaacactgtgaatttgctggagagaacatgagaattaaggaggttgatgtgggagtggtggcaatatttgacggtcataatggagctgaggctagtgagatggcttctaagctttttctggattacttcttgctccatgtttattttcttctcgatggcatacactctctgcggttcagaaaatctactgggaaactgacatatagggaagttactatttttaacaatgtatttaatctgtacaagcatggccaatccgaccatgcagagaggtcatgttgggcatcaccagccattctagaccggtcatttcatacggaaattctgaaggaatcactaatgagggcagttcatgatattgatttaacattctccaaggaggcttttctgtgctccgaaggatataatctgcaccatcgaaataggaaacgaaggagaaagagaaactcaattaatcacgaggaatttgctttggcaaattatgatggaccgttgtatcatgcaagggagttgacaaaggaccatcatcctaatagagaagacgagagaaaccgtgtggaggctgctggtggttatgttcttgagtgggctggtgtatatcgtgttaatggcgagctagcactatcaagagctattggtgatgttccttacaaaagatacggtgtaatatcaacacctgaattgacaggctggcagattctgtcagaaaatgacagttttcttattgcgtcatctgatgggatctttgagaaaatgactatgcaagatgtttgtgacctaatgctgcatgcaaaaattcgtgttaaacatgattttggatcctctgccataacacaacgtaatttggcagattacgtagttcatgttgctttacagaaaggcacaacagacaatgtggctgctgtggttgttccattgggatcacctggtagcactggtactacattaaaagattcgtcccagttcgaagaagatctcaagatatctatttctccaatgttgaatgttccatatggattgaagcctgatcatggacatagttcagctgtcattgacatggagtatttcaagcgctcatcaataaagttccagaggttcttggttgaagcaaaacctaagaaacttggttgtttctatttatccgagagtctggatgaagatatggactatatatttagggtgccggaagcataccagcgtgaagaagtccatgacttcaaccacataccagctgagactgccttatattctgatggtaatctggaaaaatacaaggacaaacacttttgcttgtaccttggtcccgaagatggcgaaatgggacagtgcaatggtcctgaagcttttgcaaacttttttggtctacttgactcccttccgcataatggaagcaaaccaaatggttcacactcctttggcaacacgatcgatttcaggtacaagctcaagagaaggtttgatcgtgggtcgtacggtgaagtctggttggcatttcattggaattgttctgaagatacagatgttcataaagagcctccacactttacaaatatatctcaatcagagatgtataattgcacaagttcaggcagaatgtcatctgatgaagatcatggttcaggcacagtaaatggtgatttattcatactgaagcgcataatggtggagaggggaaatgcagcttacttgagtggattgcgggagaaatactttggggaattattttcaaatgcttccaggactcttgaaggtttgtcgaggatagaatcatcgactatctcagtggacatgctatatgatcctgatatccatctagaaaagaacttgtcagctactgaagaaccacttaagcatgtggctaggtttatagaatcttttgaatcagaatcaagggaaatttggctggtgtatcacaatgaaggccactcattatcaaaattgatatatacagctgaagaaacgaagttagtcactggcaacaataatgagagggtcagacatatccaagttttgcacccatcgaagtggtggcattggctaaggacaacaaaagctgggctaaagcagatgcaaaacctcttatggcagctgtagcttttgggcatttccctacatcaggataacctccacaaagttgatgggactgaaggcttgtcatgatcgtaatatcacccaccgggatatcaaacctgagaacatgatcatttgctttgaggacatggagactggaaagtgtctaagagaggttccatctgaagcaaagcaaaataagctgaacatgcgtctgattgacttcggcagtgccattgatgattacacgttgaagaatctttatggtccaggacctactcgatctgaacagacatttgagtacactcctccagaggcactccttaattcaaactggtttcaaggatcaagaagtgcaaggcttaagtatgacatctgg

SEQ ID NO: 203194 - DNA, 1841 bp, Zea Mays
ttcaatgcaggaagcattacagaacaattttgaatctggttcaacagcgaccgtggtcttgatagctgatggacaaattatatctgccaatgttggagattcaaaagcttttctgtgctccgaaggatataatctgcaccatcgaaataatacggtgtaatatcaacacctgaattgacaggctggcagattctgtcagaaaatgacagttttcttattgcgtcatctgatgggatctttgagaaaatgactatgcaagatgtttgtgacctaatgctgcatgcaaaaattcgtgttaaacatgattttggatcctctgccataacacaacgtaatttggcagattacgtagttcatgttgctttacagaaaggcacaacagacaatgtggctgctgtggttgttccattgggatcacctggtagcactggtactacattaaaagattcgtcccagttcgaagaagatctcaagatatctatttctccaatgttgaatgttccatatggattgaagcctgatcatggacatagttcagctgtcattgacatggagtatttcaagcgctcatcaataaagttccagaggttcttggttgaagcaaaacctaagaaacttggttgtttctatttatccgagagtctggatgaagatatggactatatatttagggtgccggaagcataccagcgtgaagaagtccatgacttcaaccacataccagctgagactgccttatattctgatggtaatctggaaaaatacaaggacaaacacttttgcttgtaccttggtcccgaagatggcgaaatgggacagtgcaatggtcctgaagcttttgcaaacttttttggtctacttgactcccttccgcataatggaagcaaaccaaatggttcacactcctttggcaacacgatcgatttcaggtacaagctcaagagaaggtttgatcgtgggtcgtacggtgaagtctggttggcatttcattggaattgttctgaagatacagatgttcataaagagcctccacactttacaaatatatctcaatcagagatgtataattgcacaagttcaggcagaatgtcatctgatgaagatcatggttcaggcacagtaaatggtgatttattcatactgaagcgcataatggtggagaggggaaatgcagcttacttgagtggattgcgggagaaatactttggggaattattttcaaatgcttccaggactcttgaaggtttgtcgaggatagaatcatcgactatctcagtggacatgctatatgatcctgatatccatctagaaaagaacttgtcagctactgaagaaccacttaagcatgtggctaggtttatagaatcttttgaatcagaatcaagggaaatttggctggtgtatcacaatgaaggccactcattatcaaaattgatatatacagctgaagaaacgaagttagtcactggcaacaataatgagagggtcagacatatccaagttttgcacccatcgaagtggtggcattggctaaggacaacaaaagctgggctaaagcagatgcaaaacctcttatggcagctgagaacatgatcatttgctttgaggacatggagactggaaagtgtctaagagaggttccatctgaagcaaagcaaaataagctgaacatgcgtctgattgacttcggcagtgccattgatgattacacgttgaagaatctttatggtccaggacctactcgatctgaacagacatttgagtacactcctccagaggcactccttaattcaaactggtttcaaggatcaagaagtgcaaggcttaagtatgacatctgg

SEQ ID NO: 203195 - DNA, 4022 bp, Zea Mays
gctgccaccacccacctcctctctcttcacctcccattctctctctccgccccctgcttgcctgctctacccacctcataaacttccccactccttcctccatttccatccattcttctccccaggctgccgccgctggcagccgcatatgctgctgctggtgctctgctactccttcgtcaatctctgctgccgtttggcattagacggattccagtcaactccatccattttgatggttaaactatcaaagatactgccggtgctgtgaatggctgctcaagttcctcagattctttaaattctgagttcatcctcaattcggggctcttggtttaagccgttggacgattcattgtaccgcggaggattttttatggctcatgttgcctcgtgacattgtggtctgaccaaaagctgcttttacatctccttcatgggctgttcagcttccaagtgttgttcacaattgaagtgctctttgtgctcaaatgggtgcctggggcaggcacctgactccccgagggaatccaggggaaagtcaagtcgggggagagggagggtagattctagtggttcagatgattcttctggtgatgatctcggggaagatgacgatgcttttaaccatatgaatgctacaagggaatcaactgctggcatcagccgactgtcaagggtgtcgtcacagtttcttcctcccgatgcttcacgcaaggttcaggtccctttgggtaactatgacctgagatactccttcctgtctcaaagaggttactacccagaatcactggacaaggcaaatcaagatagctactgcgtacataccccatttggacctagtcctgatgaccacttattcggtgtgtttgatggccatggggaatatggagctcaatgctcgcaatttgtgaagcgaagattatgcgagaacctgctcagagataacaggtttcgtaccgatgctgtgctggctcttcattctgcttttgtggcaacgaacacacagctgcatgccgacaacttggatgactccatgagtggtactactgcagtcactatcttggtcaggggtaaaactatttacgttgcaaataccggtgattcgcgtgctgttatcgccgaaaaacaaggggatgacattgtcgctgttgacctttccatagatcaaaccccttaccggtttgatgagcttgaaagggtcaaggaatgtggtgctagggttctaacgttggaccaaatagagggcctaaagaacccagatgtgcagtgttggggtactgaagaaagtgacgatggcgatcctccaaggttatgggtgcaaaatggcatgtacccaggaactgcttttacccgtagcattggagattctgttgctgagtcaattggtgtcattgcagatcccgagatttttgtcctggatctcaattccaacaatccatttttcgttcttgctagcgatggcgtttttgagttcctttccagtcaaacagttgtcgacatggtttctaaatacaaggatcctcgagatgcatgtgcagaaattgtcgctgagtcctatcgtctttggctacagtatgaaactcgtacagatgacattacaatcatactcgtgcatattaatgggttaactgataaggaatctacccagactgttacgaaggtgactttacaaccttcacaacaagtagtaggactggcaggccctgaatcgccactaatagtaagttccaacaccaataatcagcgctccaagcatgatttatcacgggcacgattgagggctcttgaaagttctctagagaatggtcaattatgggtccctccatctccatcgcatcggaagacatgggaagagcaagcgcatattgagcgggtactacatgatcatttcctatttaggaagcttactgactcacaatgtcatgttctacttgattgtatgcaacgagttgaggtgaaacctagggatatagtagtacaacagggcggtgaaggtgactgcttctatgtagttggtagtggtgagtatgaagttctggctattcaggaagaaaatggaaaggaaataaccaaggttctgcatcggtatacagctgacaagttatcttcttttggggagctagcactaatgcacaataagccgcttcaggcttcagttcgtgctgtgaccagtggaacattatgggctctaaagagggaggacttccggggtattttgatgtcagaattttcaaacataccatcattgaagttgctccgatctgtacaactgtttacaagatttacagtgcttcaactaagtcaacttgccgagtcacttgttgaagtatcttttgcagatgggcaaataatagtagataagaatgataaattctcttctctgtatatcattcaaagaggtcgtgtgagacttatattggctactgatcaaatgacttcagatacttgggatctcattagtgctgaaacaaagcaggcacaaagtagtcgggaaaatggtaattatgtgcttgatatagatgagggagggcacttcggagagtggtctctcattggtgagactattgctttcactgctattgctgttggtgatgttacttgttctactatcatgaaggagaaatttgactcaattgttgggccttttcctaaactttcgcaagctgattccaagattaaagaatctctggtaactctggagaatgttgcagatggtgatttcccttttaggagggtgaagctctcagatttggaatggaaaatgtgcatatatgctgctgattgcagtgagattggtcttgtccaagtcaggggctatgaagtccattatctatagaggtgtttcggcagacattcttatgctcgacagatcaggacatctgcagctggtggattttaggtttgcaaagaagttggaaggtcaaaggacatacacaatatgtgggatcgctgactctctggcaccagagattgttcttggtaggggtcatggatttcctgctgactggtgggcacttggagttttgatctatttcatgcttcagtcagacatgccattcgggtcctggagggagagcgagctggaacctattacaaaaattgccaaaggccaccttgttatgccagtgtctttcagtgcagaagttgttgaccttataaccaagctactcgtggtcgacgaaaacgcgcgccttggaaccagtggtgctgaagctgtgaagaaacacccctggtttgatggcactgattgggagcgaatagcatctgggacttgtgcagcacctgaagaaatcactgagcgcatcaactactgtatagaaactcttaatgaggacttatccgcatctccttccgtgccgattgaagacccagatgatctcactgctccagagtggatccaggattggtgatctcaatagttgcatgactgtccaatgatgaattgttctagttgaggaaaacgtctctagtttttcaccgagcattctcatatcaaatggaagaaggtatacataagagttgatcgaactgacaagttgtacataccaaagattattccttctgtgatcatagatcagaatttgagatgccaagcaacagagactttggtctatgtttgctgcatagttcctggtaagaaggatctggatagtttgttggtgatccatgtaattatatatccaatttgtgcactcccttgctgtttcggaaatggatactggtcgggaggaaggtcaataattatcgttgtgaatacggacatttctttcatctgccactgtcaatcgatttgtacaagatcaagttttccaaatataattatgaaggttaccaaaacaagagcttgttatctcatatacacggtgcaaataacctgcgacgcgacatttggcatctggacactacacctacctaaaacaaaacttgatgcataatttaaataaaatacgtaaaatacaaaaaaatacataactcataaaaaagactacataaattatgtaaagcaaatagaatgcgac

SEQ ID NO: 203196 - DNA, 4297 bp, Zea Mays
gctgccaccacccacctcctctctcttcacctcccattctctctctccgccccctgcttgcctgctctacccacctcataaacttccccactccttcctccatttccatccattcttctccccaggctgccgccgctggcagccgcatatgctgctgctggtgctctgctactccttcgtcaatctctgctgccgtttggcattagacggattccagtcaactccatccattttgatggttaaactatcaaagatactgccggtgctgtgaatggctgctcaagttcctcagattctttaaattctgagttcatcctcaattcggggctcttggtttaagccgttggacgattcattgtaccgcggaggattttttatggctcatgttgcctcgtgacattgtggtctgaccaaaagctgcttttacatctccttcatgggctgttcagcttccaagtgttgttcacaattgaagtgctctttgtgctcaaatgggtgcctggggcaggcacctgactccccgagggaatccaggggaaagtcaagtcgggggagagggagggtagattctagtggttcagatgattcttctggtgatgatctcggggaagatgacgatgcttttaaccatatgaatgctacaagggaatcaactgctggcatcagccgactgtcaagggtgtcgtcacagtttcttcctcccgatgcttcacgcaaggttcaggtccctttgggtaactatgacctgagatactccttcctgtctcaaagaggttactacccagaatcactggacaaggcaaatcaagatagctactgcgtacataccccatttggacctagtcctgatgaccacttattcggtgtgtttgatggccatggggaatatggagctcaatgctcgcaatttgtgaagcgaagattatgcgagaacctgctcagagataacaggtttcgtaccgatgctgtgctggctcttcattctgcttttgtggcaacgaacacacagctgcatgccgacaacttggatgactccatgagtggtactactgcagtcactatcttggtcaggggtaaaactatttacgttgcaaataccggtgattcgcgtgctgttatcgccgaaaaacaaggggatgacattgtcgctgttgacctttccatagatcaaaccccttaccggtttgatgagcttgaaagggtcaaggaatgtggtgctagggttctaacgttggaccaaatagagggcctaaagaacccagatgtgcagtgttggggtactgaagaaagtgacgatggcgatcctccaaggttatgggtgcaaaatggcatgtacccaggaactgcttttacccgtagcattggagattctgttgctgagtcaattggtgtcattgcagatcccgagatttttgtcctggatctcaattccaacaatccatttttcgttcttgctagcgatggcgtttttgagttcctttccagtcaaacagttgtcgacatggtttctaaatacaaggatcctcgagatgcatgtgcagaaattgtcgctgagtcctatcgtctttggctacagtatgaaactcgtacagatgacattacaatcatactcgtgcatattaatgggttaactgatgaatctacccagactgttacgaaggtgactttacaaccttcacaacaagtagtaggactggcaggccctgaatcgccactaatagtaagttccaacaccaataatcagcgctccaagcatgatttatcacgggcacgattgagggctcttgaaagttctctagagaatggtcaattatgggtccctccatctccatcgcatcggaagacatgggaagagcaagcgcatattgagcgggtactacatgatcatttcctatttaggaagcttactgactcacaatgtcatgttctacttgattgtatgcaacgagttgaggtgaaacctagggatatagtagtacaacagggcggtgaaggtgactgcttctatgtagttggtagtggtgagtatgaagttctggctattcaggaagaaaatggaaaggaaataaccaaggttctgcatcggtatacagctgacaagttatcttcttttggggagctagcactaatgcacaataagccgcttcaggcttcagttcgtgctgtgaccagtggaacattatgggctctaaagagggaggacttccggggtattttgatgtcagaattttcaaacataccatcattgaagttgctccgatctgtacaactgtttacaagatttacagtgcttcaactaagtcaacttgccgagtcacttgttgaagtatcttttgcagatgggcaaataatagtagataagaatgataaattctcttctctgtatatcattcaaagaggtcgtgtgagacttatattggctactgatcaaatgacttcagatacttgggatctcattagtgctgaaacaaagcaggcacaaagtagtcgggaaaatggtaattatgtgcttgatatagatgagggagggcacttcggagagtggtctctcattggtgagactattgctttcactgctattgctgttggtgatgttacttgttctactatcatgaaggagaaatttgactcaattgttgggccttttcctaaactttcgcaagctgattccaagattaaagaatctctggtaactctggagaatgttgcagatggtgatttcccttttaggagggtgaagctctcagatttggaatggaaaatgtgcatatatgctgctgattgcagtgagattggtcttgtccaagtcaggggctatgacaagatgagaactttaaaaaggttttacatcaagagagtacaagatctccataaggaagtacaagtatttgaggaaaaggaccttatgaaaagcttgagcaaatcaacttgcgtgccagaagttctgtctacttgtgctgatcagtcataccttggaatattactgaattgttgcctttgttgctcactggcttcaatacttcatacaccactaaatgagacatctgcaagattctttgcagcctcagttgttgttgctctagaagaacttcatcagaagtccattatctatagaggtgtttcggcagacattcttatgctcgacagatcaggacatctgcagctggtggattttaggtttgcaaagaagttggaaggtcaaaggacatacacaatatgtgggatcgctgactctctggcaccagagattgttcttggtaggggtcatggatttcctgctgactggtgggcacttggagttttgatctatttcatgcttcagtcagacatgccattcgggtcctggagggagagcgagctggaacctattacaaaaattgccaaaggccaccttgttatgccagtgtctttcagtgcagaagttgttgaccttataaccaagctactcgtggtcgacgaaaacgcgcgccttggaaccagtggtgctgaagctgtgaagaaacacccctggtttgatggcactgattgggagcgaatagcatctgggacttgtgcagcacctgaagaaatcactgagcgcatcaactactgtatagaaactcttaatgaggacttatccgcatctccttccgtgccgattgaagacccagatgatctcactgctccagagtggatccaggattggtgatctcaatagttgcatgactgtccaatgatgaattgttctagttgaggaaaacgtctctagtttttcaccgagcattctcatatcaaatggaagaaggtatacataagagttgatcgaactgacaagttgtacataccaaagattattccttctgtgatcatagatcagaatttgagatgccaagcaacagagactttggtctatgtttgctgcatagttcctggtaagaaggatctggatagtttgttggtgatccatgtaattatatatccaatttgtgcactcccttgctgtttcggaaatggatactggtcgggaggaaggtcaataattatcgttgtgaatacggacatttctttcatctgccactgtcaatcgatttgtacaagatcaagttttccaaatataattatgaaggttaccaaaacaagagcttgttatctcatatacacggtgcaaataacctgcgacgcgacatttggcatctggacactacacctacctaaaacaaaacttgatgcataatttaaataaaatacgtaaaatacaaaaaaatacataactcataaaaaagactacataaattatgtaaagcaaatagaatgcgac

SEQ ID NO: 203197 - DNA, 4254 bp, Zea Mays
gcggctactctgctgccaccacccacctcctctctcttcacctcccattctctctctccgccccctgcttgcctgctctacccacctcataaacttccccactccttcctccatttccatccattcttctccccaggctgccgccgctggcagccgcatatgctgctgctggtgctctgctactccttcgtcaatctctgctgccgtttggcattagacggattccagtcaactccatccattttgatggttaaactatcaaagatactgccggtgctgtgaatggctgctcaagttcctcagattctttaaattctgagttcatcctcaattcggggctcttggtttaagccgttggacgattcattgtaccgcggaggattttttatggctcatgttgcctcgtgacattgtggtctgaccaaaagctgcttttacatctccttcatgggctgttcagcttccaagtgttgttcacaattgaagtgctctttgtgctcaaatgggtgcctggggcaggcacctgactccccgagggaatccaggggaaagtcaagtcgggggagagggagggtagattctagtggttcagatgattcttctggtgatgatctcggggaagatgacgatgcttttaaccatatgaatgctacaagggaatcaactgctggcatcagccgactgtcaagggtgtcgtcacagtttcttcctcccgatgcttcacgcaaggttcaggtccctttgggtaactatgacctgagatactccttcctgtctcaaagaggttactacccagaatcactggacaaggcaaatcaagatagctactgcgtacataccccatttggacctagtcctgatgaccacttattcggtgtgtttgatggccatggggaatatggagctcaatgctcgcaatttgtgaagcgaagattatgcgagaacctgctcagagataacaggtttcgtaccgatgctgtgctggctcttcattctgcttttgtggcaacgaacacacagctgcatgccgacaacttggatgactccatgagtggtactactgcagtcactatcttggtcaggggtaaaactatttacgttgcaaataccggtgattcgcgtgctgttatcgccgaaaaacaaggggatgacattgtcgctgttgacctttccatagatcaaaccccttaccggtttgatgagcttgaaagggtcaaggaatgtggtgctagggttctaacgttggaccaaatagagggcctaaagaacccagatgtgcagtgttggggtactgaagaaagtgacgatggcgatcctccaaggttatgggtgcaaaatggcatgtacccaggaactgcttttacccgtagcattggagattctgttgctgagtcaattggtgtcattgcagatcccgagatttttgtcctggatctcaattccaacaatccatttttcgttcttgctagcgatggcgtttttgagttcctttccagtcaaacagttgtcgacatggtttctaaatacaaggatcctcgagatgcatgtgcagaaattgtcgctgagtcctatcgtctttggctacagaatctacccagactgttacgaaggtgactttacaaccttcacaacaagtagtaggactggcaggccctgaatcgccactaatagtaagttccaacaccaataatcagcgctccaagcatgatttatcacgggcacgattgagggctcttgaaagttctctagagaatggtcaattatgggtccctccatctccatcgcatcggaagacatgggaagagcaagcgcatattgagcgggtactacatgatcatttcctatttaggaagcttactgactcacaatgtcatgttctacttgattgtatgcaacgagttgaggtgaaacctagggatatagtagtacaacagggcggtgaaggtgactgcttctatgtagttggtagtggtgagtatgaagttctggctattcaggaagaaaatggaaaggaaataaccaaggttctgcatcggtatacagctgacaagttatcttcttttggggagctagcactaatgcacaataagccgcttcaggcttcagttcgtgctgtgaccagtggaacattatgggctctaaagagggaggacttccggggtattttgatgtcagaattttcaaacataccatcattgaagttgctccgatctgtacaactgtttacaagatttacagtgcttcaactaagtcaacttgccgagtcacttgttgaagtatcttttgcagatgggcaaataatagtagataagaatgataaattctcttctctgtatatcattcaaagaggtcgtgtgagacttatattggctactgatcaaatgacttcagatacttgggatctcattagtgctgaaacaaagcaggcacaaagtagtcgggaaaatggtaattatgtgcttgatatagatgagggagggcacttcggagagtggtctctcattggtgagactattgctttcactgctattgctgttggtgatgttacttgttctactatcatgaaggagaaatttgactcaattgttgggccttttcctaaactttcgcaagctgattccaagattaaagaatctctggtaactctggagaatgttgcagatggtgatttcccttttaggagggtgaagctctcagatttggtacggggaatggaaaatgtgcatatatgctgctgattgcagtgagattggtcttgtccaagtcaggggctatgacaagatgagaactttaaaaaggttttacatcaagagagtacaagatctccataaggaagtacaagtatttgaggaaaaggaccttatgaaaagcttgagcaaatcaacttgcgtgccagaagttctgtctacttgtgctgatcagtcataccttggaatattactgaattgttgcctttgttgctcactggcttcaatacttcatacaccactaaatgagacatctgcaagattctttgcagcctcagttgttgttgctctagaagaacttcatcagaagtccattatctatagaggtgtttcggcagacattcttatgctcgacagatcaggacatctgcagctggtggattttaggtttgcaaagaagttggaaggtcaaaggacatacacaatatgtgggatcgctgactctctggcaccagagattgttcttggtaggggtcatggatttcctgctgactggtgggcacttggagttttgatctatttcatgcttcagtcagacatgccattcgggtcctggagggagagcgagctggaacctattacaaaaattgccaaaggccaccttgttatgccagtgtctttcagtgcagaagttgttgaccttataaccaagctactcgtggtcgacgaaaacgcgcgccttggaaccagtggtgctgaagctgtgaagaaacacccctggtttgatggcactgattgggagcgaatagcatctgggacttgtgcagcacctgaagaaatcactgagcgcatcaactactgtatagaaactcttaatgaggacttatccgcatctccttccgtgccgattgaagacccagatgatctcactgctccagagtggatccaggattggtgatctcaatagttgcatgactgtccaatgatgaattgttctagttgaggaaaacgtctctagtttttcaccgagcattctcatatcaaatggaagaaggtatacataagagttgatcgaactgacaagttgtacataccaaagattattccttctgtgatcatagatcagaatttgagatgccaagcaacagagactttggtctatgtttgctgcatagttcctggtaagaaggatctggatagtttgttggtgatccatgtaattatatatccaatttgtgcactcccttgctgtttcggaaatggatactggtcgggaggaaggtcaataattatcgttgtgaatacggacatttctttcatctgccactgtcaatcgatttgtacaagatcaagttttccaaatataattatgaaggttaccaaaacaagagcttgttatctcatatacacggtgcaaataacctgcgacgcgacatttggcatctggacactacacctacctaaaacaaaacttgatgcataatttaaataaaatacgtaaaatacaaaaaaatacataactcataaaaaagactacataaattatgtaaagcaaatagaatgcgac

SEQ ID NO: 203198 - DNA, 4348 bp, Zea Mays
ccgattccgacttgccctcaccttgtagcctaaacttgcggctactctgctgccaccacccacctcctctctcttcacctcccattctctctctccgccccctgcttgcctgctctacccacctcataaacttccccactccttcctccatttccatccattcttctccccaggctgccgccgctggcagccgcatatgctgctgctggtgctctgctactccttcgtcaatctctgctgccgtttggcattagacggattccagtcaactccatccattttgatggttaaactatcaaagatactgccggtgctgtgaatggctgctcaagttcctcagattctttaaattctgagttcatcctcaattcggggctcttggtttaagccgttggacgattcattgtaccgcggaggattttttatggctcatgttgcctcgtgacattgtggtctgaccaaaagctgcttttacatctccttcatgggctgttcagcttccaagtgttgttcacaattgaagtgctctttgtgctcaaatgggtgcctggggcaggcacctgactccccgagggaatccaggggaaagtcaagtcgggggagagggagggtagattctagtggttcagatgattcttctggtgatgatctcggggaagatgacgatgcttttaaccatatgaatgctacaagggaatcaactgctggcatcagccgactgtcaagggtgtcgtcacagtttcttcctcccgatgcttcacgcaaggttcaggtccctttgggtaactatgacctgagatactccttcctgtctcaaagaggttactacccagaatcactggacaaggcaaatcaagatagctactgcgtacataccccatttggacctagtcctgatgaccacttattcggtgtgtttgatggccatggggaatatggagctcaatgctcgcaatttgtgaagcgaagattatgcgagaacctgctcagagataacaggtttcgtaccgatgctgtgctggctcttcattctgcttttgtggcaacgaacacacagctgcatgccgacaacttggatgactccatgagtggtactactgcagtcactatcttggtcaggggtaaaactatttacgttgcaaataccggtgattcgcgtgctgttatcgccgaaaaacaaggggatgacattgtcgctgttgacctttccatagatcaaaccccttaccggtttgatgagcttgaaagggtcaaggaatgtggtgctagggttctaacgttggaccaaatagagggcctaaagaacccagatgtgcagtgttggggtactgaagaaagtgacgatggcgatcctccaaggttatgggtgcaaaatggcatgtacccaggaactgcttttacccgtagcattggagattctgttgctgagtcaattggtgtcattgcagatcccgagatttttgtcctggatctcaattccaacaatccatttttcgttcttgctagcgatggcgtttttgagttcctttccagtcaaacagttgtcgacatggtttctaaatacaaggatcctcgagatgcatgtgcagaaattgtcgctgagtcctatcgtctttggctacagtatgaaactcgtacagatgacattacaatcatactcgtgcatattaatgggttaactgataaggaatctacccagactgttacgaaggtgactttacaaccttcacaacaagtagtaggactggcaggccctgaatcgccactaatagtaagttccaacaccaataatcagcgctccaagcatgatttatcacgggcacgattgagggctcttgaaagttctctagagaatggtcaattatgggtccctccatctccatcgcatcggaagacatgggaagagcaagcgcatattgagcgggtactacatgatcatttcctatttaggaagcttactgactcacaatgtcatgttctacttgattgtatgcaacgagttgaggtgaaacctagggatatagtagtacaacagggcggtgaaggtgactgcttctatgtagttggtagtggtgagtatgaagttctggctattcaggaagaaaatggaaaggaaataaccaaggttctgcatcggtatacagctgacaagttatcttcttttggggagctagcactaatgcacaataagccgcttcaggcttcagttcgtgctgtgaccagtggaacattatgggctctaaagagggaggacttccggggtattttgatgtcagaattttcaaacataccatcattgaagttgctccgatctgtacaactgtttacaagatttacagtgcttcaactaagtcaacttgccgagtcacttgttgaagtatcttttgcagatgggcaaataatagtagataagaatgataaattctcttctctgtatatcattcaaagaggtcgtgtgagacttatattggctactgatcaaatgacttcagatacttgggatctcattagtgctgaaacaaagcaggcacaaagtagtcgggaaaatggtaattatgtgcttgatatagatgagggagggcacttcggagagtggtctctcattggtgagactattgctttcactgctattgctgttggtgatgttacttgttctactatcatgaaggagaaatttgactcaattgttgggccttttcctaaactttcgcaagctgattccaagattaaagaatctctggtaactctggagaatgttgcagatggtgatttcccttttaggagggtgaagctctcagatttggaatggaaaatgtgcatatatgctgctgattgcagtgagattggtcttgtccaagtcaggggctatgacaagatgagaactttaaaaaggttttacatcaagagagtacaagatctccataaggaagtacaagtatttgaggaaaaggaccttatgaaaagcttgagcaaatcaacttgcgtgccagaagttctgtctacttgtgctgatcagtcataccttggaatattactgaattgttgcctttgttgctcactggcttcaatacttcatacaccactaaatgagacatctgcaagattctttgcagcctcagttgttgttgctctagaagaacttcatcagaagtccattatctatagaggtgtttcggcagacattcttatgctcgacagatcaggacatctgcagctggtggattttaggtttgcaaagaagttggaaggtcaaaggacatacacaatatgtgggatcgctgactctctggcaccagagattgttcttggtaggggtcatggatttcctgctgactggtgggcacttggagttttgatctatttcatgcttcagtcagacatgccattcgggtcctggagggagagcgagctggaacctattacaaaaattgccaaaggccaccttgttatgccagtgtctttcagtgcagaagttgttgaccttataaccaagctactcgtggtcgacgaaaacgcgcgccttggaaccagtggtgctgaagctgtgaagaaacacccctggtttgatggcactgattgggagcgaatagcatctgggacttgtgcagcacctgaagaaatcactgagcgcatcaactactgtatagaaactcttaatgaggacttatccgcatctccttccgtgccgattgaagacccagatgatctcactgctccagagtggatccaggattggtgatctcaatagttgcatgactgtccaatgatgaattgttctagttgaggaaaacgtctctagtttttcaccgagcattctcatatcaaatggaagaaggtatacataagagttgatcgaactgacaagttgtacataccaaagattattccttctgtgatcatagatcagaatttgagatgccaagcaacagagactttggtctatgtttgctgcatagttcctggtaagaaggatctggatagtttgttggtgatccatgtaattatatatccaatttgtgcactcccttgctgtttcggaaatggatactggtcgggaggaaggtcaataattatcgttgtgaatacggacatttctttcatctgccactgtcaatcgatttgtacaagatcaagttttccaaatataattatgaaggttaccaaaacaagagcttgttatctcatatacacggtgcaaataacctgcgacgcgacatttggcatctggacactacacctacctaaaacaaaacttgatgcataatttaaataaaatacgtaaaatacaaaaaaatacataactcataaaaaagactacataaattatgtaaagcaaatagaatgcgac

SEQ ID NO: 203199 - DNA, 2366 bp, Zea Mays
ggctactctgctgccaccacccacctcctctctcttcacctcccattctctctctccgccccctgcttgcctgctctacccacctcataaacttccccactccttcctccatttccatccattcttctccccaggctgccgccgctggcagccgcatatgctgctgctggtgctctgctactccttcgtcaatctctgctgccgtttctaaatacaaggatcctcgagatgcatgtgcagaaattgtcgctgagtcctatcgtctttggctacagtatgaaactcgtacagatgacattacaatcatactcgtgcatattaatgggttaactgataaggaatctacccagactgttacgaaggtgactttacaaccttcacaacaagtagtaggactggcaggccctgaatcgccactaatagtaagttccaacaccaataatcagcgctccaagcatgatttatcacgggcacgattgagggctcttgaaagttctctagagaatggtcaattatgggtccctccatctccatcgcatcggaagacatgggaagagcaagcgcatattgagcgggtactacatgatcatttcctatttaggaagcttactgactcacaatgtcatgttctacttgattgtatgcaacgagttgaggtgaaacctagggatatagtagtacaacagggcggtgaaggtgactgcttctatgtagttggtagtggtgagtatgaagttctggctattcaggaagaaaatggaaaggaaataaccaaggttctgcatcggtatacagctgacaagttatcttcttttggggagctagcactaatgcacaataagccgcttcaggcttcagttcgtgctgtgaccagtggaacattatgggctctaaagagggaggacttccggggtattttgatgtcagaattttcaaacataccatcattgaagttgctccgatctgtacaactgtttacaagatttacagtgcttcaactaagtcaacttgccgagtcacttgttgaagtatcttttgcagatgggcaaataatagtagataagaatgataaattctcttctctgtatatcattcaaagaggtcgtgtgagacttatattggctactgatcaaatgacttcagatacttgggatctcattagtgctgaaacaaagcaggcacaaagtagtcgggaaaatggtaattatgtgcttgatatagatgagggagggcacttcggagagtggtctctcattggtgagactattgctttcactgctattgctgttggtgatgttacttgttctactatcatgaaggagaaatttgactcaattgttgggccttttcctaaactttcgcaagctgattccaagattaaagaatctctggtaactctggagaatgttgcagatggtgatttcccttttaggagggtgaagctctcagatttggaatggaaaatgtgcatatatgctgctgattgcagtgagattggtcttgtccaagtcaggggctatgacaagatgagaactttaaaaaggttttacatcaagagagtacaagatctccataaggaagtacaagtatttgaggaaaaggaccttatgaaaagcttgagcaaatcaacttgcgtgccagaagttctgtctacttgtgctgatcagtcataccttggaatattactgaattgttgcctttgttgctcactggcttcaatacttcatacaccactaaatgagacatctgcaagattctttgcagcctcagttgttgttgctctagaagaacttcatcagaagtccattatctatagaggtgtttcggcagacattcttatgctcgacagatcaggacatctgcagctggtggattttaggtttgcaaagaagttggaaggtcaaaggacatacacaatatgtgggatcgctgactctctggcaccagagattgttcttggtaggggtcatggatttcctgctgactggtaagtggttattgacccctttcgtttatatgcattccatatcactggatcaactatgtgtcttgagttcttatcaaagacaaagttgtggttaccgattatctttctaatgtgtccctaagaattttaaagcagtgtgcagtatttcctatcagtttcgtatgcgaacaatgaaaatgccatttttccttgtgacctctgtatatggaacaatactgtctatgcactgcatagcatttttacagatgcgcaaacattgaaatgctgtttacagacattgccatttccaaatctacctgacattctcagaacagactgaaacatgcaaactgcagtagaaaccttcttcccaacaaaaataaatggaggtatccacccc

SEQ ID NO: 203200 - DNA, 312 bp, Zea Mays
gactaactttaggcagccacaaaaagtgtggcgaggttccctgagcttgccatactttttttcgccgcatctggggcgctcgttttcgatgccccagcaccgctacgcgccgcacttcgcccccttctctccctctcatgccgctggttgatctctcgtcatctcctcctccaagcacggatcttctcgtcgtctcctccaagcacggaccaggagcactgaaattctatctcaaccggttctgccgactgggtaacttgaattctaaagatgagtaaaggaaaagagaagattgagaggaccattgtgtgg

SEQ ID NO: 203201 - DNA, 717 bp, Zea Mays
gactaactttaggcagccacaaaaagtgtggcgaggttccctgagcttgccatactttttttcgccgcatctggggcgctcgttttcgatgccccagcaccgctacgcgccgcacttcgcccccttctctccctctcatgccgctggttgatctctcgtcatctcctcctccaagcacggatcttctcgtcgtctcctccaagcacggaccaggagcactgaaattctatctcaaccggttctgccgactgggtaacttgaattctaaagatgggtgtgaaggagatgtatcttcaatattacaatagttacatccagtacctacgaagaagaagggttgatccaagcaggaggtgaatgtgtgatggttggttattttgcatttcttctaggttgatgcatgacggttcatggagaaggctggtggttgtgatagctatcacacactcttttggttaataattagatactctttttgttgagcaatgtgaacctttaatggtgtttatgggtcttgtggagttgtgatggggctattatgaagatgctatggcctgttatggatgattggacatgttatgggctctatatattaatctgttattttggtttcctcatattcatcatgtcatggggctattatgaaggttcttgcagctgctgaagtgcatctgtgatatttgtaaataagttattggtaactgaaatgaaggaaag

SEQ ID NO: 203202 - DNA, 1822 bp, Zea Mays
ttacaaaccaccacccgccgctttcctcagttggtctcctcctcacgcagcacaatccctcctagagcaaaagtcctaaaggcctcaattagattagacaaaaaagacgcgattggatcactggcgagggaggcgtgtttaggggggtggcgaccgaagctagccgccgagctcggcagcgttttgcgtgattgattgcgtccctaatcctcactcttttgcttcgttcgctttgtccctttcatcatcccctgtgcttgtctcgccttccacaaccctctccctcttccatctcatttccgctgcggctgcaacaataaaataataagtctcgtgcaggcgaaggacgtacgacgacgcggacgcaccgtcaaagtctacaggctgcgcaatccctttctccctcttatccccaaggcgaggagctgagggggggcccttctgctgctgttcttgtttccccgctctccaagatgtcgtccccgagcaagcgccgcgagatggaccttatgaagctgatgatgagcgactacaaggtggagatggtgaacgatgggatgcaggaattcttcgtcgaattcaaggggccggccgaaagtatctaccaaggcggtgtctggaaggttagggtagaactgcctgatgcatatccttacaaatccccgtccatcggcttcatcaacaagatttatcaccctaatgtcgatgagatgtctggctctgtatgtttagatgtcataaaccaaacatggagcccaatgtttgatctagtaaatgtttttgaagtattccttccacagctgttactatatccaaatccttctgatccattaaatggggaggctgcagcactgatgatgcgtgatcgtcctgtttatgaacagaaagggaaaggcgaaggacgtacgacgacgcggacgcaccgtcaaagtctacaggctgcgcaatccctttctccctcttatccccaaggcgaggagctgagggggggggggggcccttctgctgctgttcttgtttccccgctctccaagatgtcgtccccgagcaagcgccgcgagatggaccttatgaagctgatgatgagcgactacaaggtcgagatggtgaacgatgggatgcaggaattcttcgtcgaattcaaggggccggccgaaatcatagtttatcacaggattttgccaaataaattcgtactcaatttggtaggtatctaccaaggcggtgtctggaaggttagggtagaactgcctgatgcatatccttacaaatccccgtccatcggcttcatcaacaagatttatcacccaaatgtcgatgagatgtctggctctgtatgtttagatgtcataaaccaaacatggagcccaatgtttgatctagtaaatgtttttgaagtattccttccacagctgttactatatccaaatccttctgatccattaaatggggaggctgcagcactgatgatgcgtgatcgtcctgtttatgaacagaaagtgaaagaatattgtgagaagtatgccaaaccagaggacgctggtatcactccggaagacaagtccagtgatgaagagcttagcgaggaggaagacgactccggtgatgaagctatacttggcaatcctgatccctagtctgagttggaagaagccagtccagctcatcaatacaatgtttattgcagaaattgcaattaaacaaaaactgaaaaacaaaaaaactttggatggcatgtaaataagtgtaccttgtatgttctccaatgttgtttccttcatttggctgatcgaaattctgattgctcttacatccccccccc

SEQ ID NO: 203203 - DNA, 2061 bp, Zea Mays
ccagatctcgccgcctctccatttacaaaccaccacccgccgctttcctcagttggtctcctcctcacgcagcacaatccctcctagagcaaaagtcctaaaggcctcaattagattagacaaaaaagacgcgattggatcactggcgagggaggcgtgtttaggggggtggcgaccgaagctagccgccgagctcggcagcgttttgcgtgattgattgcgtccctaatcctcactcttttgcttcgttcgctttgtccctttcatcatcccctgtgcttgtctcgccttccacaaccctctccctcttccatctcatttccgctgcggctgcaacaataaaataataagtctcgtgcaggcgaaggacgtacgacgacgcggacgcaccgtcaaagtctacaggctgcgcaatccctttctccctcttatccccaaggcgaggagctgagggggggcccttctgctgctgttcttgtttccccgctctccaagatgtcgtccccgagcaagcgccgcgagatggaccttatgaagctgatgatgagcgactacaaggtggagatggtgaacgatgggatgcaggaattcttcgtcgaattcaaggggccggccgaaagtatctaccaaggcggtgtctggaaggttagggtagaactgcctgatgcatatccttacaaatccccgtccatcggcttcatcaacaagatttatcaccctaatgtcgatgagatgtctggctctgtatgtttagatgtcataaaccaaacatggagcccaatgtttgatctagtaaatgtttttgaagtattccttccacagctgttactatatccaaatccttctgatccattaaatggggaggctgcagcactgatgatgcgtgatcgtcctgtttatgaacagaaagggaaaggcgaaggacgtacgacgacgcggacgcaccgtcaaagtctacaggctgcgcaatccctttctccctcttatccccaaggcgaggagctgagggggggggggggcccttctgctgctgttcttgtttccccgctctccaagatgtcgtccccgagcaagcgccgcgagatggaccttatgaagctgatgatgagcgactacaaggtcgagatggtgaacgatgggatgcaggaattcttcgtcgaattcaaggggccggccgaaagtaatagccctcgcgctgaatcccggttgctcttctctctccctgcctcccgtgctgatggtgcacgctcctgattctgatctagatgttgtggggtggaagttcagtttcaggaaaactgccagtctccactgttgatcgtgttcagatattcttgtccgtttagcttcatccttgattggttgctcagttgacccgaaccgtccttccttttcagtcatagtttatcacaggattttgccaaataaattcgtactcaatttggtaggtatctaccaaggcggtgtctggaaggttagggtagaactgcctgatgcatatccttacaaatccccgtccatcggcttcatcaacaagatttatcacccaaatgtcgatgagatgtctggctctgtatgtttagatgtcataaaccaaacatggagcccaatgtttgatctagtaaatgtttttgaagtattccttccacagctgttactatatccaaatccttctgatccattaaatggggaggctgcagcactgatgatgcgtgatcgtcctgtttatgaacagaaagtgaaagaatattgtgagaagtatgccaaaccagaggacgctggtatcactccggaagacaagtccagtgatgaagagcttagcgaggaggaagacgactccggtgatgaagctatacttggcaatcctgatccctagtctgagttggaagaagccagtccagctcatcaatacaatgtttattgcagaaattgcaattaaacaaaaactgaaaaacaaaaaaactttggatggcatgtaaataagtgtaccttgtatgttctccaatgttgtttccttcatttggctgatcgaaattctgattgctcttacatccccccccc

SEQ ID NO: 203204 - DNA, 1007 bp, Zea Mays
caatacctggcattgcttacaaaagccctggaaaatcttggatggtgatgctgcaaatagagaacttttcctttatgccactctcaggaacattccctgcaaatatttacagtttgcaaaaactggtggcactcgatctgcaattggacacagattatgggaaagttcgtagcatacctcacaccgtatctactccatttgcagttagtgcatcgagaggagtagcctgtgtcttttcatcccggaggcatgccttggtttatatccttgatgaggatgaggaagcggagggggatgaaacttccgatatggagtgattattatccgattccttcaccttcggctcagccatttcagcttcaggcttcagcattgtcttatgtcttgttgcaatggaggcagaggcccggagatatcaatatgtacggaaacgtcgtctcattttcacggcaatgcatgcccgggttcagaagctacgtcgcgtggtaacagcctaacaggtcaccacgcacgcgcagccgcttttagagctcatgaaattgtcagtcgtcaccctgatgtgtgtaggccctgcaggttggacttcatcgtggttatttggaaagcgagcaaaattgtacacccatttctgatcgtgttgtgttatacgagtgcttgctagttgtgtaaaaaatctagaggtaacgtcaacgtgcaaaaaaaaagggtctgtcgcaaatcttgacggtcactagagctatcgcatttctaatcgtgtttgtgttatgtggattcattattttattgttcgagctgctaatgtacttggtaaaatacattgttgactgaactcgtgttgcgccttcaactcatgtttcctttcatcaaaccataggcatatctaagaacaagaaaacatgcctcatctggatctttgttctgttaaagaagcaaggggtttcgtcaggagatgggtgcctacggcctacctttcttggttacaatgctatggcgtttgctagtttggc

SEQ ID NO: 203205 - DNA, 1262 bp, Zea Mays
cctgtacgcagaatgtttataaagatgaagattcatcgcatgaggaatcctcctatagcttgactgactatgtatgcttgaagatacctgatggatcattaaataaagtaaattgcatcggtgtgataaagggctctggtaactgttgtactaccctcagcatgatgtcactttcaggttttctgttgcatatacctgacggatatgagtgtgttgacctgtcactttataaggacaaccaggtagttttactactgagtgaaacgtcttgttctgatagccctggaaaatcttggatggtgatgctgcaaatagagaacttttcctttatgccactctcaggaacattccctgcaaatatttacagtttgcaaaaactggtggcactcgatctgcaattggacacagattatgggaaagttcgtagcatacctcacaccgtatctactccatttgcagttagtgcatcgagaggagtagcctgtgtcttttcatcccggaggcatgccttggtttatatccttgatgaggatgaggaagcggagggggatgaaacttccgatatggagtgattattatccgattccttcaccttcggctcagccatttcagcttcaggcttcagcattgtcttatgtcttgttgcaatggaggcagaggcccggagatatcaatatgtacggaaacgtcgtctcattttcacggcaatgcatgcccgggttcagaagctacgtcgcgtggtaacagcctaacaggtcaccacgcacgcgcagccgcttttagagctcatgaaattgtcagtcgtcaccctgatgtgtgtaggccctgcaggttggacttcatcgtggttatttggaaagcgagcaaaattgtacacccatttctgatcgtgttgtgttatacgagtgcttgctagttgtgtaaaaaatctagaggtaacgtcaacgtgcaaaaaaaaagggtctgtcgcaaatcttgacggtcactagagctatcgcatttctaatcgtgtttgtgttatgtggattcattattttattgttcgagctgctaatgtacttggtaaaatacattgttgactgaactcgtgttgcgccttcaactcatgtttcctttcatcaaaccataggcatatctaagaacaagaaaacatgcctcatctggatctttgttctgttaaagaagcaaggggtttcgtcaggagatgggtgcctacggcctacctttcttggttacaatgctatggcgtttgctagtttggc

SEQ ID NO: 203206 - DNA, 1417 bp, Zea Mays
gctctagcttctgcatattatgcggggatactgcaagacatgtagaacagctagtagtttttggaggatttacagacacccaatttttggaaaagagtttggtaaatcaattcaatgaattggaagatagcttgaaggaggctttcttgatgccatttactgctatctcttcgcagatacaatgtcaaggattgcttcctttatatcctgttacatcatcagctaccttgtcatcatcctgctcgccaacatcaatatcattttataaggatgaagattcatcgcatgaggaatcctcctatagcttgactgactatgtatgcttgaagatacctgatggatcattaaataaagtaaattgcatcggtgtgataaagggctctggtaactgttgtactaccctcagcatgatgtcactttcaggttttctgttgcatatacctgacggatatgagtgtgttgacctgtcactttataaggacaaccaggtagttttactactgagtgaaacgtcttgttctgatagccctggaaaatcttggatggtgatgctgcaaatagagaacttttcctttatgccactctcaggaacattccctgcaaatatttacagtttgcaaaaactggtggcactcgatctgcaattggacacagattatgggaaagttcgtagcatacctcacaccgtatctactccatttgcagttagtgcatcgagaggagtagcctgtgtcttttcatcccggaggcatgccttggtttatatccttgatgaggatgaggaagcggagggggatgaaacttccgatatggagtgattattatccgattccttcaccttcggctcagccatttcagcttcaggcttcagcattgtcttatgtcttgttgcaatggaggcagaggcccggagatatcaatatgtacggaaacgtcgtctcattttcacggcaatgcatgcccgggttcagaagctacgtcgcgtggttggacttcatcgtggttatttggaaagcgagcaaaattgtacacccatttctgatcgtgttgtgttatacgagtgcttgctagttgtgtaaaaaatctagaggtaacgtcaacgtgcaaaaaaaaagggtctgtcgcaaatcttgacggtcactagagctatcgcatttctaatcgtgtttgtgttatgtggattcattattttattgttcgagctgctaatgtacttggtaaaatacattgttgactgaactcgtgttgcgccttcaactcatgtttcctttcatcaaaccataggcatatctaagaacaagaaaacatgcctcatctggatctttgttctgttaaagaagcaaggggtttcgtcaggagatgggtgcctacggcctacctttcttggttacaatgctatggcgtttgctagtttggc

SEQ ID NO: 203207 - DNA, 2956 bp, Zea Mays
cagggatgcagttgggttcggtgggaacttgttggtctgaactataaaaatggcagaatggaatccagagaaggatctgcttgctatggttactgatgactccaaggttctcctccatcgcttcaattggcaaaggctttggacaatctctccagggaagtgcatcacatcaatttgttggagccctgatggtaaaataatagcacttggcacagaagatggtttgattcttttgcatgatgtggagaatgggaagatgctaagaactacaaaatcccacgatgttgccattgtatctttgaattgggcagaagacgatccactgtcaaagtctgacaaggatgagtttttatcctatgaagaccgcaccacacgtttctttcctcctcctcctgtgatgcctaggataggtggactacgttctggagatactggtcttgcggatgagaacgaagaagctattccagaattttctagtgcttcctgtcagcgttttaacattctgtgcagtggtggcaaagatggttgtgtttgcttcagcgtttttggaatatttcctgttggaaagataaacataactaaaatcccaatcaatgttggatcctctagaaagagttaccaactccaggatgcttcagtcagcaaggtctctttatcaagaaacctccagaaatttgttattctgtgctttggaaagttggttgataccgacaacctctctgacagctgcgaaaattctggattacattgtctctacctagatacttctatcttcttcaaccgaaaaaatgagctgcatcaggtgtcccaacaagcatcaagtattcaagatatggttgaagttgtccgtgcttctgtatctttaatatccaaacaatggtcaaacgccatgagtttattccatgagaaatttagtgccttgcccaatctgatatctacacatggagtggaatctagttctgaggatgagtttcttagccttttgtttgggacacgaacaagtccagcccttcaccattttttagctagttcacttggtgaagcgggtctcaagaggatagccaaggctgttgacagtgctggaagagatattcgtggcattatcactgagcatcttcagcctgcagtggagattatttcattcagactcgcagaattaagaggcctttcaagatggcgttcacgatttcaaactatcgggttagatggaaaccttattgatggtgtaactgagagtatagggatgctagttgttcaagtggagcgcttttcaagggtggcagccactgttgtttatctgtttcaaaatttctttgcctgggttttaaagtctgttagaatattattaaatgaacctaccgaccaagttccagcagcaaacagtgaacttgtggtgatttttcttaagtttcttcttgataaggatccaatcaaacaactacttgaagcagatgagagaattgagtgtgatatggatactgcaagacatgtagaacagctagtagtttttggaggatttacagacacccaatttttggaaaagagtttggtaaatcaattcaatgaattggaagatagcttgaaggaggctttcttgatgccatttactgctatctcttcgcagatacaatgtcaaggattgcttcctttatatcctgttacatcatcagctaccttgtcatcatcctgctcgccaacatcaatatcattttataaggatgaagattcatcgcatgaggaatcctcctatagcttgactgactatgtatgcttgaagatacctgatggatcattaaataaagtaaattgcatcggtgtgataaagggctctggtaactgttgtactaccctcagcatgatgtcactttcaggttttctgttgcatatacctgacggatatgagtgtgttgacctgtcactttataaggacaaccaggtagttttactactgagtgaaacgtcttgttctgatagccctggaaaatcttggatggtgatgctgcaaatagagaacttttcctttatgccactctcaggaacattccctgcaaatatttacagtttgcaaaaactggtggcactcgatctgcaattggacacagattatgggaaagttcgtagcatacctcacaccgtatctactccatttgcagttagtgcatcgagaggagtagcctgtgtcttttcatcccggaggcatgccttggtttatatccttgatgaggatgaggaagcggagggggatgaaacttccgatatggagtgattattatccgattccttcaccttcggctcagccatttcagcttcaggcttcagcattgtcttatgtcttgttgcaatggaggcagaggcccggagatatcaatatgtacggaaacgtcgtctcattttcacggcaatgcatgcccgggttcagaagctacgtcgcgtggtaacagcctaacaggtcaccacgcacgcgcagccgcttttagagctcatgaaattgtcagtcgtcaccctgatgtgtgtaggccctgcaggttggacttcatcgtggttatttggaaagcgagcaaaattgtacacccatttctgatcgtgttgtgttatacgagtgcttgctagttgtgtaaaaaatctagaggtaacgtcaacgtgcaaaaaaaaagggtctgtcgcaaatcttgacggtcactagagctatcgcatttctaatcgtgtttgtgttatgtggattcattattttattgttcgagctgctaatgtacttggtaaaatacattgttgactgaactcgtgttgcgccttcaactcatgtttcctttcatcaaaccataggcatatctaagaacaagaaaacatgcctcatctggatctttgttctgttaaagaagcaaggggtttcgtcaggagatgggtgcctacggcctacctttcttggttacaatgctatggcgtttgctagtttggc

SEQ ID NO: 203208 - DNA, 3669 bp, Zea Mays
cgcatataggtgctgacggccttttgccccccaaaatcttgttgtccaaaacccttctctacgcgtctcggtgcctcgccggctcgccgctcgcaatcgccggttcgccgtcgccatttgtccccttcccccccctcgcgaccgcccgcttcgagtgtcccccaaacaaaaaatccctcccgcctgcacggccctcgctggacgcggagcatggcggaggagcagatcgaagaggcgtccatggccgcggcggcggccacgccgttccagctccagttcgacaagcccatcccgttccagataaaaatggcagaatggaatccagagaaggatctgcttgctatggttactgatgactccaaggttctcctccatcgcttcaattggcaaaggctttggacaatctctccagggaagtgcatcacatcaatttgttggagccctgatggtaaaataatagcacttggcacagaagatggtttgattcttttgcatgatgtggagaatgggaagatgctaagaactacaaaatcccacgatgttgccattgtatctttgaattgggcagaagacgatccactgtcaaagtctgacaaggatgagtttttatcctatgaagaccgcaccacacgtttctttcctcctcctcctgtgatgcctaggataggtggactacgttctggagatactggtcttgcggatgagaacgaagaagctattccagaattttctagtgcttcctgtcagcgttttaacattctgtgcagtggtggcaaagatggttgtgtttgcttcagcgtttttggaatatttcctgttggaaagatagtaagtaaatacagtaactcacttgtccataatttgaactcaacaaaaaatagtctgtcatgcatgctctctcctgcttcagcatttcctgttattggttctggggacctttctaccctaacagctcctctggaaatctgttctacacagaaatattttgtgaagttaatatgctcatttaaacagagcaaatagaagttgagcactagccttttaggcttggctattgttattggtggtagacccacagtacatctgttttccgcagaatcaacaaactctaggtgtcatctgtgtatctgaacatgtacaattcatcttttccatgtattgactagctgctggtgtaatatgagagaagtttcagatattttatgcatttgcatatttatttactttcctgtgtaatctcacgcgttgaacttatgggcatttcagcaacctttgccaacttttttgtgtcattttgtatttgttctttgtccagttcaatgctctatgaaccagtagctttatgcctttgaaatttcagaacataactaaaatcccaatcaatgttggatcctctagaaagagttaccaactccaggatgcttcagtcagcaaggtctctttatcaagaaacctccagaaatttgttattctgtgctttggaaagttggttgataccgacaacctctctgacagctgcgaaaattctggattacattgtctctacctagatacttctatcttcttcaaccgaaaaaatgagctgcatcaggtgtcccaacaagcatcaagtattcaagatatggttgaagttgtccgtgcttctgtatctttaatatccaaacaatggtcaaacgccatgagtttattccatgagaaatttagtgccttgcccaatctgatatctacacatggagtggaatctagttctgaggatgagtttcttagccttttgtttgggacacgaacaagtccagcccttcaccattttttagctagttcacttggtgaagcgggtctcaagaggatagccaaggctgttgacagtgctggaagagatattcgtggcattatcactgagcatcttcagcctgcagtggagattatttcattcagactcgcagaattaagaggcctttcaagatggcgttcacgatttcaaactatcgggttagatggaaaccttattgatggtgtaactgagagtatagggatgctagttgttcaagtggagcgcttttcaagggtggcagccactgttgtttatctgtttcaaaatttctttgcctgggttttaaagtctgttagaatattattaaatgaacctaccgaccaagttccagcagcaaacagtgaacttgtggtgatttttcttaagtttcttcttgataaggatccaatcaaacaactacttgaagcagatgagagaattgagtgtgatatggatactgcaagacatgtagaacagctagtagtttttggaggatttacagacacccaatttttggaaaagagtttggtaaatcaattcaatgaattggaagatagcttgaaggaggctttcttgatgccatttactgctatctcttcgcagatacaatgtcaaggattgcttcctttatatcctgttacatcatcagctaccttgtcatcatcctgctcgccaacatcaatatcattttataaggatgaagattcatcgcatgaggaatcctcctatagcttgactgactatgtatgcttgaagatacctgatggatcattaaataaagtaaattgcatcggtgtgataaagggctctggtaactgttgtactaccctcagcatgatgtcactttcaggttttctgttgcatatacctgacggatatgagtgtgttgacctgtcactttataaggacaaccaggtagttttactactgagtgaaacgtcttgttctgatagccctggaaaatcttggatggtgatgctgcaaatagagaacttttcctttatgccactctcaggaacattccctgcaaatatttacagtttgcaaaaactggtggcactcgatctgcaattggacacagattatgggaaagttcgtagcatacctcacaccgtatctactccatttgcagttagtgcatcgagaggagtagcctgtgtcttttcatcccggaggcatgccttggtttatatccttgatgaggatgaggaagcggagggggatgaaacttccgatatggagtgattattatccgattccttcaccttcggctcagccatttcagcttcaggcttcagcattgtcttatgtcttgttgcaatggaggcagaggcccggagatatcaatatgtacggaaacgtcgtctcattttcacggcaatgcatgcccgggttcagaagctacgtcgcgtggtaacagcctaacaggttggacttcatcgtggttatttggaaagcgagcaaaattgtacacccatttctgatcgtgttgtgttatacgagtgcttgctagttgtgtaaaaaatctagaggtaacgtcaacgtgcaaaaaaaaagggtctgtcgcaaatcttgacggtcactagagctatcgcatttctaatcgtgtttgtgttatgtggattcattattttattgttcgagctgctaatgtacttggtaaaatacattgttgactgaactcgtgttgcgccttcaactcatgtttcctttcatcaaaccataggcatatctaagaacaagaaaacatgcctcatctggatctttgttctgttaaagaagcaaggggtttcgtcaggagatgggtgcctacggcctacctttcttggttacaatgctatggcgtttgctagtttggc

SEQ ID NO: 203209 - DNA, 3236 bp, Zea Mays
caaaagttgactctgacggttagaatccgatcatcataatcccgcatataggtgctgacggccttttgccccccaaaatcttgttgtccaaaacccttctctacgcgtctcggtgcctcgccggctcgccgctcgcaatcgccggttcgccgtcgccatttgtccccttcccccccctcgcgaccgcccgcttcgagtgtcccccaaacaaaaaatccctcccgcctgcacggccctcgctggacgcggagcatggcggaggagcagatcgaagaggcgtccatggccgcggcggcggccacgccgttccagctccagttcgacaagcccatcccgttccagataaaaatggcagaatggaatccagagaaggatctgcttgctatggttactgatgactccaaggttctcctccatcgcttcaattggcaaaggctttggacaatctctccagggaagtgcatcacatcaatttgttggagccctgatggtaaaataatagcacttggcacagaagatggtttgattcttttgcatgatgtggagaatgggaagatgctaagaactacaaaatcccacgatgttgccattgtatctttgaattgggcagaagacgatccactgtcaaagtctgacaaggatgagtttttatcctatgaagaccgcaccacacgtttctttcctcctcctcctgtgatgcctaggataggtggactacgttctggagatactggtcttgcggatgagaacgaagaagctattccagaattttctagtgcttcctgtcagcgttttaacattctgtgcagtggtggcaaagatggttgtgtttgcttcagcgtttttggaatatttcctgttggaaagataaacataactaaaatcccaatcaatgttggatcctctagaaagagttaccaactccaggatgcttcagtcagcaaggtctctttatcaagaaacctccagaaatttgttattctgtgctttggaaagttggttgataccgacaacctctctgacagctgcgaaaattctggattacattgtctctacctagatacttctatcttcttcaaccggtgtcccaacaagcatcaagtattcaagatatggttgaagttgtccgtgcttctgtatctttaatatccaaacaatggtcaaacgccatgagtttattccatgagaaatttagtgccttgcccaatctgatatctacacatggagtggaatctagttctgaggatgagtttcttagccttttgtttgggacacgaacaagtccagcccttcaccattttttagctagttcacttggtgaagcgggtctcaagaggatagccaaggctgttgacagtgctggaagagatattcgtggcattatcactgagcatcttcagcctgcagtggagattatttcattcagactcgcagaattaagaggcctttcaagatggcgttcacgatttcaaactatcgggttagatggaaaccttattgatggtgtaactgagagtatagggatgctagttgttcaagtggagcgcttttcaagggtggcagccactgttgtttatctgtttcaaaatttctttgcctgggttttaaagtctgttagaatattattaaatgaacctaccgaccaagttccagcagcaaacagtgaacttgtggtgatttttcttaagtttcttcttgataaggatccaatcaaacaactacttgaagcagatgagagaattgagtgtgatatggatactgcaagacatgtagaacagctagtagtttttggaggatttacagacacccaatttttggaaaagagtttggtaaatcaattcaatgaattggaagatagcttgaaggaggctttcttgatgccatttactgctatctcttcgcagatacaatgtcaaggattgcttcctttatatcctgttacatcatcagctaccttgtcatcatcctgctcgccaacatcaatatcattttataaggatgaagattcatcgcatgaggaatcctcctatagcttgactgactatgtatgcttgaagatacctgatggatcattaaataaagtaaattgcatcggtgtgataaagggctctggtaactgttgtactaccctcagcatgatgtcactttcaggttttctgttgcatatacctgacggatatgagtgtgttgacctgtcactttataaggacaaccaggtagttttactactgagtgaaacgtcttgttctgatagccctggaaaatcttggatggtgatgctgcaaatagagaacttttcctttatgccactctcaggaacattccctgcaaatatttacagtttgcaaaaactggtggcactcgatctgcaattggacacagattatgggaaagttcgtagcatacctcacaccgtatctactccatttgcagttagtgcatcgagaggagtagcctgtgtcttttcatcccggaggcatgccttggtttatatccttgatgaggatgaggaagcggagggggatgaaacttccgatatggagtgattattatccgattccttcaccttcggctcagccatttcagcttcaggcttcagcattgtcttatgtcttgttgcaatggaggcagaggcccggagatatcaatatgtacggaaacgtcgtctcattttcacggcaatgcatgcccgggttcagaagctacgtcgcgtggtaacagcctaacaggtcaccacgcacgcgcagccgcttttagagctcatgaaattgtcagtcgtcaccctgatgtgtgtaggccctgcaggttggacttcatcgtggttatttggaaagcgagcaaaattgtacacccatttctgatcgtgttgtgttatacgagtgcttgctagttgtgtaaaaaatctagaggtaacgtcaacgtgcaaaaaaaaagggtctgtcgcaaatcttgacggtcactagagctatcgcatttctaatcgtgtttgtgttatgtggattcattattttattgttcgagctgctaatgtacttggtaaaatacattgttgactgaactcgtgttgcgccttcaactcatgtttcctttcatcaaaccataggcatatctaagaacaagaaaacatgcctcatctggatctttgttctgttaaagaagcaaggggtttcgtcaggagatgggtgcctacggcctacctttcttggttacaatgctatggcgtttgctagtttggc

SEQ ID NO: 203210 - DNA, 3279 bp, Zea Mays
gacaaaagttgactctgacggttagaatccgatcatcataatcccgcatataggtgctgacggccttttgccccccaaaatcttgttgtccaaaacccttctctacgcgtctcggtgcctcgccggctcgccgctcgcaatcgccggttcgccgtcgccatttgtccccttcccccccctcgcgaccgcccgcttcgagtgtcccccaaacaaaaaatccctcccgcctgcacggccctcgctggacgcggagcatggcggaggagcagatcgaagaggcgtccatggccgcggcggcggccacgccgttccagctccagttcgacaagcccatcccgttccagataaaaatggcagaatggaatccagagaaggatctgcttgctatggttactgatgactccaaggttctcctccatcgcttcaattggcaaaggctttggacaatctctccagggaagtgcatcacatcaatttgttggagccctgatggtaaaataatagcacttggcacagaagatggtttgattcttttgcatgatgtggagaatgggaagatgctaagaactacaaaatcccacgatgttgccattgtatctttgaattgggcagaagacgatccactgtcaaagtctgacaaggatgagtttttatcctatgaagaccgcaccacacgtttctttcctcctcctcctgtgatgcctaggataggtggactacgttctggagatactggtcttgcggatgagaacgaagaagctattccagaattttctagtgcttcctgtcagcgttttaacattctgtgcagtggtggcaaagatggttgtgtttgcttcagcgtttttggaatatttcctgttggaaagatactttatgcctttgaaatttcagaacataactaaaatcccaatcaatgttggatcctctagaaagagttaccaactccaggatgcttcagtcagcaaggtctctttatcaagaaacctccagaaatttgttattctgtgctttggaaagttggttgataccgacaacctctctgacagctgcgaaaattctggattacattgtctctacctagatacttctatcttcttcaaccgaaaaaatgagctgcatcaggtgtcccaacaagcatcaagtattcaagatatggttgaagttgtccgtgcttctgtatctttaatatccaaacaatggtcaaacgccatgagtttattccatgagaaatttagtgccttgcccaatctgatatctacacatggagtggaatctagttctgaggatgagtttcttagccttttgtttgggacacgaacaagtccagcccttcaccattttttagctagttcacttggtgaagcgggtctcaagaggatagccaaggctgttgacagtgctggaagagatattcgtggcattatcactgagcatcttcagcctgcagtggagattatttcattcagactcgcagaattaagaggcctttcaagatggcgttcacgatttcaaactatcgggttagatggaaaccttattgatggtgtaactgagagtatagggatgctagttgttcaagtggagcgcttttcaagggtggcagccactgttgtttatctgtttcaaaatttctttgcctgggttttaaagtctgttagaatattattaaatgaacctaccgaccaagttccagcagcaaacagtgaacttgtggtgatttttcttaagtttcttcttgataaggatccaatcaaacaactacttgaagcagatgagagaattgagtgtgatatggatactgcaagacatgtagaacagctagtagtttttggaggatttacagacacccaatttttggaaaagagtttggtaaatcaattcaatgaattggaagatagcttgaaggaggctttcttgatgccatttactgctatctcttcgcagatacaatgtcaaggattgcttcctttatatcctgttacatcatcagctaccttgtcatcatcctgctcgccaacatcaatatcattttataaggatgaagattcatcgcatgaggaatcctcctatagcttgactgactatgtatgcttgaagatacctgatggatcattaaataaagtaaattgcatcggtgtgataaagggctctggtaactgttgtactaccctcagcatgatgtcactttcaggttttctgttgcatatacctgacggatatgagtgtgttgacctgtcactttataaggacaaccaggtagttttactactgagtgaaacgtcttgttctgatagccctggaaaatcttggatggtgatgctgcaaatagagaacttttcctttatgccactctcaggaacattccctgcaaatatttacagtttgcaaaaactggtggcactcgatctgcaattggacacagattatgggaaagttcgtagcatacctcacaccgtatctactccatttgcagttagtgcatcgagaggagtagcctgtgtcttttcatcccggaggcatgccttggtttatatccttgatgaggatgaggaagcggagggggatgaaacttccgatatggagtgattattatccgattccttcaccttcggctcagccatttcagcttcaggcttcagcattgtcttatgtcttgttgcaatggaggcagaggcccggagatatcaatatgtacggaaacgtcgtctcattttcacggcaatgcatgcccgggttcagaagctacgtcgcgtggtaacagcctaacaggtcaccacgcacgcgcagccgcttttagagctcatgaaattgtcagtcgtcaccctgatgtgtgtaggccctgcaggttggacttcatcgtggttatttggaaagcgagcaaaattgtacacccatttctgatcgtgttgtgttatacgagtgcttgctagttgtgtaaaaaatctagaggtaacgtcaacgtgcaaaaaaaaagggtctgtcgcaaatcttgacggtcactagagctatcgcatttctaatcgtgtttgtgttatgtggattcattattttattgttcgagctgctaatgtacttggtaaaatacattgttgactgaactcgtgttgcgccttcaactcatgtttcctttcatcaaaccataggcatatctaagaacaagaaaacatgcctcatctggatctttgttctgttaaagaagcaaggggtttcgtcaggagatgggtgcctacggcctacctttcttggttacaatgctatggcgtttgctagtttggc

SEQ ID NO: 203211 - DNA, 2035 bp, Zea Mays
cttatttgtgctattggctattgactggctctttctatgcaagcaatgcagttgtagtttagatgaatatgcttcttagtttggctggtttacatgaaacaattcatattgctgcttattttaaatatatttgtgtgttgacctacttttgcttgtgatttcgggtgggtttgagtgtccatttcatctgcttggttgtttgaagatttaggcggtggtgaccaatctgaacggcgcacactcgacatggccattgctatggcactaagggagagcaagcccgtgtacctcagcatcagttgcaacctccctgggctacctcattctacctttagttttatgttcaagtacatgattatcgggagaaaccaagatatggtgcttacactatttttgtaaatccttttgtagcaatgtctgtgcgctgggctgaaggcggacgcgcttgctcatcaaccgcgtgcggtcgagtgctagagccaccgattcaccgtcgagtgcatcacccgctacatcgctgggctacagcagaagtatacacaaagtggtggagtccgctccctttggcttcgaacccgacaccaataagccagcgctgtaccagaccgatccatcgggtaccatctctgcttggaaggccaatgccatgggaaggaactccaactctatgtgtgagtttctgaagaactacaaagacctccggcaaggagaccatcaagtttgctatctgtgcacttctagagattgtgaactgaacttaaatcatgcattcagtattggtctctagagaggaagctctgccaagcattactaagaactgatcaggtatacttatccatggtggaaagaaaaggtgattgactcagacttgaaaagaaaagatggcctttgcccattgacgcctgaggagactactcttgtcctcagagcacttgacatcgatagaagtatgcaaatatacattgctgctggggaaatatacggtggaaagcacaggatggcttctctaacttcagcatacctaaatgttgtatgtgcacaaatatattatgcatctattgtagcgtacttgttacacagtactcttccatctctcctttttttccttgttgatgccaaaatcaagtttacaagtatggttgcccctcacccacagcctgttacatattttagtatcatttatttatggaaaaacgaattctcttgtttagtatcatttatttatagaaaaacgatgtgtacgtaatactatctgctcccggtttgcacaacttgtgtctcaatctgctttagatagatgtatgccaaaattaagtttacaagtatggttgcccctcacccacaacctgttacatatttttattagatataatcccgcacataagtctctaactggttgctatttagaattccttgacatacgatgaggataaaggagcttggtttctggagaaagagttgattgtgaatgtttatgttaggaaccatctcaaggtttatcaatatccatgattgcactaccgaacgtatgtaatcagtagttgaccatagtaccatacattgcatatggtcttttgcaagattttctggtgccttttttcagagtccaaccagcataaaattacacggctctggtgtgtatatctgaaatgggtttcacgggttacaactaaagtgtttcataactgatagttaattagtactttttatatatccagatagatatcagtccaacagttttcttcgagatgcaattagcacttatagtaacattgattttcttatatacccttatttttgtgaaaccaatttaatggtctatgttatcattcaaaattgccttatgttgacactatgtatatatgctattcacaataacagagccattcatgctgttggacgccttggatgaactaccttttcttcaacaaagatggagctcatgcagattgatttagtccatttcttgcaatgtaacatatatgtttcatacgaattttgtactcccgtcgcatcgcacgggcactcacctagt

SEQ ID NO: 203212 - DNA, 2345 bp, Zea Mays
atgttctgccggttccagcctcggtcgcggatcgcccactctcctcccccacggacgcagatcccccgcctcgattcctcattccttcaatggcgcatcccttccttcgatggcgctcctcgcatcccgcctgcccgccgcgctcgattcctccttccttcaatggcgcatcccgcccgcagccaccaatcaacgcccgcggatcctcgtcaatcaactcccgcggatcctccaccctcctccccaccgcggcggatcctccaccctcctcgtcaatcaacgcctgtggtcctcccccacgcggatcctcgcaccacccactcccccgcgtgcgtccctggcccctcgagctcgcgcaggccagaggaccgcgctcgcccccctgaagattactccctccccaaggagctggcggcggcgtgactgtgtcgggagaaggaggccgtagaggacgctgcgcgggggctgcggcaggagctcgactccgagcggtcctccccggagatggcagccagatctgaccattgagccccctaatcgagcggatccaagatttaggcggtggtgaccaatctgaacggcgcacactcgacatggccattgctatggcactaagggagagcaagcccgtgtacctcagcatcagttgcaacctccctgggctacctcattctacctttagttttatgttcaagtacatgattatcgggagaaaccaagatatggtctgtgcgctgggctgaaggcggacgcgcttgctcatcaaccgcgtgcggtcgagtgctagagccaccgattcaccgtcgagtgcatcacccgctacatcgctgggctacagcagaagtatacacaaagtggtggagtccgctccctttggcttcgaacccgacaccaataagccagcgctgtaccagaccgatccatcgggtaccatctctgcttggaaggccaatgccatgggaaggaactccaactctatgtgtgagtttctgaagaactacaaagacctccggcaaggagaccatcaagtttgctatctgtgcacttctagagattgtgaactgaacttaaatcatgcattcagtattggtctctagagaggaagctctgccaagcattactaagaactgatcaggtatacttatccatggtggaaagaaaaggtgattgactcagacttgaaaagaaaagatggcctttgcccattgacgcctgaggagactactcttgtcctcagagcacttgacatcgatagaagtatgcaaatatacattgctgctggggaaatatacggtggaaagcacaggatggcttctctaacttcagcatacctaaatgttgtatgtgcacaaatatattatgcatctattgtagcgtacttgttacacagtactcttccatctctcctttttttccttgttgatgccaaaatcaagtttacaagtatggttgcccctcacccacagcctgttacatattttagtatcatttatttatggaaaaacgaattctcttgtttagtatcatttatttatagaaaaacgatgtgtacgtaatactatctgctcccggtttgcacaacttgtgtctcaatctgctttagatagatgtatgccaaaattaagtttacaagtatggttgcccctcacccacaacctgttacatatttttattagatataatcccgcacataagtctctaactggttgctatttagaattccttgacatacgatgaggataaaggagcttggtttctggagaaagagttgattgtgaatgtttatgttaggaaccatctcaaggtttatcaatatccatgattgcactaccgaacgtatgtaatcagtagttgaccatagtaccatacattgcatatggtcttttgcaagattttctggtgccttttttcagagtccaaccagcataaaattacacggctctggtgtgtatatctgaaatgggtttcacgggttacaactaaagtgtttcataactgatagttaattagtactttttatatatccagatagatatcagtccaacagttttcttcgagatgcaattagcacttatagtaacattgattttcttatatacccttatttttgtgaaaccaatttaatggtctatgttatcattcaaaattgccttatgttgacactatgtatatatgctattcacaataacagagccattcatgctgttggacgccttggatgaactaccttttcttcaacaaagatggagctcatgcagattgatttagtccatttcttgcaatgtaacatatatgtttcatacgaattttgtactcccgtcgcatcgcacgggcactcacctagt

SEQ ID NO: 203213 - DNA, 2130 bp, Zea Mays
atgttctgccggttccagcctcggtcgcggatcgcccactctcctcccccacggacgcagatcccccgcctcgattcctcattccttcaatggcgcatcccttccttcgatggcgctcctcgcatcccgcctgcccgccgcgctcgattcctccttccttcaatggcgcatcccgcccgcagccaccaatcaacgcccgcggatcctcgtcaatcaactcccgcggatcctccaccctcctccccaccgcggcggatcctccaccctcctcgtcaatcaacgcctgtggtcctcccccacgcggatcctcgcaccacccactcccccgcgtgcgtccctggcccctcgagctcgcgcaggccagaggaccgcgctcgcccccctgaagattactccctccccaaggagctggcggcggcgtgactgtgtcgggagaaggaggccgtagaggacgctgcgcgggggctgcggcaggagctcgactccgagcggtcctccccggagatggcagccagatctgaccattgagccccctaatcgagcggatccaaggcggtggtgaccaatctgaacggcgcacactcgacatggccattgctatggcactaagggagagcaagcccgtgtacctcagcatcagttgcaacctccctgggctacctcattctacctttagttttatgttcaagtacatgattatcgggagaaaccaagatatggtgcttacactatttttgtaaatccttttgtagcaatgtatgcattgctcttacgtttcctccagttatatttatgagttcccttgtatattgatggactttaggtgcaaaatatttattagttatgtgagaatttatggccaatatctggtttgtttaatggttttacacactaacttcaaatacagcatgaattcctgtcactagcccctataaggctattggagatcgatattcaaataaaaactcttaccgcacagtgcacattgtatagttgaagaagtgcacactctttatgtttttaaaaggaaaaacatttcaagggtgtttagtagccatggtactgtaaacctgtgcattctcttgcaaattaatgcacaaaggttgtgctaacttgcccctaatttttttttatcccacttggcctgttatacttatacaagctaaagtagacttctaagttaaggcacacatgcagaattgttgccactttctcattttgcccttaattttttaccctccatagcatccatttattgctctgatgatcaaactattggtatgatataattaagtactgaagaaaaaaagtttcaaccattttagaaataatatctctgacccgaattttcgtctccccaggtctgtgcgctgggctgaaggcggacgcgcttgctcatcaaccgcgtgcggtcgagtgctagagccaccgattcaccgtcgagtgcatcacccgctacatcgctgggctacagcagaagtatacacaaagtggtggagtccgctccctttggcttcgaacccgacaccaataagccagcgctgtaccagaccgatccatcgggtaccatctctgcttggaaggccaatgccatgggaaggaactccaactctatgtgtgagtttctgaagaactacaaagacctccggcaaggagaccatcaagtttgctatctgtgcacttctagagattgtgaactgaacttaaatcatgcattcagtattggtctctagagaggaagctctgccaagcattactaagaactgatcaggtatacttatccatggtggaaagaaaaggtgattgactcagacttgaaaagaaaagatggcctttgcccattgacgcctgaggagactactcttgtcctcagagcacttgacatcgatagaagtatgcaaatatacattgctgctggggaaatatacggtggaaagcacaggatggcttctctaacttcagcatacctaaatgttagccattcatgctgttggacgccttggatgaactaccttttcttcaacaaagatggagctcatgcagattgatttagtccatttcttgcaatgtaacatatatgtttcatacgaattttgtactcccgtcgcatcgcacgggcactcacctagt

SEQ ID NO: 203214 - DNA, 1494 bp, Zea Mays
atgttctgccggttccagcctcggtcgcggatcgcccactctcctcccccacggacgcagatcccccgcctcgattcctcattccttcaatggcgcatcccttccttcgatggcgctcctcgcatcccgcctgcccgccgcgctcgattcctccttccttcaatggcgcatcccgcccgcagccaccaatcaacgcccgcggatcctcgtcaatcaactcccgcggatcctccaccctcctccccaccgcggcggatcctccaccctcctcgtcaatcaacgcctgtggtcctcccccacgcggatcctcgcaccacccactcccccgcgtgcgtccctggcccctcgagctcgcgcaggccagaggaccgcgctcgcccccctgaagattactccctccccaaggagctggcggcggcgtgactgtgtcgggagaaggaggccgtagaggacgctgcgcgggggctgcggcaggagctcgactccgagcggtcctccccggagatggcagccagatctgaccattgagccccctaatcgagcggatccaagatttaggcggtggtgaccaatctgaacggcgcacactcgacatggccattgctatggcactaagggagagcaagcccgtgtacctcagcatcagttgcaacctccctgggctacctcattctacctttagttttatgttcaagtacatgattatcgggagaaaccaagatatggtctgtgcgctgggctgaaggcggacgcgcttgctcatcaaccgcgtgcggtcgagtgctagagccaccgattcaccgtcgagtgcatcacccgctacatcgctgggctacagcagaagtatacacaaagtggtggagtccgctccctttggcttcgaacccgacaccaataagccagcgctgtaccagaccgatccatcgggtaccatctctgcttggaaggccaatgccatgggaaggaactccaactctatgtgtgagtttctgaagaactacaaagacctccggcaaggagaccatcaagtttgctatctgtgcacttctagagattgtgaactgaacttaaatcatgcattcagtattggtctctagagaggaagctctgccaagcattactaagaactgatcaggtatacttatccatggtggaaagaaaaggtgattgactcagacttgaaaagaaaagatggcctttgcccattgacgcctgaggagactactcttgtcctcagagcacttgacatcgatagaagtatgcaaatatacattgctgctggggaaatatacggtggaaagcacaggatggcttctctaacttcagcatacctaaatgttagccattcatgctgttggacgccttggatgaactaccttttcttcaacaaagatggagctcatgcagattgatttagtccatttcttgcaatgtaacatatatgtttcatacgaattttgtactcccgtcgcatcgcacgggcactcacctagt

SEQ ID NO: 203215 - DNA, 1319 bp, Zea Mays
catgttctgccggttccagcctcggtcgcggatcgcccactctcctcccccacggacgcagatcccccgcctcgattcctcattccttcaatggcgcatcccttccttcgatggcgctcctcgcatcccgcctgcccgccgcgctcgattcctccttccttcaatggcgcatcccgcccgcagccaccaatcaacgcccgcggatcctcgtcaatcaactcccgcggatcctccaccctcctccccaccgcggcggatcctccaccctcctcgtcaatcaacgcctgtggtcctcccccacgcggatcctcgcaccacccactcccccgcgtgcgtccctggcccctcgagctcgcgcaggccagaggaccgcgctcgcccccctgaagattactccctccccaaggagctggcggcggcgtgactgtgtcgggagaaggaggccgtagaggacgctgcgcgggggctgcggcaggagctcgactccgagcggtcctccccggagatggcagccagatctgaccattgagccccctaatcgagcggatccaaggtctgtgcgctgggctgaaggcggacgcgcttgctcatcaaccgcgtgcggtcgagtgctagagccaccgattcaccgtcgagtgcatcacccgctacatcgctgggctacagcagaagtatacacaaagtggtggagtccgctccctttggcttcgaacccgacaccaataagccagcgctgtaccagaccgatccatcgggtaccatctctgcttggaaggccaatgccatgggaaggaactccaactctatgtgtgagtttctgaagaactacaaagacctccggcaaggagaccatcaagtttgctatctgtgcacttctagagattgtgaactgaacttaaatcatgcattcagtattggtctctagagaggaagctctgccaagcattactaagaactgatcaggtatacttatccatggtggaaagaaaaggtgattgactcagacttgaaaagaaaagatggcctttgcccattgacgcctgaggagactactcttgtcctcagagcacttgacatcgatagaagtatgcaaatatacattgctgctggggaaatatacggtggaaagcacaggatggcttctctaacttcagcatacctaaatagccattcatgctgttggacgccttggatgaactaccttttcttcaacaaagatggagctcatgcagattgatttagtccatttcttgcaatgtaacatatatgtttcatacgaattttgtactcccgtcgcatcgcacgggcactcacctagt

SEQ ID NO: 203216 - DNA, 2154 bp, Zea Mays
gtaggcgtgcacagttgcatgttctgccggttccagcctcggtcgcggatcgcccactctcctcccccacggacgcagatcccccgcctcgattcctcattccttcaatggcgcatcccttccttcgatggcgctcctcgcatcccgcctgcccgccgcgctcgattcctccttccttcaatggcgcatcccgcccgcagccaccaatcaacgcccgcggatcctcgtcaatcaactcccgcggatcctccaccctcctccccaccgcggcggatcctccaccctcctcgtcaatcaacgcctgtggtcctcccccacgcggatcctcgcaccacccactcccccgcgtgcgtccctggcccctcgagctcgcgcaggccagaggaccgcgctcgcccccctgaagattactccctccccaaggagctggcggcggcgtgactgtgtcgggagaaggaggccgtagaggacgctgcgcgggggctgcggcaggagctcgactccgagcggtcctccccggagatggcagccagatctgaccattgagccccctaatcgagcggatccaagatttaggcggtggtgaccaatctgaacggcgcacactcgacatggccattgctatggcactaagggagagcaagcccgtgtacctcagcatcagttgcaacctccctgggctacctcattctacctttagttttatgttcaagtacatgattatcgggagaaaccaagatatggtgcttacactatttttgtaaatccttttgtagcaatgtatgcattgctcttacgtttcctccagttatatttatgagttcccttgtatattgatggactttaggtgcaaaatatttattagttatgtgagaatttatggccaatatctggtttgtttaatggttttacacactaacttcaaatacagcatgaattcctgtcactagcccctataaggctattggagatcgatattcaaataaaaactcttaccgcacagtgcacattgtatagttgaagaagtgcacactctttatgtttttaaaaggaaaaacatttcaagggtgtttagtagccatggtactgtaaacctgtgcattctcttgcaaattaatgcacaaaggttgtgctaacttgcccctaatttttttttatcccacttggcctgttatacttatacaagctaaagtagacttctaagttaaggcacacatgcagaattgttgccactttctcattttgcccttaattttttaccctccatagcatccatttattgctctgatgatcaaactattggtatgatataattaagtactgaagaaaaaaagtttcaaccattttagaaataatatctctgacccgaattttcgtctccccaggtctgtgcgctgggctgaaggcggacgcgcttgctcatcaaccgcgtgcggtcgagtgctagagccaccgattcaccgtcgagtgcatcacccgctacatcgctgggctacagcagaagtatacacaaagtggtggagtccgctccctttggcttcgaacccgacaccaataagccagcgctgtaccagaccgatccatcgggtaccatctctgcttggaaggccaatgccatgggaaggaactccaactctatgtgtgagtttctgaagaactacaaagacctccggcaaggagaccatcaagtttgctatctgtgcacttctagagattgtgaactgaacttaaatcatgcattcagtattggtctctagagaggaagctctgccaagcattactaagaactgatcaggtatacttatccatggtggaaagaaaaggtgattgactcagacttgaaaagaaaagatggcctttgcccattgacgcctgaggagactactcttgtcctcagagcacttgacatcgatagaagtatgcaaatatacattgctgctggggaaatatacggtggaaagcacaggatggcttctctaacttcagcatacctaaatgttagccattcatgctgttggacgccttggatgaactaccttttcttcaacaaagatggagctcatgcagattgatttagtccatttcttgcaatgtaacatatatgtttcatacgaattttgtactcccgtcgcatcgcacgggcactcacctagt

SEQ ID NO: 203217 - DNA, 1341 bp, Zea Mays
atgtaggcgtgcacagttgcatgttctgccggttccagcctcggtcgcggatcgcccactctcctcccccacggacgcagatcccccgcctcgattcctcattccttcaatggcgcatcccttccttcgatggcgctcctcgcatcccgcctgcccgccgcgctcgattcctccttccttcaatggcgcatcccgcccgcagccaccaatcaacgcccgcggatcctcgtcaatcaactcccgcggatcctccaccctcctccccaccgcggcggatcctccaccctcctcgtcaatcaacgcctgtggtcctcccccacgcggatcctcgcaccacccactcccccgcgtgcgtccctggcccctcgagctcgcgcaggccagaggaccgcgctcgcccccctgaagattactccctccccaaggagctggcggcggcgtgactgtgtcgggagaaggaggccgtagaggacgctgcgcgggggctgcggcaggagctcgactccgagcggtcctccccggagatggcagccagatctgaccattgagccccctaatcgagcggatccaaggtctgtgcgctgggctgaaggcggacgcgcttgctcatcaaccgcgtgcggtcgagtgctagagccaccgattcaccgtcgagtgcatcacccgctacatcgctgggctacagcagaagtatacacaaagtggtggagtccgctccctttggcttcgaacccgacaccaataagccagcgctgtaccagaccgatccatcgggtaccatctctgcttggaaggccaatgccatgggaaggaactccaactctatgtgtgagtttctgaagaactacaaagacctccggcaaggagaccatcaagtttgctatctgtgcacttctagagattgtgaactgaacttaaatcatgcattcagtattggtctctagagaggaagctctgccaagcattactaagaactgatcaggtatacttatccatggtggaaagaaaaggtgattgactcagacttgaaaagaaaagatggcctttgcccattgacgcctgaggagactactcttgtcctcagagcacttgacatcgatagaagtatgcaaatatacattgctgctggggaaatatacggtggaaagcacaggatggcttctctaacttcagcatacctaaatgttagccattcatgctgttggacgccttggatgaactaccttttcttcaacaaagatggagctcatgcagattgatttagtccatttcttgcaatgtaacatatatgtttcatacgaattttgtactcccgtcgcatcgcacgggcactcacctagt

SEQ ID NO: 203218 - DNA, 2548 bp, Zea Mays
ctgccttccgtgtctcccttccattctacggccacctcggcagggagcgttaaaagcgtcgcccgcgaagaacgtgggccagcgtcggctcgccgtctccctccctccttccagatctcggcgcgagttcacccttcagatttccatttccaacacgacggcgaagaagagctgcgatccggaggagtaaaccctacccgccggttgcccggtgcgcgggcgagatccgggcggagatctagggcgcggcgccggccatggcgagctccggactcgcttaccccgaccgcttctacgctgccgcggcttacgctgggttcggagccggcggggccacctcctccgcagctatctcccgcttccagaacgacgtcgccctcctcctctacggcctgcaccagcaggccacggttgggccatgcaatgtgcccaagccaagggcgtggaaccccgtggagcagagcaaatggactagctggcatgggcttggaagcatgccttcagcggaggcgatgcgtctttttgtcaaaatcctagaggaagaagatcctggatggtactctagggtccctgagttcaaccctgagcctgttgtagatattcagatgcataaaccaaaagacgagccacaaagtgtaccggcttcaacaaatggaacatcaatttcagaaccaaaaatcatttctgaaaatggaagttctgtggagactcaggacaaagatgttattctggaaggccttagtactgttatttctcatgatgagtggactccattatctgtcagtggtctccgtccgaagcctcgttatgagcatggagcaactgtgttgcaaaataagatgtatatatttggtggaaaccataatggacgttaccttagtgaccttcaggctttggatctgaagagtttgatctggtccaaggttgataccaaatttcaagcagaacctgctgactccactataaccacacaaattgctccatgtgctggtcattctttgatttcttggggtaacaaatttttatctattgctgggcatacaaaagatccatctgaaggcattacagtgaaggaatttgatccgcatacttgtacctggtcaattgtcaagacttatgggaaaccaccggtgtctcgtggaggtcaaacagtgactcttgttggaacgacactagttttgtttggtggtgaagatgcaaaacggtgtctcttgaatgacttgcacatccttgatcttgaaaccatgacatgggatgatgtggatgcaataggcaaccctccttctccaaggtcagatcatgctgctgcttgccatgctgaccgctatcttttaatttttggtggggggtctcatgcaacatgtttcaatgacctacatgtccttgatttgcagacgatggaatggtcaagacccaaacaacaaggcctgactccaagcccaagagctggacatgcaggtgcaactgtcggtgagaactggtacatagttgggggtggcaataataaaagtggtgtttctgaaacactagtgctcaatatgtcaactctgacatggtcagttgttagcactgtggaaggacgtgttcctcttgccagtgagggcatgactttagtgcatagcaattacaatggttatgattatctcgtctcttttggaggatacaatggacgatacagcaacgaggtttacactcttaaactcagcctcaaatcagattcacagccaattgtagaagaagaaactgtctcagatactatatctagggtcagagaacctgagaccgaaatttctcaagatgggaggatacgcgagattgccatggacagtgccgattcagacctgaaatgatgaagcaagtgaacagcttgtagcagatcttaaagctcagaaagaggaactagaagcaacaattaacagggaacagctgcaaactgtgcaacttaaagaagacattgctcaagcagagaccagaaatgcagagctgacaaaggaacttcaagctgtccgtggccaacttgcttctgagcaatcaagatgtttcaaacttgaggttgacgttgcggaacttcgacaaaagcttcagagtatggacgccctggaaaaggaggtcgagctgcttcggcgacagaaagccgcttcggagcaagcggcgctggacgcaaagcagaggcaaggttcgggtggtatgtggggttggctcgctggaagcccgccaccatcacagtagttcgtacaggccgtggttcatatattttacttgtaacattacatatcatttgacatttgtctacattttttttttgtcacatggcattcgtgtttcgttttgaccacacaaagaacaacgtgctctggcgagagttatattgtgctcatagagaatcgttaggttgccccctcacaatcactcaaatgtatcattaggttttaacaatgtactgatcatgtatgaacttccatttgacgttgtgctggttgcctataggtagtttatttttcaaggttgccttgtttttttttcgtgaatctgttgttgacgtgcaaat

SEQ ID NO: 203219 - DNA, 1660 bp, Zea Mays
tttttttgaacttttttttttgccaacctaggctcaacgcctcatcgccggacgaaagagcggcttgcacgtcggggcggtggcccacagcccactcaacagcaacacgtgtcggcgcggtccggccagacacgtggtcgcccccctccttgcccgcccaccaaacacccgacccagccagctaggggagccacagcaagaaatgcaggccttcccttttgctgcccaaccccaatcatagagcggaacggacggagtgggtgcaaatcggattagacggccacgtcccccccgagcctcaccaatcgccggccctccgcaggcagggaagggcggttgggcggccggccggccggagatctgattgctcttatcttctcccctcccgttcatccaatctgctgtcaccatatctgatctccctctccccctgattgcccgcggtggccattgcctcgctcgcgtctccttcgccgcgcttctaggaagattcggcggcgtgcccatttgtcggtcgtagccttaaccagttcttccccaactccgagctccttccttgcttgggagcagctgcacacacatccgcccaggatattagttagcgtggaggatggcgtccaacgcctcgcaggggagcaactctgcaagcaccacggagcaaggtattggtggaagcatgtttaaccaatccgcagacgcgaagagtccatctacctctgataatagaaatcaaaacgacatgcttcctccgaccaaagcggccgagaagccactaaacggtactgcgacagagcagcagcctcgcctacggacgcttgggtccctcacgacacggacgggcagcaccagtgacatcagaaagctcatgatggaggacatgccaatggtctcatccaaggtagaagggcccaacgccaggaggatcgacggcttcctgtacaggtacaagaaaggcgaggatgtgaggatagtgtgcgtctgccatggtagcttcctcactcccgcggagtttgttaagcacgcggggggcggtgatgtgccgaatccgcttcggcatattgtcgtcaaccctgcgcccttctcgtgaagagagagggttacgctggtgctgctatctgctgtgctgtaacatgtaggctcctttgtttctgggagttcaacggaaggtctctgtatttttacataaatcgagtgtgacagcaaattcaagagaaaaaaaatcatctgcaaatgttataggcttgtctacaaattgacaaggattcagtagcaatgctttgctagctggttttaacagttccctttccagtgacaagtctctgtatgcttcaagagggttcacatccaagataggaacagggttctagatggcattcaagtttgccatgctcaagctattcgatttcgaaggcattgaggaaacagagatatcattatgcttctctaggaggttgagctcccaaaggaatgaagcgaatgctccactctgatatggatccctgtcttcggggttgtatttctgtataaaagaagaggaatagcaggatacgaagtgtccatttccaactattgaaaaagaacatgagaaccgccaccagaatcattttccaacaaacatttttttttggagatgcttcaatgtgactaatgctgaaataat

SEQ ID NO: 203220 - DNA, 1912 bp, Zea Mays
tttttttgaacttttttttttgccaacctaggctcaacgcctcatcgccggacgaaagagcggcttgcacgtcggggcggtggcccacagcccactcaacagcaacacgtgtcggcgcggtccggccagacacgtggtcgcccccctccttgcccgcccaccaaacacccgacccagccagctaggggagccacagcaagaaatgcaggccttcccttttgctgcccaaccccaatcatagagcggaacggacggagtgggtgcaaatcggattagacggccacgtcccccccgagcctcaccaatcgccggccctccgcaggcagggaagggcggttgggcggccggccggccggagatctgattgctcttatcttctcccctcccgttcatccaatctgctgtcaccatatctgatctccctctccccctgattgcccgcggtggccattgcctcgctcgcgtctccttcgccgcgcttctaggaagattcggcggcgtgcccatttgtcggtcgtagccttaaccagttcttccccaactccgagctccttccttgcttgggagcagctgcacacacatccgcccaggatattagttagcgtggaggatggcgtccagggacttcctccgcgtcttcggcgccggtgagggggcgggcccgccgggggacgccggcgccggccagcccgacgacgacgagctcagcctcggcctctccctgggcggccgcttcggcaccgaccgctggcgccgacgcgagatgcagagccgccgccgcctcgaggcgcgccggaagcgcgtcgagcgacgcaactccatgggctccgtctccgtggcacccgccgacgccgtcagcgggaggaggtccaacgcctcgcaggggagcaactctgcaagcaccacggagcaaggtattggtggaagcatgtttaaccaatccgcagacgcgaagagtccatctacctctgataatagaaatcaaaacgacatgcttcctccgaccaaagcggccgagaagccactaaacggtactgcgacagagcagcagcctcgcctacggacgcttgggtccctcacgacacggacgggcagcaccagtgacatcagaaagctcatgatggaggacatgccaatggtctcatccaaggtagaagggcccaacgccaggaggatcgacggcttcctgtacaggtacaagaaaggcgaggatgtgaggatagtgtgcgtctgccatggtagcttcctcactcccgcggagtttgttaagcacgcggggggcggtgatgtgccgaatccgcttcggcatattgtcgtcaaccctgcgcccttctcgtgaagagagagggttacgctggtgctgctatctgctgtgctgtaacatgtaggctcctttgtttctgggagttcaacggaaggtctctgtatttttacataaatcgagtgtgacagcaaattcaagagaaaaaaaatcatctgcaaatgttataggcttgtctacaaattgacaaggattcagtagcaatgctttgctagctggttttaacagttccctttccagtgacaagtctctgtatgcttcaagagggttcacatccaagataggaacagggttctagatggcattcaagtttgccatgctcaagctattcgatttcgaaggcattgaggaaacagagatatcattatgcttctctaggaggttgagctcccaaaggaatgaagcgaatgctccactctgatatggatccctgtcttcggggttgtatttctgtataaaagaagaggaatagcaggatacgaagtgtccatttccaactattgaaaaagaacatgagaaccgccaccagaatcattttccaacaaacatttttttttggagatgcttcaatgtgactaatgctgaaataat

SEQ ID NO: 203221 - DNA, 4040 bp, Zea Mays
ctctgattttgtgaagaagctacagagatgagacgcatgcgctcgccgctagcattttttaccttttctttctcttgaatccttctttcacggatggccatatacttcgccccgcttccccaatccctacccggatcgttctctctcctaagtatttcccaatttgatcggcaagtgcagccctctagcctcagccgagggttcttcgtcaacattcagcatgtcactatctatgaaggatttggacacggccttccatggagctggacaaaaggacggtttgatggtatggcgtattgagaattttaagccagttcctgtgccaacatcattacatggaaaattttatatgggtgattcatatatcatcttgaagacaacagctttaaaaaatggttcctttcgccatgacatccattattggcttggtaaagacactagtcaggatgaggctggaactgctgcaattttaactgtggagcttgatgctgcgcttggaggacgtgctgtccagtaccgggaatcacaaggcaatgaaactgaaaggtttctctcatattttaggccttgcatcatgccacaatcaggaggggtagtttctgggttcaaccatgtagaagtcaatgatcagaagcatgttacccgattatatgtgtgccgaggaaaacatgttgtccatgttaaagaggttccttttactcgttcatcccttaaccatgaggacatatttattttggataccaagtcaaaaattttccagttcaatggttctaactcatgcattcaggagagagcaaaagctcttgaagttgtacagtatatcagagatactttccatgagggcaagtgtgaagttgcaggggttgaggatggaaaattgatggctgatgcagaagctggtgaattttgggctttgtttggtggcttcgctcctcttccaaagaagacactttcagaggataacggggaagacaaggaaatcatcatcaaattgatgtgcatcaaccaaggaaaattggagcaaattaattttgaatccttggcgcgtgagttacttgagccaaacaaatgctacttgcttgactgtggtgctgaaatatatgtatggatgggcagaagtgcttctttgcaagaaagaaagggcgcgagcaaaattgctgagaaactactcattgatgctagtcgaacaaaatcacatgttatcaaagtgatcgagggattcgagacagtcacgttcaagtcaaaatttattgagtggccacccacacctgatttgaagttatcatctgaggatggaagagtcaaagttgcagccctcctcaaatctcaaggattagatgttaaaggcttgatgaaaactgcacctgtaaaagaagaaccccggccttacattgattgcacaggtcatttgcaggtatggagggttaatggaaatggcaagactcttctttcatgtgctgaccaatcaaaattttacactggagattgttacatttttcaatacacatatagtggagatgataaggaggaatgtcttattggaacttggttcgggaagagaagcattgaggtggagagggtttcagcgttgtcactggctagcaagatggttcaggcttccaagttccaagctatccaggcccgactttatgaagggaaagaaccaattcagttctttgtcatatttcaaagttttcaactattcaagggtggacttagctctggatacaagaactttgttgttgaaaatgatattgtggatgacacttactctgaaggtgggattgccctattccggattcagggttcaggatcagaaaacatgcaagcacttcaggtagatccgctggcttcgtccttaaactcgtcctattgttacattctacataatggaaacacagtgttcacatggattggcaatgttacgacctcattggatcatgacttggttgagagacaactagatgtaattaagccagaattgccttccaggtcactaaaggaggggagagaaaccgaccaattttgggaagtactgggcggtaaatccaagtatccaaaccaaaaagttgaaagagaaaatgaaaatgacccccatcttttctcatgcatcatatccaaaggcaatataagggtcaaagaaatacaccattttactcaggatgatctgatgacagaggatgtttttattcttgattgtcactcagacatatttgtttgggttggccagaaggtggataccaaagtgaaatcacaagctatggatattggagagaaatttcttgttcatgatttccttatggaaaaactatcacgagaaacaccaatattcattgtgtcagagggtagcgagccacaattttttactagattcttcaattgggactctacaaaatctcttgtgcatggcagttcataccaaaggaagcttggtgtcctaaagggtggagcacctccaacagtggataaaccaaaacgacgaacaccagcatttacaggaagaagttcaggacaagataaatctcatcgttcaagaagcatgtccactagcccagatcgtccacgtgttcgtggaaggtctccagccttcaatatgttaacttctgcctttgagaacacgagcaataccaggaacctttccacccctccccctgttgtgagaaagcctttctcaaaatctggatgtcctgaacactcaagggtgtcacccaaaaaatcagctatcagttccctcaccaggtcttttgaaggtcacatgaaaagtacaataccaaaatcagtaaaagtgagccctgagctagagaaggcgacacaggaagaaggtgccacaagcggtgcaaacgaaaacaagcaagaagatgacgaagggcgtgtgatctacccatatgaacgtctgacaacgacagcagaagatcctgcccctgacatcgacgtgaccaaacgagagacctacttatcgtcagccgagttcaaagacaaattcaacatgataagggcagagttctacaagcttcccaagtggaagcagagcaaattgaagtcttgtgtccaacttttttagcctgcccacgactgtctcgacttctaaagacaataaccgtttgtcagaagtgggggcaccgatttttgcatttagatctcatgtcttcacctgcctatcatattctttcagacagttcttattcttcctgtttataggatctaagattcatttagagctcaagaggtttggaattccatagcccatttctgttgtggggctctccggatcatacgtagatgctttttcagtttggtcaaggtttgtattctaggattcaggtcgcaaaggttgtcacgatatgagtactctattaattttattaagccttgggccatgatatcaccatccactagcccaggatatcacaatccaccctagaagactgacgtcctaatcgatcaaccccagccttgtgctaggacatcaccatccgctgggttaggatatcacaatggcgcctgccacctacgagatcacgtgtctgctagatgaactcctttcgacgtcactcacccggacgaggccattggatggatgtcgtgccgcctcggtctcagcgtatcgtcggcctttcgtgccttcctacccctactcactgacgggccccaacggtcactaagaagaagctcttcatgcgcctccgactccatgagacatgtcctagccgactgccacatggaacgggacatcgtgacagacgggcatctggattgaatgaggagggaggaggagagggcttttcgtgactgactttgaacgggacggtgtctgaactcaattgaatgaaacaatttgtttgtttggctttaatccgtaccggtttctactgctcctacagtgttttgtctctatagattatagctgcagcagttcaaacaattagctttaatctaaagcgataaatttcgcatcaaggtgtagggacacacggcaaagacaatcgcacgcacgtgaattcctcctgtgcgaggaatcaagggcggcttttaatcaaaag

SEQ ID NO: 203222 - DNA, 1213 bp, Zea Mays
agcgtaccgaactacctatcctatcccctcgcgtcgcatctttcctctcgtaacgcgtatcagtgccaaccaggcagccatcgccgcggccctcgtgcctctgcatcgcggcgcgccttggtgctccatccacgtaatccctgaggtgcggcacaggcgtggaggtatctcggcagtcggcagggcggctggagttcggtcccagaagagatggcggggggccctgatgtcgcgggcttgatcgaggatgatgcggtctccgtcatcacggagggcttagtggtgtgtgacatatgtggcagtggtagtgcccctcatcttattgcaaactgcgctcggtgcaatgcgcgtgagcacggaacatgtggtgatcagttggtagacatgctttgtaaggatgtttggatagtagttactagtgaatggtaagagaagagaagaatggtaaagagaagagaaggttttgccacagataactcatgtaaaaactgtaactaaataaggccttggatatttcctccatttgttgttttgttctttacaaaatagccactatctgttaaaatggtgaaacggatgaacgaattccagtttctgaaagtttttttttctgttttctatttccaacaaaaggtactgtatggaggggttgacgttcctgattccgctcatatggttttgtaatagatgccaacgcaacgccaacagggcacccagatcctaaccaaggttctggagatggtgttgggcgccaaattcccttgaggaaggtagcagctagtgtcgtgtgagaaatgttggcttgtttttgtggttgtgtgtattggcaatcgctggagcctggagctgtgtgtattggcatcgctggagcaaaatgtccatgtggcttggcactgatgctggctggcctcagaacatacgtcggatattctttcaccgcgagtgagcaattgaaattgggcaggtaataccatgttgtgggcgtaaatgcgatggacactgtcagtttcgtgggttttcttttcttctttttcgggccaagagtttcgtggattctcagcctcggttgcatgcgcaagatcttgagtgcagcatagaacacgcttgttcttaccagtacgtgtgcaagaaaaatggatctcggtatatttaattaatatattttcttgtttgatggtgaacataattatttgaactaatatatttactagtg

SEQ ID NO: 203223 - DNA, 1725 bp, Zea Mays
gctataggtggacagcatttttctagatgacccgccctgttgctgtggaggatgtgaaaagagaagtgaagattcttaaagcacttaaaggacatcagaatattgttcacttctacaatgcatttgaggatgattcatacgtgtacattgtgatggagctatgtgagggcggtgaactattagatcggattttggcaaaaaagaatagccgctatagtgagaaagatgctgcagtggtagtccgccaaatgctcaaagtagctgctgaatgccatctgcgtgggttagttcaccgagatatgaagcctgaggtagaaatcaaatacttcaatctctttgcacacagtaagcatttggtgatatttcactacttcctcaggtcatgtaagactgtacctattttccttcccagaacttccttttcaaatcgaacaaggaggattcaccactaaaggcgacagattttggtttgtcagatttcattaagccagggaagaagttccatgacattgttggaagtgcttactatgtcgcaccagaagtactaaaacgacggtctggtcctgagtcagatgtttggagcataggagtcataacctacattttgctctgtgggaggcgccctttttgggataagaccgaagacggtatattcaaggaggttctaaggaacaagcctgattttcgtaagaggccttggtcaagcatcagcccaggtgctaaagattttgttaaaaggttactagtgaagaatccaagggccaggctaacagctgctcaagctctctcacatccgtgggtaagagaaggaggggaagcatccgatatccccgtcgacatatctgtgttatcaaacatgcgtcagtttgtcaagtacagccgtttcaagcaattcgcgcttcgggctctggcgagcacccttaacgaggaagagctatcagatctgaaggatcagtttgatgcaattgatatcgataaaagtggatcgattagtatcgaggaaatgcgtcatgcccttgcaaaggatcttccctggagattgaagggtccccgtgtgctggagattattcaagcaattgacagcaacactgatgggctcgtggacttcaaggagtttgttgcggcaactctccatatccaccagatggcggagctcgactcagaaaggtggggcatacgctgccaagctgctttcagtaagtttgatcttgacggtgatggatatatcacgccggaggaactcagaatgcacactgggttgaagggatctatcgagccgctgctggaggaggccgacatcgacaaagacggcaagataagcctgtccgagttccgcaagctcctacggacagcgagcatgagcaacgtacccagcccaagggggcccccaaaccctcaggctctgtgaattccggctcggccactagggaggagcaagcttaggaagttgccatacaatagccatgtgttctttgggttcttcagagtgccatgtgatgtttctggtttttagcatccaggttatgtgtgcagtgcagccccgagtgagtttcgaagtaaatattcagtgctttctttttctttccggaagagtgagaggtggaggtcaaaatggtaggcaagactcgccttcttctttcctttacactgtacagtgatactgaaatatgtacgatttttattataactgttcgtcgcaataaagttatttggagaagtgaggat

SEQ ID NO: 203224 - DNA, 580 bp, Zea Mays
caaaaagctaaagacggaggcttggatgtcattcagacctaagtcttttggaatggacatgagcctacgcctggaaattactatttcgaggagaggtacgatttagtcaggttcataaagacggtccagaaggctggcctgtttgtacatatctgcatcggtcctacatttgtggcgagtggaacttcgggtatgggtatttctccatttcctgaaatcacctccgttaaaaatggagcattaccgtgtctccagtttggtttaagtatgtaccgggcatcagcttcaggacagacaactaacctttcaagacggccatgcagggagaaaattgtgggaatgatgaagagcgaaaacctctttgcatcccaaggtggcccaattatcctctctcaggcaagtataatctttttccttaggtttggtacaaaggaaatagctcccagcagcatgagcgtactattagaaaaaataaacaattcactaagagtaatatcgataactgcacttagcgtttaatgggtttctatagcagtcaacctaggttggcttacttacattttttgtgcctattaacttt

SEQ ID NO: 203225 - DNA, 2435 bp, Zea Mays
gaacagacaggggcgatcagaaaagacaagcagcgtcgtcacaacacaattcagaaatcgtcaagtcctatcgtgctcgccgaaagaccgccgcctcgaacggctcgacacgacgaccttcgctctctccgccaccgaatccaccacaaaaaccaccatatccacttgttggccggccggtcaagaagaccaaggacaagggagaaacgaggggtttagttgggcgcgcgggcgatctcttcagtaaggcgttgtgtggtggtggtgtttggacggagcggagatgtcgtcggcgatggtggagcgggcaaccagcgatatgctcatcggcccggactgggcgatgaacttggagatctgtgacatcctcaaccgcgaacccggacaagcaaaagatgtggtaaagtccctcaagaaacgcattgcacacaagaacccaaaagtccaacttcttgctctcacgttgctggagacgatgataaaaaattgtggggacgttgtgcatatggttgttgctgagagagacatacttcatgagatggtcaagatagtaaagaaaaggcatgattatcatgttaaagagaagattctcacgctgatagatacttggcaagaagtttttggtggtgcacgtgcaagatatccacaatattatgcagcatatgaggagctcttgccttacagaaattcagaacgcacgtggcatcatggatgttctttcagagatgctggatgctttagatccaggtaacagagaggggcttagacaggatgtcattgcagaccttgtggatcaatgccgttcttacaagcaaagagtagtgcagcttgtcaacagtacctcgaacgaggagttgctcaaccagggtctttctttgaatgatgatatgcagcgtgttctggcaaaacatgatgctattgatgcaggtctagcagttcgagtggagaagccgaaatctctgcagtcccaaattggaagttcttcaacaagaaagccagataccatggaagaaacaattcagaggccttcagcaagtacaactgccaccagtcagtctccctttgggattttagcacttcctgcacctccatccagtagttcaaaagcacctgcaatacctgcttctagtatcgacctacttagtggagatgattatgtcaaacccgaacctgcaaactccctagcacttgttcctgtcactgaatattcagctgcagacaagaatgtcttagcttttgctgatatgtttgaacaaaatacagccaacaatagcaaccataaccttccatattcttttctatcttcgacttcaaattctactatctctacatcacaaacatatcatgcaccggtgcgacctgtattgcctcagcattcagctgcttatccaaatggggccagatccaatgccattgtaccttatgatcagcaggcccaatcgaactctacaggttcgcggaatgggcaaacagcctatggaggaaatcaccaaaagcaagcactaaattatggcacaggtgatcaaaatggagacattccaccagcaccatggggaactaagagatccactaacccatttgacgacgatcagcttggtggaatggcagtgcaaccaaaaggcatgcaaccccaaccagtgcaacccagtcagcatgggaacaaattcatgtcagcaccaccaatgccgaggggacagccaggaagaatgcagttgcaacaggtgcctggtgctcagcttggcgctctacaaccaacacaggctacactgaacatgcagtacaggggcatgcatccatcgatgcaaatgaatcatggaatgggcatgtattcccaaccaacgttcggaggatattatggaatgaaccaaacacagctttacggcgttcatatgtctggttatggatatggtcagcaatctgggggctactatattccgaatgctgcatatgcctatactagtgcaaacgaacttgcccagaggatgaatgacctttcagttcaaaacggtgatccaaatggagccgcagcaaataagcagagcagacctgaggatgcactctttggtgatctcttgagcatcgccaagatgaagcaaaacaaacctgcagctggcaaggttggcggctaagtttgagtaaagaaggtacataattttatcttaattgccagcagcagaaacctttcctgacagcgcatataattattttgccacgttctatgcaatgccagatggcttctcgatgtaagctcatttggtagaaattcatattgggaactggagattaggatgcttgtggggagcctcatagcaaatatgtctataactctactatatatgaaattcttgagttctcagtagcaatatgtattgtcataatttccctctgcaaatattaaggcagaatcagagattcctgttctccctagccatata

SEQ ID NO: 203226 - DNA, 2594 bp, Zea Mays
gaacagacaggggcgatcagaaaagacaagcagcgtcgtcacaacacaattcagaaatcgtcaagtcctatcgtgctcgccgaaagaccgccgcctcgaacggctcgacacgacgaccttcgctctctccgccaccgaatccaccacaaaaaccaccatatccacttgttggccggccggtcaagaagaccaaggacaagggagaaacgaggggtttagttgggcgcgcgggcgatctcttcagtaaggcgttgtgtggtggtggtgtttggacggagcggagatgtcgtcggcgatggtggagcgggcaaccagcgatatgctcatcggcccggactgggcgatgaacttggagatctgtgacatcctcaaccgcgaacccggacaagcaaaagatgtggtaaagtccctcaagaaacgcattgcacacaagaacccaaaagtccaacttcttgctctcacgttgctggagacgatgataaaaaattgtggggacgttgtgcatatggttgttgctgagagagacatacttcatgagatggtcaagatagtaaagaaaaggcatgattatcatgttaaagagaagattctcacgctgatagatacttggcaagaagtttttggtggtgcacgtgcaagatatccacaatattatgcagcatatgaggagctcttgcgtgctggagtggtatttcctcaaagattgaatggttctgtgccaatcatcactcctccacagactcagcctctccaaaactatccctcatctttacacatttcacagcaggaggaacttgaattaccagtttcagatttccctgcattaagccttacagaaattcagaacgcacgtggcatcatggatgttctttcagagatgctggatgctttagatccaggtaacagagagatttcaggggcttagacaggatgtcattgcagaccttgtggatcaatgccgttcttacaagcaaagagtagtgcagcttgtcaacagtacctcgaacgaggagttgctcaaccagggtctttctttgaatgatgatatgcagcgtgttctggcaaaacatgatgctattgatgcaggtctagcagttcgagtggagaagccgaaatctctgcagtcccaaattggaagttcttcaacaagaaagccagataccatggaagaaacaattcagaggccttcagcaagtacaactgccaccagtcagtctccctttgggattttagcacttcctgcacctccatccagtagttcaaaagcacctgcaatacctgcttctagtatcgacctacttagtggagatgattatgtcaaacccgaacctgcaaactccctagcacttgttcctgtcactgaatattcagctgcagacaagaatgtcttagcttttgctgatatgtttgaacaaaatacagccaacaatagcaaccataaccttccatattcttttctatcttcgacttcaaattctactatctctacatcacaaacatatcatgcaccggtgcgacctgtattgcctcagcattcagctgcttatccaaatggggccagatccaatgccattgtaccttatgatcagcaggcccaatcgaactctacaggttcgcggaatgggcaaacagcctatggaggaaatcaccaaaagcaagcactaaattatggcacaggtgatcaaaatggagacattccaccagcaccatggggaactaagagatccactaacccatttgacgacgatcagcttggtggaatggcagtgcaaccaaaaggcatgcaaccccaaccagtgcaacccagtcagcatgggaacaaattcatgtcagcaccaccaatgccgaggggacagccaggaagaatgcagttgcaacaggtgcctggtgctcagcttggcgctctacaaccaacacaggctacactgaacatgcagtacaggggcatgcatccatcgatgcaaatgaatcatggaatgggcatgtattcccaaccaacgttcggaggatattatggaatgaaccaaacacagctttacggcgttcatatgtctggttatggatatggtcagcaatctgggggctactatattccgaatgctgcatatgcctatactagtgcaaacgaacttgcccagaggatgaatgacctttcagttcaaaacggtgatccaaatggagccgcagcaaataagcagagcagacctgaggatgcactctttggtgatctcttgagcatcgccaagatgaagcaaaacaaacctgcagctggcaaggttggcggctaagtttgagtaaagaaggtacataattttatcttaattgccagcagcagaaacctttcctgacagcgcatataattattttgccacgttctatgcaatgccagatggcttctcgatgtaagctcatttggtagaaattcatattgggaactggagattaggatgcttgtggggagcctcatagcaaatatgtctataactctactatatatgaaattcttgagttctcagtagcaatatgtattgtcataatttccctctgcaaatattaaggcagaatcagagattcctgttctccctagccatata

SEQ ID NO: 203227 - DNA, 2504 bp, Zea Mays
gaacagacaggggcgatcagaaaagacaagcagcgtcgtcacaacacaattcagaaatcgtcaagtcctatcgtgctcgccgaaagaccgccgcctcgaacggctcgacacgacgaccttcgctctctccgccaccgaatccaccacaaaaaccaccatatccacttgttggccggccggtcaagaagaccaaggacaagggagaaacgaggggtttagttgggcgcgcgggcgatctcttcagtaaggcgttgtgtggtggtggtgtttggacggagcggagatgtcgtcggcgatggtggagcgggcaaccagcgatatgctcatcggcccggactgggcgatgaacttggagatctgtgacatcctcaaccgcgaacccggacaagcaaaagatgtggtaaagtccctcaagaaacgcattgcacacaagaacccaaaagtccaacttcttgctctcacgttgctggagacgatgataaaaaattgtggggacgttgtgcatatggttgttgctgagagagacatacttcatgagatggtcaagatagtaaagaaaaggcatgattatcatgttaaagagaagattctcacgctgatagatacttggcaagaagtttttggtggtgcacgtgcaagatatccacaatattatgcagcatatgaggagctcttgcgtgctggagtggtatttcctcaaagattgaatggttctgtgccaatcatcactcctccacagactcagcctctccaaaactatccctcatctttacacatttcacagcaggaggaacttgaattaccagtttcagatttccctgcattaagccttacagaaattcagaacgcacgtggcatcatggatgttctttcagagatgctggatgctttagatccaggtaacagagaggggcttagacaggatgtcattgcagaccttgtggatcaatgccgttcttacaagcaaagagtagtgcagcttgtcaacagtacctcgtctagcagttcgagtggagaagccgaaatctctgcagtcccaaattggaagttcttcaacaagaaagccagataccatggaagaaacaattcagaggccttcagcaagtacaactgccaccagtcagtctccctttgggattttagcacttcctgcacctccatccagtagttcaaaagcacctgcaatacctgcttctagtatcgacctacttagtggagatgattatgtcaaacccgaacctgcaaactccctagcacttgttcctgtcactgaatattcagctgcagacaagaatgtcttagcttttgctgatatgtttgaacaaaatacagccaacaatagcaaccataaccttccatattcttttctatcttcgacttcaaattctactatctctacatcacaaacatatcatgcaccggtgcgacctgtattgcctcagcattcagctgcttatccaaatggggccagatccaatgccattgtaccttatgatcagcaggcccaatcgaactctacaggttcgcggaatgggcaaacagcctatggaggaaatcaccaaaagcaagcactaaattatggcacaggtgatcaaaatggagacattccaccagcaccatggggaactaagagatccactaacccatttgacgacgatcagcttggtggaatggcagtgcaaccaaaaggcatgcaaccccaaccagtgcaacccagtcagcatgggaacaaattcatgtcagcaccaccaatgccgaggggacagccaggaagaatgcagttgcaacaggtgcctggtgctcagcttggcgctctacaaccaacacaggctacactgaacatgcagtacaggggcatgcatccatcgatgcaaatgaatcatggaatgggcatgtattcccaaccaacgttcggaggatattatggaatgaaccaaacacagctttacggcgttcatatgtctggttatggatatggtcagcaatctgggggctactatattccgaatgctgcatatgcctatactagtgcaaacgaacttgcccagaggatgaatgacctttcagttcaaaacggtgatccaaatggagccgcagcaaataagcagagcagacctgaggatgcactctttggtgatctcttgagcatcgccaagatgaagcaaaacaaacctgcagctggcaaggttggcggctaagtttgagtaaagaaggtacataattttatcttaattgccagcagcagaaacctttcctgacagcgcatataattattttgccacgttctatgcaatgccagatggcttctcgatgtaagctcatttggtagaaattcatattgggaactggagattaggatgcttgtggggagcctcatagcaaatatgtctataactctactatatatgaaattcttgagttctcagtagcaatatgtattgtcataatttccctctgcaaatattaaggcagaatcagagattcctgttctccctagccatata

SEQ ID NO: 203228 - DNA, 2143 bp, Zea Mays
taatgctaatgctacattaggtctcttttcagcattgtagaagactgcataaatgcctttgtgggcaaccaaacatgaacaatctacattgcaaagtctagagcagttattggacacagctgggaattgtgaccctctatgctcggctgatgaagttagctcacaatactttgaagctaactacaaaccaaaaaatgaccttctaaaagctttaactatcattggcacagccttgactggagcagccgcaataaaccattcctgggttgctgctaatcaggacattgcaatggtgttggtttttgctattggctatgcaggtatcgtttttgaggaatcactagcatttaacaaaagtggagttgcgttattgatggctgtctgcctatgggttatcagaggcattggggctccctcgactgatgtagctgttcaagagttgagccagtcaacttctgaagttagtgaaattgtgtttttcttgcttggtgcaatgactattgtggaaattgttgatgcacatcaaggttttaagctggtgactgataatatatctactcgaaacccaaaaactcttctgtgggtgattggtattgtaactttcttcctgagttcgatcctcgacaacctgacttccactattgtgatggtatccttgcttcgaaaactagtacctccatcagaatatagaaaattgttaggtgctgttgttgtaatagcagcgaatgctggcggtgcatggacaccaattggtgatgtgacaaccactatgttgtggattcatggtcagattacaacattgaaaataatgcagggcttgtttattccctccactgtttcgttggctgtcccactggctctgatgtccctcaccagtgaagcaaatgggtcatctgagaaatcttccagcttgctgtcatcagagcaggtggctcctcggggacaacttgtactaggtgttggaattggagcattaatgtttgttccagtctttaaagctctcactggtctgccacctttcatgggtatgctacttggtcttgggattctctggatcctgacagatgcaatacattacggagactctgaaaggcagcggctgaaagttccacaagcactatcacggattgatacacaaggaattttattcttcttaggtattcttttatcagttggcagcttggaatctgcagggattttgaggcagttagcaaattatcttgatgccaatattccaaatgctgatcttattgctagtgcaattggtgtggcatcagcaattatagacaatgttccacttgttgctgcaaccatggggatgtatgacctgacttcgttccctcaagactcggacttctggcagcttgttgcattctgtgcgggtactggtggttcaatgcttatcattggctccgcagcaggagttgcttttatgggagtggagaaggtggatttcttttggtattttcgcaaggtgagcggttttgcctttgcaggttatgcagctggtataatctcttaccttgctgttcaaaatctccatctatcccttcccacgtcgctggttgagatcccttttatttcgggatcataaaagcttggcctttgtggtcattttagaatgatcacactctacatatggaggtgaacatcattattgtttccatatcttatgtaaggtccagtgtgtcggcatgtagagtattcagaatttgggggataagacagccctgagcttcaaggccagacatcagttttggacaggcttatctcgtgctgatgaactttagggtagggttgagctccttactagggggctgtttggttcgtggctaaatatgccacactttgcctaaggttagtcgttcgaattgaagaattaaccttaggcaaaaaagttaagcaaagtgtggcaagttagacatcaaaccaaacaagccctagaactgtgggttcgaaccaaagtatgccactctggatatttgtgaacctactcggcaaacaaaggagcaacttagaaatgtgcaattttgtaagaaacaatcccttgtaagctaagagtgtaataagatacagaaatcttgtataactgctgtctggtaatctcattgatggtcttgttaggcagctgcatagttcaaaa

SEQ ID NO: 203229 - DNA, 2265 bp, Zea Mays
ctattcgagtgaaagcggcccccaatttctactgtaagcagcaatggcgctctcctgttacttgctcgccggcgcccgggcggcagcctccccttccttctcatcctccgctgccatccgccggcgggaccaccgtctgctgaccttgtccgtggttccgctttcgctctctcagcgatgtcgccacggcctccgcgtgtgctgcgcctcctccacctcttcctcatctccgccgccggcaactcccgaggagcccgacgactacgagttattggacacagctgggaattgtgaccctctatgctcggctgatgaagttagctcacaatactttgaagctaactacaaaccaaaaaatgaccttctaaaagctttaactatcattggcacagccttgactggagcagccgcaataaaccattcctgggttgctgctaatcaggtatcgtttttgaggaatcactagcatttaacaaaagtggagttgcgttattgatggctgtctgcctatgggttatcagaggcattggggctccctcgactgatgtagctgttcaagagttgagccagtcaacttctgaagttagtgaaattgtgtttttcttgcttggtgcaatgactattgtggaaattgttgatgcacatcaaggttttaagctggtgactgataatatatctactcgaaacccaaaaactcttctgtgggtgattggtattgtaactttcttcctgagttcgatcctcgacaacctgacttccactattgtgatggtatccttgcttcgaaaactagtacctccatcagaatatagaaaattgttaggtgctgttgttgtaatagcagcgaatgctggcggtgcatggacaccaattggtgatgtgacaaccactatgttgtggattcatggtcagattacaacattgaaaataatgcagggcttgtttattccctccactgtttcgttggctgtcccactggctctgatgtccctcaccagtgaagcaaatgggtcatctgagaaatcttccagcttgctgtcatcagagcaggtggctcctcggggacaacttgtactaggtgttggaattggagcattaatgtttgttccagtctttaaagctctcactggtctgccacctttcatgggtatgctacttggtcttgggattctctggatcctgacagatgcaatacattacggagactctgaaaggcagcggctgaaagttccacaagcactatcacggattgatacacaaggaattttattcttcttaggtattcttttatcagttggcagcttggaatctgcagggattttgaggcagttagcaaattatcttgatgccaatattccaaatgctgatcttattgctagtgcaattggtgtggcatcagcaattatagacaatgttccacttgttgctgcaaccatggggatgtatgacctgacttcgttccctcaagactcggacttctggcagcttgttgcattctgtgcgggtactggtggttcaatgcttatcattggctccgcagcaggagttgcttttatgggagtggagaaggtggatttcttttggtattttcgcaaggtgagcggttttgcctttgcaggttatgcagctggtataatctcttaccttgctgttcaaaatctccatctatcccttcccacgtcgctggttgagatcccttttatttcgggatcataaaagcttggcctttgtggtcattttagaatgatcacactctacatatggaggtgaacatcattattgtttccatatcttatgtaaggtccagtgtgtcggcatgtagagtattcagaatttgggggataagacagccctgagcttcaaggccagacatcagttttggacaggcttatctcgtgctgatgaactttagggtagggttgagctccttactagggggctgtttggttcgtggctaaatatgccacactttgcctaaggttagtcgttcgaattgaagaattaaccttaggcaaaaaagttaagcaaagtgtggcaagttagacatcaaaccaaacaagccctagaactgtgggttcgaaccaaagtatgccactctggatatttgtgaacctactcggcaaacaaaggagcaacttagaaatgtgcaattttgtaagaaacaatcccttgtaagctaagagtgtaataagatacagaaatcttgtataactgctgtctggtaatctcattgatggtcttgttaggcagctgcatagttcaaaa

SEQ ID NO: 203230 - DNA, 2235 bp, Zea Mays
ctattcgagtgaaagcggcccccaatttctactgtaagcagcaatggcgctctcctgttacttgctcgccggcgcccgggcggcagcctccccttccttctcatcctccgctgccatccgccggcgggaccaccgtctgctgaccttgtccgtggttccgctttcgctctctcagcgatgtcgccacggcctccgcgtgtgctgcgcctcctccacctcttcctcatctccgccgccggcaactcccgaggagcccgacgactacgagttattggacacagctgggaattgtgaccctctatgctcggctgatgaagttagctcacaatactttgaagctaactacaaaccaaaaaatgaccttctaaaagctttaactatcattggcacagccttgactggagcagccgcaataaaccattcctgggttgctgctaatcaggacattgcaatggtgttggtttttgctattggctatgcaggtatcgtttttgaggaatcactagcatttaacaaaagtggagttgcgttattgatggctgtctgcctatgggttatcagaggcattggggctccctcgactgatgtagctgttcaagagttgagccagtcaacttctgaagttagtgaaattgtgtttttcttgcttggtgcaatgactattgtggaaattgttgatgcacatcaaggttttaagctggtgactgataatatatctactcgaaacccaaaaactcttctgtgggtgattggtattgtaactttcttcctgagttcgatcctcgacaacctgacttccactattgtgatgcagcgaatgctggcggtgcatggacaccaattggtgatgtgacaaccactatgttgtggattcatggtcagattacaacattgaaaataatgcagggcttgtttattccctccactgtttcgttggctgtcccactggctctgatgtccctcaccagtgaagcaaatgggtcatctgagaaatcttccagcttgctgtcatcagagcaggtggctcctcggggacaacttgtactaggtgttggaattggagcattaatgtttgttccagtctttaaagctctcactggtctgccacctttcatgggtatgctacttggtcttgggattctctggatcctgacagatgcaatacattacggagactctgaaaggcagcggctgaaagttccacaagcactatcacggattgatacacaaggaattttattcttcttaggtattcttttatcagttggcagcttggaatctgcagggattttgaggcagttagcaaattatcttgatgccaatattccaaatgctgatcttattgctagtgcaattggtgtggcatcagcaattatagacaatgttccacttgttgctgcaaccatggggatgtatgacctgacttcgttccctcaagactcggacttctggcagcttgttgcattctgtgcgggtactggtggttcaatgcttatcattggctccgcagcaggagttgcttttatgggagtggagaaggtggatttcttttggtattttcgcaaggtgagcggttttgcctttgcaggttatgcagctggtataatctcttaccttgctgttcaaaatctccatctatcccttcccacgtcgctggttgagatcccttttatttcgggatcataaaagcttggcctttgtggtcattttagaatgatcacactctacatatggaggtgaacatcattattgtttccatatcttatgtaaggtccagtgtgtcggcatgtagagtattcagaatttgggggataagacagccctgagcttcaaggccagacatcagttttggacaggcttatctcgtgctgatgaactttagggtagggttgagctccttactagggggctgtttggttcgtggctaaatatgccacactttgcctaaggttagtcgttcgaattgaagaattaaccttaggcaaaaaagttaagcaaagtgtggcaagttagacatcaaaccaaacaagccctagaactgtgggttcgaaccaaagtatgccactctggatatttgtgaacctactcggcaaacaaaggagcaacttagaaatgtgcaattttgtaagaaacaatcccttgtaagctaagagtgtaataagatacagaaatcttgtataactgctgtctggtaatctcattgatggtcttgttaggcagctgcatagttcaaaa

SEQ ID NO: 203231 - DNA, 1984 bp, Zea Mays
ctcgccgtcgcctcctctttttttccccctcctcgacggctcctcctcacaggctcacagcctcacactcacgcggagagcgctcgcgcgggcgcacacgcggaggggacgttcacaggagggggagggaggagatgccggggagccagaacggggggccgaggcctcggccggtcaaagtcgagaccatccacgatcttgcgcgcgccggcgacctcgccggcgtccagaggaagctgctggagaacccctccctcctcaatgacaaaaatcccgtgatgtgtcaaacaccacttcatgttgctgctggctacaataatacagaaatagtcaagttcttgcttaaccagcaaggtacagaaacagttgatctggaggcaaagaacatgtatggggagactcctctgcatatggcagtgaagaacagttcttgtggatcaacaaatctactccttgaacatggtgcacacatagaagccaaagccaataatggcatgacaccattgcatttagctgtctggcatgcaattcaagctggagacttcagcacagttagcgtgttactaagctacaaccctgattgctttgtgaaagatgatgtactacttgattcacagcaaaatgcccttaaatcatattccaggaggagctggtagcgagaagctgctgaaactcctcactcatcatatggaagagcaaagaaaacggaaagctctcatgtcatgcctcgaagggaaagcaatgtcagagtttgaagaggcaatgtcacaaattgttggattgcaggagctaaaaatgcaattgcgccgatgggcacgaggaatgttttttgatgagaagcgacgggctatgggcttggggattgctaaaaggagagctccccatatggcatttcttggcaatccaggaactggcaaaactatggttgctcgaattcttggaaagctcctccacatggttggaattctccctactgacaaagtaactgaagttcagcgaactgatcttgttggagaatttgtggggcatactggaccaaagactaggaggaagatacatgatgcagagggaggtattctcttcgtggatgaagcttacaggttgataccaatgcaaaaatccgatgacaaggattatggtttagaagccttggaggagataatgtctgtaatggacagtggcaagatagttgtcgtatttgctgggtactgtgagccaatgaagcgagtcatcgcctcgaatgatggcttctgcaggcgggtcacgaaattcttctatttcgatgatttcagtacgacagaactagcagagatcctacatatgaagatgaagagtccaagtgactgtagcttgctttacgggtttaagctgcacccaagctgcagcattgaagccattggagagctgattgccagggagatcactgaagagcagaggaagcagatgaatggaggccttgtagacacgctgctcatcaatgcccgcgagaacctggattcgcggcttgatttcagctgcaacgatgccgatactatgatcacgatcacgttggaagacctggaggcagggcttcgtcagatttccagacaacgtcacctgcagtgacatgtaaatttaggagaattttttctcgatgatctcatgcttgtctccaagggcgaagttatggctgtatcgtctcatccaacgtttttggctattctgactgtgttgtatctagtcgttgctatatagcagtaaaatgcatgtggtatatacaattatacatcatgccctaacattatttgacatctgtggaatagccagtaccacatacggatttcagtacgtgcataatcaattcagatttgacggttgaagtgattgaatttgaatcctaactaaaccttgacgaccgatttttctttttacgaatccattcctttacatcactccattgtcatctgatgacattcactttcaaaaaaaaaaaaaggagagagaa

SEQ ID NO: 203232 - DNA, 1982 bp, Zea Mays
ccctggtcccgtcctcttcagggcctcgccgtcgcctcctctttttttccccctcctcgacggctcctcctcacaggctcacagcctcacactcacgcggagagcgctcgcgcgggcgcacacgcggaggggacgttcacaggagggggagggaggagatgccggggagccagaacggggggccgaggcctcggccggtcaaagtcgagaccatccacgatcttgcgcgcgccggcgacctcgccggcgtccagaggaagctgctggagaacccctccctcctcaatgacaaaaatcccgtgatgtgtcaaacaccacttcatgttgctgctggctacaataatacagaaatagtcaagttcttgcttaaccagcaaggtacagaaacagttgatctggaggcaaagaacatgtatggggagactcctctgcatatggcagtgaagaacagttcttgtggatcaacaaatctactccttgaacatggtgcacacatagaagccaaagccaataatggcatgacaccattgcatttagctgtctggcatgcaattcaagctggagacttcagcacagttagcgtgttactaagctacaaccctgattgctttgtgaaagatgatgaaggcaaaatgcccttaaatcatattccaggaggagctggtagcgagaagctgctgaaactcctcactcatcatatggaagagcaaagaaaacggaaagctctcatgtcatgcctcgaagggaaagcaatgtcagagtttgaagaggcaatgtcacaaattgttggattgcaggagctaaaaatgcaattgcgccgatgggcacgaggaatgttttttgatgagaagcgacgggctatgggcttggggattgctaaaaggagagctccccatatggcatttcttggcaatccaggaactggcaaaactatggttgctcgaattcttggaaagctcctccacatggttggaattctccctactgacaaagtaactgaagttcagcgaactgatcttgttggagaatttgtggggcatactggaccaaagactaggaggaagagggaggtattctcttcgtggatgaagcttacaggttgataccaatgcaaaaatccgatgacaaggattatggtttagaagccttggaggagataatgtctgtaatggacagtggcaagatagttgtcgtatttgctgggtactgtgagccaatgaagcgagtcatcgcctcgaatgatggcttctgcaggcgggtcacgaaattcttctatttcgatgatttcagtacgacagaactagcagagatcctacatatgaagatgaagagtccaagtgactgtagcttgctttacgggtttaagctgcacccaagctgcagcattgaagccattggagagctgattgccagggagatcactgaagagcagaggaagcagatgaatggaggccttgtagacacgctgctcatcaatgcccgcgagaacctggattcgcggcttgatttcagctgcaacgatgccgatactatgatcacgatcacgttggaagacctggaggcagggcttcgtcagatttccagacaacgtcacctgcagtgacatgtaaatttaggagaattttttctcgatgatctcatgcttgtctccaagggcgaagttatggctgtatcgtctcatccaacgtttttggctattctgactgtgttgtatctagtcgttgctatatagcagtaaaatgcatgtggtatatacaattatacatcatgccctaacattatttgacatctgtggaatagccagtaccacatacggatttcagtacgtgcataatcaattcagatttgacggttgaagtgattgaatttgaatcctaactaaaccttgacgaccgatttttctttttacgaatccattcctttacatcactccattgtcatctgatgacattcactttcaaaaaaaaaaaaaggagagagaa

SEQ ID NO: 203233 - DNA, 2164 bp, Zea Mays
gaaagccctggtcccgtcctcttcagggcctcgccgtcgcctcctctttttttccccctcctcgacggctcctcctcacaggctcacagcctcacactcacgcggagagcgctcgcgcgggcgcacacgcggaggggacgttcacaggagggggagggaggagatgccggggagccagaacggggggccgaggcctcggccggtcaaagtcgagaccatccacgatcttgcgcgcgccggcgacctcgccggcgtccagaggaagctgctggagaacccctccctcctcaatgacaaaaatcccgtgatgtgtcaaacaccacttcatgttgctgctggctacaataatacagaaatagtcaagttcttgcttaaccagcaaggtacagaaacagttgatctggaggcaaagaacatgtatggggagactcctctgcatatggcagtgaagaacagttcttgtggatcaacaaatctactccttgaacatggtgcacacatagaagccaaagccaataatggcatgacaccattgcatttagctgtctggcatgcaattcaagctggagacttcagcacagttagcgtgttactaagctacaaccctgattgctttgtgaaagatgatgtactacttgattcacagaaggcaaaatgcccttaaatcatattccaggaggagctggtagcgagaagctgctgaaactcctcactcatcatatggaagagcaaagaaaacggaaagctctcatgtcatgcctcgaagggaaagcaatgtcagagtttgaagaggcaatgtcacaaattgttggattgcaggagctaaaaatgcaattgcgccgatgggcacgaggaatgttttttgatgagaagcgacgggctatgggcttggggattgctaaaaggagagctccccatatggcatttcttggcaatccaggaactggcaaaactatggttgctcgaattcttggaaagctcctccacatggttggaattctccctactgacaaagtaactgaagttcagcgaactgatcttgttggagaatttgtggggcatactggaccaaagactaggaggaaggtattaatcctctcttttcttttcatcagaaaggctccgtcagctgcacaaatttcagtttcagggaaattgcgaaacaagttctgaacttatttctattctgtgttctaccttacgcatacattgttaccgtgaccacgacaacagatacatgatgcagagggaggtattctcttcgtggatgaagcttacaggttgataccaatgcaaaaatccgatgacaaggattatggtttagaagccttggaggagataatgtctgtaatggacagtggcaagatagttgtcgtatttgctgggtactgtgagccaatgaagcgagtcatcgcctcgaatgatggcttctgcaggcgggtcacgaaattcttctatttcgatgatttcagtacgacagaactagcagagatcctacatatgaagatgaagagtccaagtgactgtagcttgctttacgggtttaagctgcacccaagctgcagcattgaagccattggagagctgattgccagggagatcactgaagagcagaggaagcagatgaatggaggccttgtagacacgctgctcatcaatgcccgcgagaacctggattcgcggcttgatttcagctgcaacgatgccgatactatgatcacgatcacgttggaagacctggaggcagggcttcgtcagatttccagacaacgtcacctgcagtgacatgtaaatttaggagaattttttctcgatgatctcatgcttgtctccaagggcgaagttatggctgtatcgtctcatccaacgtttttggctattctgactgtgttgtatctagtcgttgctatatagcagtaaaatgcatgtggtatatacaattatacatcatgccctaacattatttgacatctgtggaatagccagtaccacatacggatttcagtacgtgcataatcaattcagatttgacggttgaagtgattgaatttgaatcctaactaaaccttgacgaccgatttttctttttacgaatccattcctttacatcactccattgtcatctgatgacattcactttcaaaaaaaaaaaaaggagagagaa

SEQ ID NO: 203234 - DNA, 1417 bp, Zea Mays
gtgtttttaccttggatgaggaatagtactgcatgaaggttgattcaactgcttgcgaatcatcaagacgagttaccaaccttaagtcccaggtgtcatcattggagagagagaatgttgaacttaggaggcagattaatgaattatccatgaagcttcaaatcgctggacaagggaaaaatgagactttgtacaagcctggtccttttggagctgtcaaggctttgagaacaaatccaactgtaatccctgataactctgttaaccccaggttggccaagatattggaagaggttgctgtgaaaaaggaactcattgttgcgttggcaaacaccaatgtgagggagatgcttgaagtttggtttagcaatatcaaacgagttggtattccaaactacctggttgtggcattggatgataatatagaaagcttatgcaaatctaaaggggtgccagtctaccggcgtgatcctgatgaaggcatcgacaacattgcaaaaactggtggaaaccatgccgtttctggactcaagtttcgtgttttaagggagttcttgcaacttgggtatagtattctcctatctgacattgatattattttcttgaggaatccatttgatcatcttcatagagattctgatgtggagtccatgagtgatggccacaacaacatgacagcgtatggtttcaacgacgtgttcgacgaaccttctatgggttgggccagatatgctcacacgatgcggatttgggtgtacaactctggatttttctatataagaccaacggttccttctattgaacttcttgatcgtgtggctggccgtctttctcgtgagccaaagtcatgggaccaggcagttttcaacgaggagctgttcttcccgtcccatcctggttatgaaggcctccatgcatccaggagaaccatggatttttatcttttcatgaacagcaaagtcctcttcaagacagtgaggaaagacgccgggctcaagaagctaaagccagtgattgtgcatttgaactaccaccctaacaaactagagcgaatgaaagcggttatcgagttctatgtcaacggcaaacaagatgcactggatcatttccctgacgggtcagaatgaggaaattacagatagttgcgggtaaagaaacctataccctctgtatcctactcattttggggtgttctggcgtttggatctacatgtctcagatgtgggatctccacacgtgcgagaatgtttggcgagtgcaacatggatggatgcattggctttgaggtaaccacgatgtatcctttttcttgcagtttcagttggtaagttctaggtgttaagggcagtcgctctgtctgtttcttttattttcttgctcgttagtactattttagatcgcttgccactagtttggt

SEQ ID NO: 203235 - DNA, 1562 bp, Zea Mays
ccgttgcggcttgtgtttttaccttggatgaggaatagtactgcatgaaggttgattcaactgcttgcgaatcatcaagacgagttaccaaccttaagtcccaggtgtcatcattggagagagagaatgttgaacttaggaggcagattaatgaattatccatgaagcttcaaatcgctggacaagggaaaaatgagactttgtacaagcctggtccttttggagctgtcaaggctttgagaacaaatccaactgtaatccctgataactctgttaaccccaggttggccaagatattggaagaggttgctgtgaaaaaggaactcattgttgcgttggcaaacaccaatgtgagggagatgcttgaagtttggtttagcaatatcaaacgagttggtattccaaactacctggttgtggcattggatgataatatagaaagcttatgcaaatctaaaggggtgccagtctaccggcgtgatcctgatgaaggcatcgacaacattgcaaaaactggtggaaaccatgccgtttctggactcaagtttcgtgttttaagggagttcttgcaacttgggtatagtattctcctatctgacattgatattattttcttgaggaatccatttgatcatcttcatagagattctgatgtggagtccatgagtgatggccacaacaacatgacagcgtatggtttcaacgacgtgttcgacgaaccttctatgggttgggccagatatgctcacacgatgcggatttgggtgtacaactctggatttttctatataagaccaacggttccttctattgaacttcttgatcgtgtggctggccgtctttctcgtgagccaaagtcatgggaccaggcagttttcaacgaggagctgttcttcccgtcccatcctggttatgaaggcctccatgcatccaggagaaccatggatttttatcttttcatgaacagcaaagtcctcttcaagacagtgaggaaagacgccgggctcaagaagctaaagccagtgattgtgcatttgaactaccaccctaacaaactagagcgaatgaaagcggttatcgagttctatgtcaacggcaaacaagatgcactggatcatttccctgacgggtcagaatgaggaaattacagatagttgcgggtaaagaaacctataccctctgtatcctactcattttggggtgttctggcgtttggatctacatgtctcagatgtgggatctccacacgtgcgagaatgtttggcgagtgcaacatggatggatgcattggctttgaggtatttggatatctccttggtctctagtccctactaacctcaaccgttctgtagcaaatttgtacaagcttagatagatggctcatcacgttttttccctttttccgtacaattttttgaggttcgaattttggaagtcgaggcggtttgttctggactggtgatacttttgatgctggtgtttcttgtgtggtggtttattgcttgtggtttgagaagcttttacggtttcattttttaatgaaacaatgttgtgggcaggat

SEQ ID NO: 203236 - DNA, 1454 bp, Zea Mays
ctagtgaactgagaccacacaaacaaggcacggagctgtcggcatgaatcacgttctagtgttctacagttcgtcatagttcccgtgatggtcgactgattgacactgccaacctcccaacttcccaaatatatcgtcgtcggtcaatgtcgacgagctcgcagtgcacgctcatggaaggcgctatctcccttcctcgcaacacaagcagaattgccgtggttaccggcgcgaacagaggtatcgggctagaggtgtgccggcagctggctggcaatggcgtcaccgtcgtcttgacagcagtggacgaggagctaggcgcgaaagccgtcggcaatctccaagggctagctctctccgatgttctttctcaccagctggatatcacggatgcttccagcatcgctcggttggccaacttcttgaaggcccgattcgggaagttggatatcctggtcaataatgctgcggttgctggggtcgtgtactctcaagatcatttggatgatctagaaccgagagaggaaaagggatcagaggcttgaatggctgtggaggaactgccgggagacctaccatgctgcaaaggaatgcctgcagacaaactactacggcacaaagcatgtgatcgaagccttgctgcctctgctgaaagcctccgatgatggaagaatcgtcaatatatcctccgactttgggttgttaagggtgccttcttaactcagtactcgccactcaacaattggatcagtgtggtcgtcagtcgtcctaattgaagttcttcaacacagcatttcagaaacgaggatctgaagcaagtgctgaacgacgtcggcaacctcaccgaggagcggctggacgaactgctggaccagttcctgagagacttcaaggtcggcacggcagaagcgcgcgggtggccagtggcgttcgcggcgtacaaggtgagcaaggcggccgtgaacgcgtactcgaggatgctggcggcgaagcagcccgcgctgcgcgttaactgcgcgcatcccggctacgtcaagactgacataaccttacactcggggctcctggcgccggaggagggcgcgagtaatgtggtgaaggtggcgctgctgccggacggcggggtgaccggcgccttctttgaggagggcaatgagctggcctccttcgtgtgatgtcaggatcggcctggttcgctagctgcggctgtttgccatcgcgtgagctcacggagtgtttggacccctcggtctgatgtttaagtgtgtggtagcaggatgcaagacgattctggtaataaactgattatgtttgtgaacggtgataacctgatgatgtatgtgttgtaaatttagagaacggtgataacctgatgatgtatgtgttgtaaatttagagaaataagtgacatgcttccttcagatttaaataaattaaatattctaattccgaat

SEQ ID NO: 203237 - DNA, 2065 bp, Zea Mays
gtcattatggatgaatgctatcagtgatgctcttctatgtgtcctgcaagttgatactttatctctatacaatgtaactggtgaaattgtttgtattcccttaccttatgctgtttcatcaatatggccactccctttcggtcttctacttcagaaatcaactgatggaggtcacatggtgtcatcctcgagttcactgttaaatgcaagggatttaaatcgtcctagcaaggaatatggattgacctacaatattccattccaagcaaacatcttggagacagacaacaaagctaatggcgccattatctcgtcacacctcatcttgaaacatccatttgaagagcctcaggcaacatatgttgaagaaaaggacaaactaactatgatgagagattttgatgaaaaaactatctggacaagtgatgtgatacctctaatagcatcatatcataaagggaagtttcagcattctgtctggcaaattgacggtgctagttaccaggaagcaatgaacgaaaatacaatgctacctgtcgatatttcttcacataaatgtgcattccgcaagatatggcaagggaaatgctcccactctgctgctagcaaggtttttttggcaactgatattgatgggatgccgataattagttttttactgcatgagcaaaaaatattgcttgctgtaaggattcaagttgatgatgctactgaagaagcttttggtgatattaagcctcacatgagctggaacattcctgcatttgctgctgcgccagttgttgtgactcgtccaagagtacgagttggagttcttccctttacagacatccttgttttgagttcagacaatgatctacttctctattctgggaagcagtgcctctgcagatatactctccctaatgaattgggaaaggggttcttttcaaatcatgagctaaattcagatatttcagatacttactctgatctgaagatcacaagcatagctgatgctgttgaagggcgtataaatgtgacatgcagtaatggcttgatgctcagatgttcgttgcgcaaaaatccttcctcttctttggatgaacatagttcagatgtgtcatataatattcggttcatgagagaaacattggagacattgcatgccctatatgagaacctcaagcttaatattttgcggaaagaggatctaggatgtctcgcttcattgttatgtactgttgcttcatctctgggtgaacatagttatgttgattattattgccgtgactttccactcaacttgactgaatccccatccctagtctcttcaaattctttaacaactccaccgtccctgtttcgttggtttgaatattgtctacgtcatggtttgaactccgcaaagctggaagacattcctactctaatgcgcaaacagaaagtttctgccgtgagttggagtaggaaggtgttgtcattctatagtttgttgttaggagcagaaaggaaaggcaaaaatctctcttctggtgtgtattgtgaagttgccagtggttcagcgagaaacactgaagaacttactgttctggctatggttgctgaaaagtttggtcatcggcagttggatttgttaccagttggtgtatctcttgtgcttcgtcatgcactggacaaatgccgtgactccccacctgatgattggcctgcaactgcttatgttcttgttggcagggaagacctagctacggcaaagatggggacagttaggaaagaaaacctgttgtggaacaatgataatttgacatcaatgtcagtcccttatatgctacatctgcaacctgtaatcataccgacaactgcacctgacatccctgcatcagaagttttgaattctgatgattcagattctgtctataaatctgttgaggatggcatggaacatatctttacttcaacaacacaactccgatttggtcatgatttgcgcttgaatgaggttagacgcctcttatgctcagcaaggcctgtgcctatacaaacacctactaatcctagcgtgtcggatcaagacctacatcag

SEQ ID NO: 203238 - DNA, 2852 bp, Zea Mays
atggctccaggctcattaaaaataccctgccccaaaccaaaatccgcggcgcccaaaattttccctccgtcgctagggtttcgtcctatagcaggaaaccgtttgaagcgcccaaagggacggcagcttgccagctttcgcctcactccgccaatagtccacaccgcgctccgcctgctccccggcgccgactcgtttcccctcctccttgacgccgcggccgccagcagtgggatcatggcttcggtcggttcgcggcggctaacggtgctgcgggagttccgccctcacgggctcgcagtcgaggaagccgacggccagggcgtccctggggcgccaccgccgcaagactacgactacttcctctttgaccctgcactcgccatttcccccacccctgaccccagcgatgaggcctcctcttctggtgcagacggcgaccacgagctcttcatccgtgacaatcagataatatggagtaatggttctcgagttcacaaaagatatgtatcacctaatacagtcattatggtgaaattgtttgtattcccttaccttatgctgtttcatcaatatggccactccctttcggtcttctacttcagaaatcaactgatggaggtcacatggtgtcatcctcgagttcactgttaaatgcaagggatttaaatcgtcctagcaaggaatatggattgacctacaatattccattccaagcaaacatcttggagacagacaacaaagctaatggcgccattatctcgtcacacctcatcttgaaacatccatttgaagagcctcaggcaacatatgttgaagaaaaggacaaactaactatgatgagagattttgatgaaaaaactatctggacaagtgatgtgatacctctaatagcatcatatcataaagggaagtttcagcattctgtctggcaaattgacggtgctagttaccaggaagcaatgaacgaaaatacaatgctacctgtcgatatttcttcacataaatgtgcattccgcaagatatggcaagggaaatgctcccactctgctgctagcaaggtttttttggcaactgatattgatgggatgccgataattagttttttactgcatgagcaaaaaatattgcttgctgtaaggattcaagttgatgatgctactgaagaagcttttggtgatattaagcctcacatgagctggaacattcctgcatttgctgctgcgccagttgttgtgactcgtccaagagtacgagttggagttcttccctttacagacatccttgttttgagttcagacaatgatctacttctctattctgggaagcagtgcctctgcagatatactctccctaatgaattgggaaaggggttcttttcaaatcatgagctaaattcagatatttcagatacttactctgatctgaagatcacaagcatagctgatgctgttgaagggcgtataaatgtgacatgcagtaatggcttgatgctcagatgttcgttgcgcaaaaatccttcctcttctttggttagtgactgtataactgcaatggcagagggtttgcagagttgcttttacaatcagttcatttctcttttttggggtagtgatgccgcctacctatattcaagctctcaggttgattcagaatgggaattttttagtcatgaaataaaaagagtttgtacaaagtatggacaaactttgtcaactaaatcactcacttttccaagtaaagcttgggacttcctgatcaacagcaaataccattcccaatactgcaaaagagccctatcatcttccaattcttttttgcctgtgtcatataatacaggcaaaactgtttttaattcctttctccaggatgaacatagttcagatgtgtcatataatattcggttcatgagagaaacattggagacattgcatgccctatatgagaacctcaagcttaatattttgcggaaagaggatctaggatgtctcgcttcattgttatgtactgttgcttcatctctgggtgaacatagttatgttgattattattgccgtgactttccactcaacttgactgaatccccatccctagtctcttcaaattctttaacaactccaccgtccctgtttcgttggtttgaatattgtctacgtcatggtttgaactccgcaaagctggaagacattcctactctaatgcgcaaacagaaagtttctgccgtgagttggagtaggaaggtgttgtcattctatagtttgttgttaggagcagaaaggaaaggcaaaaatctctcttctggtgtgtattgtgaagttgccagtggttcagcgagaaacactgaagaacttactgttctggctatggttgctgaaaagtttggtcatcggcagttggatttgttaccagttggtgtatctcttgtgcttcgtcatgcactggacaaatgccgtgactccccacctgatgattggcctgcaactgcttatgttcttgttggcagggaagacctagctacggcaaagatggggacagttaggaaagaaaacctgttgtggaacaatgataatttgacatcaatgtcagtcccttatatgctacatctgcaacctgtaatcataccgacaactgcacctgacatccctgcatcagaagttttgaattctgatgattcagattctgtctataaatctgttgaggatggcatggaacatatctttacttcaacaacacaactccgatttggtcatgatttgcgcttgaatgaggttagacgcctcttatgctcagcaaggcctgtgcctatacaaacacctactaatcctagcgtgtcggatcaagacctacatcag

SEQ ID NO: 203239 - DNA, 2937 bp, Zea Mays
atggctccaggctcattaaaaataccctgccccaaaccaaaatccgcggcgcccaaaattttccctccgtcgctagggtttcgtcctatagcaggaaaccgtttgaagcgcccaaagggacggcagcttgccagctttcgcctcactccgccaatagtccacaccgcgctccgcctgctccccggcgccgactcgtttcccctcctccttgacgccgcggccgccagcagtgggatcatggcttcggtcggttcgcggcggctaacggtgctgcgggagttccgccctcacgggctcgcagtcgaggaagccgacggccagggcgtccctggggcgccaccgccgcaagactacgactacttcctctttgaccctgcactcgccatttcccccacccctgaccccagcgatgaggcctcctcttctggtgcagacggcgaccacgagctcttcatccgtgacaatcagataatatggagtaatggttctcgagttcacaaaagatatgtatcacctaatacagtcattatggcttgctggtgtaggatgaatgctatcagtgatgctcttctatgtgtcctgcaagttgatactttatctctatacaatgtaactggtgaaattgtttgtattcccttaccttatgctgtttcatcaatatggccactccctttcggtcttctacttcagaaatcaactgatggaggtcacatggtgtcatcctcgagttcactgttaaatgcaagggatttaaatcgtcctagcaaggaatatggattgacctacaatattccattccaagcaaacatcttggagacagacaacaaagctaatggcgccattatctcgtcacacctcatcttgaaacatccatttgaagagcctcaggcaacatatgttgaagaaaaggacaaactaactatgatgagagattttgatgaaaaaactatctggacaagtgatgtgatacctctaatagcatcatatcataaagggaagtttcagcattctgtctggcaaattgacggtgctagttaccaggaagcaatgaacgaaaatacaatgctacctgtcgatatttcttcacataaatgtgcattccgcaagatatggcaagggaaatgctcccactctgctgctagcaaggtttttttggcaactgatattgatgggatgccgataattagttttttactgcatgagcaaaaaatattgcttgctgtaaggattcaagttgatgatgctactgaagaagcttttggtgatattaagcctcacatgagctggaacattcctgcatttgctgctgcgccagttgttgtgactcgtccaagagtacgagttggagttcttccctttacagacatccttgttttgagttcagacaatgatctacttctctattctgggaagcagtgcctctgcagatatactctccctaatgaattgggaaaggggttcttttcaaatcatgagctaaattcagatatttcagatacttactctgatctgaagatcacaagcatagctgatgctgttgaagggcgtataaatgtgacatgcagtaatggcttgatgctcagatgttcgttgcgcaaaaatccttcctcttctttggttagtgactgtataactgcaatggcagagggtttgcagagttgcttttacaatcagttcatttctcttttttggggtagtgatgccgcctacctatattcaagctctcaggttgattcagaatgggaattttttagtcatgaaataaaaagagtttgtacaaagtatggacaaactttgtcaactaaatcactcacttttccaagtaaagcttgggacttcctgatcaacagcaaataccattcccaatactgcaaaagagccctatcatcttccaattcttttttgcctgtgtcatataatacaggcaaaactgtttttaattcctttctccaggatgaacatagttcagatgtgtcatataatattcggttcatgagagaaacattggagacattgcatgccctatatgagaacctcaagcttaatattttgcggaaagaggatctaggatgtctcgcttcattgttatgtactgttgcttcatctctgggtgaacatagttatgttgattattattgccgtgactttccactcaacttgactgaatccccatccctagtctcttcaaattctttaacaactccaccgtccctgtttcgttggtttgaatattgtctacgtcatggtttgaactccgcaaagctggaagacattcctactctaatgcgcaaacagaaagtttctgccgtgagttggagtaggaaggtgttgtcattctatagtttgttgttaggagcagaaaggaaaggcaaaaatctctcttctggtgtgtattgtgaagttgccagtggttcagcgagaaacactgaagaacttactgttctggctatggttgctgaaaagtttggtcatcggcagttggatttgttaccagttggtgtatctcttgtgcttcgtcatgcactggacaaatgccgtgactccccacctgatgattggcctgcaactgcttatgttcttgttggcagggaagacctagctacggcaaagatggggacagttaggaaagaaaacctgttgtggaacaatgataatttgacatcaatgtcagtcccttatatgctacatctgcaacctgtaatcataccgacaactgcacctgacatccctgcatcagaagttttgaattctgatgattcagattctgtctataaatctgttgaggatggcatggaacatatctttacttcaacaacacaactccgatttggtcatgatttgcgcttgaatgaggttagacgcctcttatgctcagcaaggcctgtgcctatacaaacacctactaatcctagcgtgtcggatcaagacctacatcag

SEQ ID NO: 203240 - DNA, 2331 bp, Zea Mays
cgcaaaacccgctcgaacaaataggaaaaaacggaagccgtggcgagatagaaaaacccacacttgagccatcatcccaagtccaacctacccccatcagcatcacgcattcacgcgcccgccccagcgccgtcatcggtcgccatccctgcatcgaccgcaccgcatcgcaccgtctccgccgccatgcgccgcttcgcagccgacagggcgcgccgcgcggtggccgcgtctctgcacggtgcagcgtccagatcagcagcgccgtcgcctcacgctccggcgccacgtcatccagcctccccggtgggggcggcggcgatggcggccgccatggtgaggaccatgtccacgacggccgcgggcacgcccccagtgtcggtcgccaccatcaaccccaaggtcttgaagtgtgaatatgcagttcgaggagagattgttacacatgctcagaacttacaacaagaattgcagaaaaatccagaatcacttcctttcgacgagatactctactgtaatattggaaatccccaatcacttgggcaacaaccagttacctatttcagagaagttctctctctatgtgatcatccagctctcctggacaaaagtgaaactcatgctttgtacagatgctatagagagagcatggcaaattctagagaagataccaggtagagcgacaggagcatatagccatagtcagggtataaaaggtttacgtgatgaaattgctgctggaattgctgcccgtgatgggtttcatgcaagtggagataacatctttctaacagatggagcaagcccagcagtgcacatgatgatgcagttgttgataagttctgagagcgatggcattctctgccctattccacagtacccactgtactctgcatcgattgctcttcacggtggttcccttgttccttatttccttaatgaagagacagggtggggactcgatgttgatgagctgaagaaacaactggaggaggctcgatctaagggcatcactgtcagggcgcttgtggtcataaatccaggaaatccaacaggacaggttcttgttgaggaaaaccaaaagaaaattgtcgaattctgcaagaatgaaggacttgttcttctcgcagatgaggtttaccaggaaaatatatatgttgaagataagccattccactcattcaaaaaaattgcacggtcactgggatacactgatgatgatcttcctttggtatcattccagtcagtttctaaaggctactacggagaatgtggaaaacgaggcggttatatggagataactggattcagtcctgaagtacgggaacaaatttacaaggtggcatcagtaaacctgtgctccaatgtttcggggcaaattcttgctagccttgtaatgaacccaccaaaggctggggatgaatcctttgaatccttcatgtcagagaaggatggtatcctttcatcgttggctcggcgtgcaaaggctttggaagaagcattcaacagtttagaaggaattacatgcaacaaagccgaaggtgcaatgtatctgttcccacgccttcatttaccccagaaggcaattggagcagcccaagcagtcggcactgcgccagatgcatactacgcaaaacgcctactggaagccactggaatcgtcgtcgtccccggttctgggtttggacaggtccctggaacgtggcacttcaggtgcacgatactgccgcaggaggacaagatacctgcgatagtatccaggctcaaggagttccacgagaagttcatggatgaattccgtgattgagctgagtatccatcgccctggcgtgatttttatctgttcgaaataataaggctgccaattggttggccccccctccctccctcgtcgtcctatggatgctacagccaaacaccctcccaaattgtgttacaggcagattcctatcgaaaaacctacagaatctcgggcactgcagtctgcaatgccatgcttctgtttgccttgtgagaagtgtatcaggctaggctctgagccctgatgtgtacaaacatacccgaactttgaggccaagttgagttgtctcggcgcatgctgaaactctgctcgccttgtgttgcggagaatctttgctgtccaggttgatatgttcgctgactgggctgactgctctgcttctgctcgtttgacatcgctacaggtaaagaaagacaccagtaggactgtgtgagtgccggcctgtcaggttcgaacttgcatctactaccctagtaataaaaaaagaatagagggttgtggcttctgcgttgctcgctatccctgcatag

SEQ ID NO: 203241 - DNA, 2456 bp, Zea Mays
cttatttgcaagaaataaatattttcaagcctcatgatgactaaagaaatgcacatcgcgccttgtctctttgatcaagcaaatttcagcaagagcgcatcttttctttcttgccgagaacgcaaaacccgctcgaacaaataggaaaaaacggaagccgtggcgagatagaaaaacccacacttgagccatcatcccaagtccaacctacccccatcagcatcacgcattcacgcgcccgccccagcgccgtcatcggtcgccatccctgcatcgaccgcaccgcatcgcaccgtctccgccgccatgcgccgcttcgcagccgacagggcgcgccgcgcggtggccgcgtctctgcacggtgcagcgtccagatcagcagcgccgtcgcctcacgctccggcgccacgtcatccagcctccccggtgggggcggcggcgatggcggccgccatggtgaggaccatgtccacgacggccgcgggcacgcccccagtgtcggtcgccaccatcaaccccaaggtcttgaagtgtgaatatgcagttcgaggagagattgttacacatgctcagaacttacaacaagaattgcagaaaaatccagaatcacttcctttcgacgagatactctactgtaatattggaaatccccaatcacttgggcaacaaccagttacctatttcagagaagttctctctctatgtgatcatccagctctcctggacaaaagtgaaactcatgctttgtacagttcagatgctatagagagagcatggcaaattctagagaagataccaggtagagcgacaggagcatatagccatagtcagggtataaaaggtttacgtgatgaaattgctgctggaattgctgcccgtgatgggtttcatgcaagtggagataacatctttctaacagatggagcaagcccagcagtgcacatgatgatgcagttgttgataagttctgagagcgatggcattctctgccctattccacagtacccactgtactctgcatcgattgctcttcacggtggttcccttgttccttatttccttaatgaagagacagggtggggactcgatgttgatgagctgaagaaacaactggaggaggctcgatctaagggcatcactgtcagggcgcttgtggtcataaatccaggaaatccaacaggacaggttcttgttgaggaaaaccaaaagaaaattgtcgaattctgcaagaatgaaggacttgttcttctcgcagatgaggtttaccaggaaaatatatatgttgaagataagccattccactcattcaaaaaaattgcacggtcactgggatacactgatgatgatcttcctttggtatcattccagtcagtttctaaaggctactacggagaatgtggaaaacgaggcggttatatggagataactggattcagtcctgaagtacgggaacaaatttacaaggtggcatcagtaaacctgtgctccaatgtttcggggcaaattcttgctagccttgtaatgaacccaccaaaggctggggatgaatcctttgaatccttcatgtcagagaaggatggtatcctttcatcgttggctcggcgtgcaaaggctttggaagaagcattcaacagtttagaaggaattacatgcaacaaagccgaaggtgcaatgtatctgttcccacgccttcatttaccccagaaggcaattggagcagcccaagcagtcggcactgcgccagatgcatactacgcaaaacgcctactggaagccactggaatcgtcgtcgtccccggttctgggtttggacaggtccctggaacgtggcacttcaggtgcacgatactgccgcaggaggacaagatacctgcgatagtatccaggctcaaggagttccacgagaagttcatggatgaattccgtgattgagctgagtatccatcgccctggcgtgatttttatctgttcgaaataataaggctgccaattggttggccccccctccctccctcgtcgtcctatggatgctacagccaaacaccctcccaaattgtgttacaggcagattcctatcgaaaaacctacagaatctcgggcactgcagtctgcaatgccatgcttctgtttgccttgtgagaagtgtatcaggctaggctctgagccctgatgtgtacaaacatacccgaactttgaggccaagttgagttgtctcggcgcatgctgaaactctgctcgccttgtgttgcggagaatctttgctgtccaggttgatatgttcgctgactgggctgactgctctgcttctgctcgtttgacatcgctacaggtaaagaaagacaccagtaggactgtgtgagtgccggcctgtcaggttcgaacttgcatctactaccctagtaataaaaaaagaatagagggttgtggcttctgcgttgctcgctatccctgcatag

SEQ ID NO: 203242 - DNA, 1074 bp, Zea Mays
atggcgcgtcgcggtcttcctccttttgtccaaggttttggtgtatgcgtcgtcgtgtttcttttggcgttgtgcggcccgtctggcgaagtcgtacattgtgttgagctcaacaacaatgactctggaagggctttgtatttggggttgccgctgcctgtgttgtttagacactatgtgtcggcgccaacgcgatatgccatgatttatgaagccgggcttgcagaagagagtaagctgacgtatgtcgaggagcagcttggggacgccatcgttggggagagcgagcagctccagcgccctctcggaaatcctagactgaaagaaggtacgtcacttcgcatcagtaccgcgaaattggcaaagctcaaatcaaactgtatttcgatgatacggcaggaagtggtgtacttgcgggcctccgactcgtcgtagaacacatccggcggcgcctggaactcaggccgaggcatcttcactctcctccgagttgccgctctcctcggtttctcgcctcgcaggcacaaacgttgctggtgccgctggctaacgaatcgaagccagtatgggccgagttccgttttctcagaagacttctgagctcaattgccagttagcgagccccgcgggacatttacatgggccacataacagccggcccagtaaagcgtggcgtttataaatcttctcaaccgtctagggcatcgtttgcagcagcagcagcagccgccgacgccgacgtaaaagcccgagtcgctcgtctcttcccagatcctccgagcacaacagctctccgtcgccgtcgccatgggtaaggttcacggatcgcttgcccgcgcggggaaggtgcgtgggcagacgcccaaggtggcgaagcaggacaagaagaagaagccccgcggccgcgcgtacaagcgcatgcagtacaaccgccgcttcgtcaccgccgtcgtcggattcggcaagaaacgcggccccaactcctcggagaagtagatatagccatgtctttgtgttttggtcccccactagtttccttgtactgatggtggaggtgtgactgaatgacactgc

SEQ ID NO: 203243 - DNA, 1577 bp, Zea Mays
atggcgcgtcgcggtcttcctccttttgtccaaggttttggtgtatgcgtcgtcgtgtttcttttggcgttgtgcggcccgtctggcgaagtcgtacattgtgttgagctcaacaacaatgactctggaagggctttgtatttggggttgccgctgcctgtgttgtttagacactatgtgtcggcgccaacgcgatatgccatgatttatgaagccgggcttgcagaagagagtaagctgacgtatgtcgaggagcagcttggggacgccatcgttggggagagcgagcagctccagcgccctctcggaaatcctagactgaaagaaggaagtggtgtacttgcgggcctccgactcgtcgtagaacacatccggcggcgcctggaactcaggccgaggcatcttcactctcctccgagttgccgctctcctcggtttctcgcctcgcaggcacaaacgttgctggtgccgctggctaacgaatcgaagccagtatgggccgagttccgttttctcagaagacttctgagctcaattgccagttagcgagccccgcgggacatttacatgggccacataacagccggcccagtaaagcgtggcgtttataaatcttctcaaccgtctagggcatcgtttgcagcagcagcagcagccgccgacgccgacgtaaaagcccgagtcgctcgtctcttcccagatcctccgagcacaacagctctccgtcgccgtcgccatgggtaaggttcacggatcgcttgcccgcgcggggaaggtgcgtgggcagacgcccaaggtggcgaagcaggacaagaagaagaagccccgcggccgcgcgtacaagcgcatgcagtacaaccgccgcttcgtcaccgccgtcgtcggattcggcaagaaacgcggccccaactcctcggagaagtagatatagccatgtctttgtgttttggtcccccactagtttccttgtactgatggcaagttgctgaagacttatatgctattattatctgtatcgatgtgttactgcaacactatgaaatatggtatgcatcgttgagctaatcacgttgcctgtggaggcgatctttttagttgtctcgaatgttgttcgtcttgttttgaaattggtgacacaggagtctcggtctattctgtttcagtttgtcctgctgatagtggagtgcaattgtgaattgtgataagtaggctgagcaaattgtactgcttgtgtagtttgttttgtttgatttgtgtgggcacacttgaaattggcgtgagtctagtaacataagttgtgccattttgctcagaagccttacatatgagttctttctggttcataatttgcttgtttagaagcagagttctagaacgtgaactgtctgtctgaagcagagctctagaacctgaactgtccgtctgattggttgctgcttactttgtgctgcactgaaattggtagtggtgtctgtctaattcatctatggcaatcctgttttattattatatgcctcgtttggttgatcaagtgaagtttaaaatagtggttgatcaagtgaagtcttttgcacggc

SEQ ID NO: 203244 - DNA, 1382 bp, Zea Mays
aaaacagccatcacaccctccgacccttgcaagatttcactctcagtcccatcaagtgttctacatcaagttcctgaaggacatgttggggtatactggagaggaggtgctcttctgaagacaatcacccctccagggtttcatctgaagctccctttaatcacacagtatgagccaatacaggttacacttcaaacagaccaggtcagagatattccttgcggaacaaaaggtggtgttatgatcagctttgacaagatagaggtcgtaaaccgcctccgcaaagagtttgtgcatgaaaccctactcaactatggtgtgcactatgacaagacatggatatatgacaaaattcatcatgagattaaccagttctgcagtgctcacagtttgcagcaagtttacattgacatgtttgatcagattgatgaaacaatgaaagaagctattcaaagagactgtacacgctatgctcctggaattgaaatcatcagtgttcgtgttacaaagccaaatatacctggtagtatcagaagaaactttgaacttatggaggaggagcgtacaaaggcactgatcgccatcgagaagcaaaaggtagcagagaaggaggcagaaacacagaagaagattgcgctatctgaagcagagaagaacgcgcaggtgagcaagatcctgatggagcaaaagctgatggagaaggacagttccaagagacaggagaagattgataatgaaatgtacctggcacgagagaaagcactagcagatgcaaactactacaggattttgaaggaagcagaggcaaataggctcaaactgacacctgagtatctggagctgaggttcattgaatcaattgccaacaactcaaagattttctttggtgaaaagattcctaacatgatcatggatcaaaggttgctcaagaattaccttgatgctgttcctaggaaggaccattatgaaatgtagccgcgggttccgtgggttggaagcagaagtctttcttttttgtgtgatcccacgcagtagataggattaccgtgtagccgtccagtatactagtaagccagaaaggagtcatcaggatcctcttgaagatgaaattagcagtcatgagatctttggcttgttttgtgtagtagcagcattagggcacctggagcattcgcatgtgaccgacagtgatgcaaccagtgcaaatcctgtagtcttcaaaactgatggtcaaggccgctggcctccaaacccaggtaatctcttgaaaaggatctgggttataatttttgactgatgggcagaacaatttgtagcactgctgatgccaaagttttctcgatcataaatgtgcaagtttgctccctgacttaattatgtct

SEQ ID NO: 203245 - DNA, 1036 bp, Zea Mays
ccggccattctcaatcgggaaagcgtcgaaaacccaaatccaaacgtcgccgcaaaccgcgcgatccccaggcccaaagcgccgccgttcatgagcttcctcgccggccgcctcgccgccaaggagggcgcgtacttcctccaggagtcaaagactgccgtcggccgcctcgcggagaagctcccgccctccgcttcggcgcccgggggtgcgtcggcgcagccctcccccgacgtgctaccggagatcctccgccactccgtgcccatcaaggggacgccgcccccggccgaagcctccctctccgcgtcctcccgctgggccctcccgccgggcggcggcgaggctgcgggcttgcaccccgacgcgctcaacccgctccgctcctacgtctcgctgccgcaggccaccttcggccccaaaagatggcagcttccgaacgaacaacctaactacttggcgtcaacagcaaatgaaaggcggcgagatcgggccccacctcccttggaccctgagaatttgaaagccttgggaaggcattcattactgcaacttttatggtgtttggaggagcaacagctgtgctgttgtacacagcagataagctacagttgcattcagtagatgatgttaaaactaaaggaaaagatgcactgcagccacgagctgatatgattaaagaacaaatagctccattaagaagttgggctgaagaaatgtcccgaaaatggcatttcgaaggtggtaaagaagctaaggagaagtctggcatcgttaaagaactttcaagaattttgggctccaggactccccctggttgatcaacaatgacatacggctgttgtaaatccaccgtccactttgttgtatgcgtccttatcgtttccatatgtttgtgtataggaaacaaaacatcctgacatctagtttggatgtatatattggagtatagaattggaattggaatcagcttttctaaattttgttgtttggttgcacttggaatttagatttggaatcataggcctaattcact

SEQ ID NO: 203246 - DNA, 1620 bp, Zea Mays
ggaggcttcttcacctgtgggatcgatgccgatgtgtagtgtgcactcgggatacccttcgctgcagagacgttgttttgcctcaaccctctgcacctactgcttcactttgcagactataggaggaaacaaaagatgagctcattgggtggataaaaacaagctccgtagaatcagaaaatgtaagcaaggccctttatgaaactattggcaaactgtcaatccacaaggaggaggcaaggcttattgggcagctgtgcagtggcatgctggccaatctgatcggttgttgccgcgagagaggtggtccgaactgctctcttcgctccgtctcgagtttctcgccgacgtcgacgacgacaacgccgactcgtccgcatgcttcgttggccttgtctcgtattgttgttgctgaaaatttacctgaggatcaaaagcatcaaactctgatgaagattttctcagctgttgggaatgtgaaatctatacgtacctgttatccacaagatatttctctagcagcagctaacaaaacatcaaggattgagatgatttttgctaataagcttcattcttttgtggagtattcaactgttggagatgctgaaaaagcagttgctgaattcggtggtgggggaaactggagagaggggattagagttcgttcactgcttggatgtctgaaacatgggttaggtcaaggaagaaaaggtggggatgaggagtatgctgcagatgaagatggccctgacacaactgatcatccacgagactttggaacagatgttactgcccaaatctcagaagcacatttcgatcaccaggctgaagatggcacccatgacaagggtggaatgaggcagcaggggagagggaggggccgtggagggagaggcagaggccgtggtcagcattatggccacaacagccgagatggccaccatccgattggcactcccccgtcggagcatccagctgtgctgaagccgcccctgggcccccgcataacggatggcacaaaagggttactgttgcgggagtcttcaacaggtcactcgccacatgcgccttccagcagaaactataatgcagaccaacaatgaagcattgcttgctcgcttctcgacgaccaaggagaccgaaaaaactgctagaaaaagtgctcttgtgtctactggttataaacaataaatgctatgatggagctaagggtgatctgtgttcatgtggagtgattttctttgtcctcatggcggggtacctcccatttaaagattcaaacctgatgtcgctttacaagaagatcttcaaagcggatttcagttgccatcctggttctccacaagtgcaaagaagctcatcaagaagatacttgatcctaatgctaacactatgcttagattagtgtatggttgtcgacacatttgtctgccattacaaaattcgaaattgactctttagaaataatttgtgtggtaattataatatttaccacacggattttacatatcatagtgatatttatcgttccgtttctatgtttcatacaaattttgtactcccgtcgcaacgcacgggcactcacctagtaagtactctgattatattgtgacatttatc

SEQ ID NO: 203247 - DNA, 1112 bp, Zea Mays
ctccctcggattccggattgtggaaatctcgatcgggagctattcttacagaactaaagagctttgatgctgacttcatgtgcatacaggagttggatgaatatgataccttctataagaaaaacatggaaaactctggatattcaagtatttacattcagcgatctggagacaaacgagatggctgtggtatattctataaacctaaaagtgcagaactggtgcagaaagaagtaatactgtacaatgatttagtagaaaaatatgttcctagtgataatgtaaatagtgctctggaaaataattcttcagcagaagaagacaagaatgcaaagccagataatagcaagcgtggagatccaaatgatccacgcgttagattgaagcgggactgtgttggtttactcgcggctttcaagcttagtgatccttgtgatcaaattttgattgtggcaaacacacatatttattgggacccacaatggatcgatgtaaagttggctcaggcaaaatatcttctttcgagagtatctcagtttgagcaactcatctcaaataaatataattgtaaaccttcagtgatcattgctggtgacttcaattcgacacctggtgacaaggtatacaattaccttttatctgccaacctaggatctacggacgaagctccaatcaagttacgcagcctttatgctgcgaatggaggggagccagagtacacaaactacactcctggttttaccggaacactggactacatattcttgtcggatggtagttcgataaaacctactagcctacttcgtttgccgcgaggggattctgaggatgtgaaaggaggcttgcccaactttcgacatcctagcgatcatctcccaattggtgctgattttctggtagtcaacatctagtgcaggtgttgattgctttttcaacagaaatagtaaatgccgttgaataatttgtgttgttggctcaagtttcagagtttaaatgtaatatctcaaggaacaagcgtttcttttcttgtagagcaattaacaatgcgaattttattcatcaattttaatataataggagtattgtctatgggcattgaagggtttgttctt

SEQ ID NO: 203248 - DNA, 2213 bp, Zea Mays
ttttaatgaagaggttcgtgcacgcactgtgttcaacgcaattccaattttctatccgagtgatgagtgactgtgcacatacatcgtactacaggtgggacccgcttactagatcagattctaacatcctgttcgtggagtcgtctcggcggcggcggaacaagccgggaacctaccgcaaagggcgccaccgatgctaaagccacagacgtcgtggacagcttccctccctctccttctcatccgccgctgctcgagaaccgcggccagtccatctcctgccggtgaccggccgctctcctttgtcccggtctgcaagcggcggatgagcacgctggcgcatcccaggtttgcccctctccctacggagcaaactgaatcccaaacagatggcggggctgcacggtaccagttccggctggtctcttacaacatcttggcccaggtttatgttaagagtacgctttttcctcattccccatctgcgtgcctcaagtaagcccttgattgatcagttgtttgtgttgtgtattggattttctctctcgaaaacgctgtttattggactttccttatagtcatggtacttaaggttctaatgctgtatagtcatggtgtctgagaaagtaagaaatctttggaatttccttatctaactattttcatgtgacttacttgaactaggcttcataagtggaaccaagtgatattgaattatacaaatttggttccatgaatgatgggttacccagcagatcctaatcaaacttgatgacatgtttgctcagcaatacaacttttagacttctaaaaagtagtaatatactccctcggattccggattgtaagtcattctggcttttctagatgcatatatatatatatatcttttgctatgtacctagacataagttatgtttagattcattgtaaaatctgtgtctaagagagccaaaacgacttccaatttggaacgaagggagtactgttatactatttaattttcacaacagatattgacaacatggcccctaacttatgttcctatttcatgtttgcaaaataggtggaaatctcgatcgggagctattcttacagaactaaagagctttgatgctgacttcatgtgcatacaggagttggatgaatatgataccttctataagaaaaacatggaaaactctggatattcaagtatttacattcagcgatctggagacaaacgagatggctgtggtatattctataaacctaaaagtgcagaactggtgcagaaagaagtaatactgtacaatgatttagtagaaaaatatgttcctagtgataatgtaaatagtgctctggaaaataattcttcagcagaagaagacaagaatgcaaagccagataatagcaagcgtggagatccaaatgatccacgcgttagattgaagcgggactgtgttggtttactcgcggctttcaagcttagtgatccttgtgatcaaattttgattgtggcaaacacacatatttattgggacccacaatggatcgatgtaaagttggctcaggcaaaatatcttctttcgagagtatctcagtttgagcaactcatctcaaataaatataattgtaaaccttcagtgatcattgctggtgacttcaattcgacacctggtgacaagctggagctcagtttggaggagaactattcagaactatgctttctattgatggaggtatacaattaccttttatctgccaacctaggatctacggacgaagctccaatcaagttacgcagcctttatgctgcgaatggaggggagccagagtacacaaactacactcctggttttaccggaacactggactacatattcttgtcggatggtagttcgataaaacctactagcctacttcgtttgccgcgaggggattctgaggatgtgaaaggaggcttgcccaactttcgacatcctagcgatcatctcccaattggtgctgattttctggtagtcaacatctagtgcaggtgttgattgctttttcaacagaaatagtaaatgccgttgaataatttgtgttgttggctcaagtttcagagtttaaatgtaatatctcaaggaacaagcgtttcttttcttgtagagcaattaacaatgcgaattttattcatcaattttaatataataggagtattgtctatgggcattgaagggtttgttctt

SEQ ID NO: 203249 - DNA, 2339 bp, Zea Mays
ttccacttctcgatctccactggtttgaagaggtggctaatgctgctaaggggaagagggcacatagggttatgctcactcgattgcttgctttggcaggccatgctttggcagaggcagagaccaggcctgaacctaaggatttgtgggaagagccgataaatgctactttgtggcgaccgtgttctgaccaaagggattggaaagcctcagagggaaccaatggctacatcatgatcagtgcgaatggtggcataaaccaacaaagggttgcgatttgtaatgcagttacaatctcgcggttgctcaatgcaactcttgtcctcccaaaattcttgtacagtaatgtttggctggacaaaaggaggaatattttatcaaatatctgaaatctgatattcagattgttaaggatcttccagtagagctgcagtcattagacttggaggcgattggtagcctagttaatgatacagatgtcatgaaagaggcgaagcccagtttatacatgaaaaaaatactgccaattttactgagaaacagagttgtgcactttataggattcggcaatcgcttatcttttgacccaataccttctgaccttcagagattgcgatgcagatgtaattttcatgctcttcgttttgtatacaaaattcaagaaactggtgcagttcttgtagagaggttgcatggccatagggcctcttcgtcacctttgaaggataatcttttaggccagtttgccgttaagtctgaccccagggcgaacaagagtgatgcatccaaatatctggctgttcatctccggtttgagattgatatggttgcatactcattgtgttactttggtggtggcaaagatgaggaagacgaactagaagcttatcgccaaattcactttcctgtgttgtcagaactcaagaagatgacaaagttgccctctgctgctttcttacggtccgaaggcaaatgtccccttgcacctgaagaggctgtgcttatgctagcagctattggtttcaagcgcagcacaaatatatacgttgcaggtgctgaaatttatggagggaaggataggatggctgccataagtcgtctttatcctgctttagtaactaaagaaacccttctgtctccatcagagctcgaaccatttaggaacttctcatctcagttggcagccctggacttcattgcatgcgcagctgccgatgcatttgctatgactgacccaggaagtcaattctcttcccttgttcaaggttaccgcatgtactacggtggtggggatcttcccacgataaggccaaacaagcgccggctagccagcatacttgtgaagaatgccacaattgagtggaatggatttgaaaatagagtaagaaaactcatacagcaaactaagcaagttcacgagaggcctgttgcaagaagcgtatttagacatccacggtgtccagagtgcatgtgcagaacagagcactaagatctttttttatagtttcttgtgtctataccaatactcctttttcacaagaaacactataccaatgagatcgccaaaggtagttcttttgtgctttggccgaaatctggatatgtctcttgctcttgaactactttggaaccaaaccataaaagaaaagaaaatacagtgattgagctcttgtttgtatcagagaagcaatatagcagactagcccatccattctcttactgacatgatctactgctaggcatcatgttggattttgagtattaggcagaattttgtttcatgtttgacagaagaagtggaccggggactgatttttgcatctggacaacaatgctgccatattttttttattgagatcagctataccattctgtgtatgaaggtgcatcatctgcagttgactgtcgaagtaatatattggccaaactgagcaacagcattctcatcttttaagagtgcttcaattctactcgggctaccattcaacaaatcaggctgccagagttctgtcaaccgtgtattgccatctccattgttgctaccgttgtgatggagctaagtggcatattgaccccttttttaccattcttttgcccattgtagtaccataaagagatgtatttagttaggtcgtaagtttatatcaactgaaagctttcattatcagcgagagaaacgttccttttttgtgcatgctttatacgtgctcgtccaagggcactcttgcatattaatgctttgactattttctttggtttccaatctttctttggcaatgccccgaaactgcgaatgaactcggtcagattcgtggttcgcagagtgatttacagaacca

SEQ ID NO: 203250 - DNA, 4375 bp, Zea Mays
atccaccatgtgaccatgtcttctccgctccatccctaaaactgccttccgctcatggtcatgggctcatggcgctcacgtcgttcccgttcgcgccatccaacacctcgctgtcctactcctcccgcgcctcaaccgccgccgcgttcgctcctcgtggggttcactttgccgcgcccggaaggagcggcggcggccaaccgctcgcgtgcgctgcgcctcggtgccgcggacgggctccgaggcggcggcgcggagggggcctgctggtctgggcagcggctgactactacgcgacgctgggcgtgccgcgcgccgcgagtaacaaggacatcaaggccgcgtaccggaagctcgcgcgccaggttctcgacgcttgcctcacatcaaaccccaccattcctcgtctcaccgcgaggcaaccgtgcatagttgggctgattggttggccggccgtgcgaagccgggtccgcgcaagcctggccagccgcatacgcaggattcgagcgtaccggtggatgcagaaaaatagcagtaagatgaattattttgcatctactcgtgcagctcacgtctggcacatacaggtaaccaaacaggtgcttatataaagtcaatgcatacgctagctcaggattaaatggtgcgggtaaccaatcacgtggagtatttttcactatatttgtctgagattaatatgcttggggtttgtgccaacagcaagtttgtagcagatagatcataccaactctcatccggtccggaaggcctctttttttttcccttctgaaacgcattttattgtttttgagtgttgtattacgtgctagaaggctaagtggaggcagttgcggggatctgacattcacgatcacttcgatgggtctgaagtgcctagctagttgctactgataactctgtagttttcaccattgcattgtaaatcctggcctgaccatgacttgaataaccaatgtctgtctcatgggtatttcattgctaatgattggtgacttaatttgcttgctcatccagtttagttttttttgggggttcgagggttgtttttatgccataaatgatattgtgctcttagctatagtttttgtatacctccagtacctaaatatttgaagcctgaaggcctgctaacatgcttccttgctagtttttgtgatcagatattcagatcactcagacactcactataaaatttctagaagcataaaccagtcgaaccagtgaaaggttatttggatatttatatttttgcacaggtcaacatttcaacaatgcattgtacatttttttctctcgaacgcgcaggggaactgcatatcaatacattaagaagaaaaacgtgggtccaaaatagaccagtacagtacaaggcgaagccatatgcattgtacattgatcctgtgtctttcaatgagtggagagaattgaaactcacaattgtagtttagtcctgtgctcacaatgtaacattttactaacaacatctacacttttgcgccattccaccataatgtttacagtttgtgtgggtttcaacagtttagtcgatatcacatattttccttcattggataagaatctttctgattgattttagatacataaaagctctaccctggcccctactggcatctgtgtgccatccaagatctgccagtgcctttgctgattgttgttagtcatcacactcggagcctaaggccctagaccaccctgggctactattagggaatacttacatatgcagtccctgtgtcacactgtcacctataccttctatttttggaatcacctaagttgtgtaggaggacttgtaaggattggacgataaaaaatgtgattttgcagaaggccagacctccactataaatattcttgtgtgtattgccatacctgcccatgttctcatttcgtttaaccttgttattaagactgaagctagagcggcatgcttagtatcctggaacgaccctctttttcaaccagagtattttatttactccaagattaggttagtggacctaaaataccccacttagcaggcacacaatctttcaattcatagctgtctgtttatctttcaatctaccaagtgaaaagtcttgctttgtctctagtttttggatgctctcaatacatactatagatttgttttttctggaaaataaatcatgacatctttttctgtcttcagtaccatcctgatgtcaataaggagccgggagcgaccgaaaagtttaaagagataagtgcagcatatgaggtgctgtcagatgaaaagaagaggacgttgtatgaccaatatggtgaagctggggttaagagtgcggttggaggctcgggtggagcttacacaaccaacccatttgatttgtttgagacattctttggaggcagcatgggtggtttttctggcatggaccagagcacgtttaggacaagcaggcaaaatactgttttacagggtgaagacatcagatatgatgtggttttggggttcacagaggcgatatttggaacagagaaatatattatactatctcatttggaaacatgtgatacatgtggtggttctggatcaaaagctggctccaagatgagaatatgttcgacatgtggtgggcgagggcaagtaatgcgaactgagcaaacaccatttggtctgttctcccaggtttctatttgccccacttgcgcaggagagggcgaagtcatctcagagtattgtaggaaatgttctggagaggggcgtatccgtgtcaggaaggagatcaaagtaaaaatccctccaggagtgagcaaaggcagtactcttcgtgtacgtggggaaggtgatgcaggatcaaaaggtgggcctcctggagatctctttgtttgcctcgatatagaggagccatcagatatcaagagggatggtataaacttgtattcaactgtgtcaataagctatcttgaagctattttgggcaccattaagaaggtcagaacagttgatggaaccaatgaccttcgaatacctccaggtacccaacctggtgatgtaattgccttagcgaagcaaggggttccatcattgaataagccgactatacgtggtgatcatctgttcactgttaaagttgcaatacccaagcgcataagtgggcgcgaaagggaattactggaggaacttgcatctttgagtaatggtggctttgttcgaacagatgccaagccaaaacctgcccagccaaaacgtgtacatctagagaaagaagttggtgctagccaagaagatacagacaaatctaaagcagcgggtgattggttgaagaaacttacacattttgctgggtcaattgctaatggtgctgcaaagtggctgaaagaaaacctgtaggctgtaaatatttactgcaggatagaagatttcttcagttaccatggtgctgtagtccaatctccaattcttagattcattggggtccccaagagctcttacatttttgttttgttttgttggagagtttcaagattttcaggctgtgagtaacaaccgagggagtgagaattgtctactaatactgtcggcatattggtcccttgtcattcttgcaaagcaattattttttatgtagttggagttattttcagtttggcaagtgcatgcagcagtctgaaagagtgaaagttcgccctgaaagttatgggatgctgctgctggtcccaaaccttgagacttagacaacactgtaaatatgtctctgttcctgattctgtacttgaggttttgggttaatcaaattcaagatcaacgggcgttctttttctgatttcttctggagctgcaaagcttgcatcgagcgatgccaaaaaaagatcattcagcagagttcaaacattttcatcttacaatgaagctatcattagaaacaagtttcagtaatctcgaattctaggtttcgtggagtcctcgcgtcgtatcactatcaatccaccgagctcgctttgagcaaagccaagactgcggctaccacgggcagggacaccatcagcagagctaccacaatgtttggcctcgtgatgtccgggagcaggatgcttccgtacttgataaccgcggcgccaccaagggacccaagcaccaatgtccacagatagccggagtcatcaccctattcatcaacacatcataacaaaggaaggaaacggactataaaattctttgcatccaaataaatgttgctatcgaactagtcgctcacaaggatgaaggatctacagccacaatggttgctgttgctgaatgttgacaagagaatgcagaggtaccttgaggatttgccccacgcccgcgtcggtcccggcctcgccg

SEQ ID NO: 203251 - DNA, 2237 bp, Zea Mays
agactctccgcagttcggcctcgcgattccgcgggagactgttctacttctcgccggcgacgccgattcgatctgacgggcacacatcagaaggctggaggagggcactgggagccgagggggaggctaagggtcaggattcgggcgcgatgccgcgcccgggacgacttcagcggtcggggtccaagcgcgggctggaccccaccggtggtggcggcggcggcgacaacgacgaccatgcgcccaagcgcccgcgcatccctgccctcgctagtgtcattgtggaagctctcaagatggacagtttgcagaaactctgttcatcgctcgagcccattctccgaagagttgtaagtgaagaagtagagcgtgctttagccaaactgggtcctgctagaattcaaggaagatcctcccccaaaagaattgaagggcctgatggaagaaatcttcagctccagttcagaagtcagttggctcttccaatcttcactggtggaaaagttgaagggtgacttcaataaagacgaagatgaggattggacagaagaagagtttgaaagtaatattgtcaaggagcgtgaagggaagagacctcttttgacaggaaatttatacttgggctgaggattgctcctggcttttatgaaggcattcgtgtccgagaagccaagacagaagctttccccgttaaggatcacagaggagaattgtacaaaaaacactacccacccacgctgaaggatgatgtttggagattagaaaagattggcaaggatggcgcattccacaagaagttaaatgctagtgggatctatacagttgaagatttcctccagcttcttgttagggatcagcagagattacgtagcattctgggcagtggaatgtcaaataagatgtgggacagccttgttgatcatgcaaagacgtgtgtcttaagtggaaagcattatgtatactatgctagagactcaagaaacgtgggtgcaatattcaataacatctatgagttcactggtttgattgccgatgatcagttcatttcagctgaaaatcttacagacaatcaaaagggctatgctgatgcattggtaaagaaagcatatgaggactggatgcaagttgtagaatatgatggcaaggcactcttgagcttcaagcagaaaaagaaatctgtcatgacaagaagcgatgctgcagttgcctcgacaaaccaccctgcttcaaatggttcggccatttcacagaaacaattgtcccttccagcaaaagctggacaaacttcctccgcgggtattatgaatgaagatggaactagaaatgcttacaatgcaaatggaaaccagtcagcaagatatgcagccaccactcagaacattcctgcaaacgtcgccatgcaatatgacaggagtgcagtgtcgcctgaaagccagtttagtggttcatcccttcagagtcaagcttcaagagggtccaatacgctagcattgggccctccacagcaacatcaaagttttgcattcccagcactcggccagtccatgcggccaacaggcctgaatccttttgaagaatggccgcagcaacaggaaaactgtggcggtgttgatgactacctgatggaggagatcaggatgaggagccatgagattctcgaaaacgaagaaatgcagcagatgttgcggcttctgagcacgggtggtgcaggaaccaacctaactgaagatggcttcagtttcccttcgtacatgcctgcaccttcaccaaaattgagctacgaggatgaccgcacccgtgcacctgggaaagccgttgttgggtggctcaagatcaaggctgctatgcggtggggcatctttgtcaggaagaaggcagctgagagaagagctcagcttgttgagctagacgactagaaagtattgcagctggaagcatgtgcactccagatgttcatgtaccaaagtttcgttgatgtttgtggatccggatggactcagccttgttcgatgcatataagttgatttgtccaggctgttcttttaattactatggaaaaaaatccctttcttactttagatgcatataagttgattttttatcacattctggactgctgtcctcgaaattacaaaatctggagctaaaacagtttaggttttaaccttaacctgatagcaactcaatcgaaaactcgatctctctttctgccggcatatcgggtacacatcgatatc

SEQ ID NO: 203252 - DNA, 2228 bp, Zea Mays
agactctccgcagttcggcctcgcgattccgcgggagactgttctacttctcgccggcgacgccgattcgatctgacgggcacacatcagaaggctggaggagggcactgggagccgagggggaggctaagggtcaggattcgggcgcgatgccgcgcccgggacgacttcagcggtcggggtccaagcgcgggctggaccccaccggtggtggcggcggcggcgacaacgacgaccatgcgcccaagcgcccgcgcatccctgccctcgctagatcctcccccaaaagaattgaagggcctgatggaagaaatcttcagctccagttcagaagtcagttggctcttccaatcttcactggtggaaaagttgaaggacctgagtcgtttgcaaaattggatatccttgtacttgagggtgacttcaataaagacgaagatgaggattggacagaagaagagtttgaaagtaatattgtcaaggagcgtgaagggaagagacctcttttgacaggtgacctgcaagtgactcttaaagaaggtgttggaaccataggggagcttaccttcactgacaactccagctggataagaagcaggaaatttatacttgggctgaggattgctcctggcttttatgaaggcattcgtgtccgagaagccaagacagaagctttccccgttaaggatcacagaggagaattgtacaaaaaacactacccacccacgctgaaggatgatgtttggagattagaaaagattggcaaggatggcgcattccacaagaagttaaatgctagtgggatctatacagttgaagatttcctccagcttcttgttagggatcagcagagattacgtagcattctgggcagtggaatgtcaaataagatgtgggacagccttgttgatcatgcaaagacgtgtgtcttaagtggaaagcattatgtatactatgctagagactcaagaaacgtgggtgcaatattcaataacatctatgagttcactggtttgattgccgatgatcagttcatttcagctgaaaatcttacagacaatcaaaagggctatgctgatgcattggtaaagaaagcatatgaggactggatgcaagttgtagaatatgatggcaaggcactcttgagcttcaagcagaaaaagaaatctgtcatgacaagaagcgatgctgcagttgcctcgacaaaccaccctgcttcaaatggttcggccatttcacagaaacaattgtcccttccagcaaaagctggacaaacttcctccgcgggtattatgaatgaagatggaactagaaatgcttacaatgcaaatggaaaccagtcagcaagatatgcagccaccactcagaacattcctgcaaacgtcgccatgcaatatgacaggagtgcagtgtcgcctgaaagccagtttagtggttcatcccttcagagtcaagcttcaagagggtccaatacgctagcattgggccctccacagcaacatcaaagttttgcattcccagcactcggccagtccatgcggccaacaggcctgaatccttttgaagaatggccgcagcaacaggaaaactgtggcggtgttgatgactacctgatggaggagatcaggatgaggagccatgagattctcgaaaacgaagaaatgcagcagatgttgcggcttctgagcacgggtggtgcaggaaccaacctaactgaagatggcttcagtttcccttcgtacatgcctgcaccttcaccaaaattgagctacgaggatgaccgcacccgtgcacctgggaaagccgttgttgggtggctcaagatcaaggctgctatgcggtggggcatctttgtcaggaagaaggcagctgagagaagagctcagcttgttgagctagacgactagaaagtattgcagctggaagcatgtgcactccagatgttcatgtaccaaagtttcgttgatgtttgtggatccggatggactcagccttgttcgatgcatataagttgatttgtccaggctgttcttttaattactatggaaaaaaatccctttcttactttagatgcatataagttgattttttatcacattctggactgctgtcctcgaaattacaaaatctggagctaaaacagtttaggttttaaccttaacctgatagcaactcaatcgaaaactcgatctctctttctgccggcatatcgggtacacatcgatatc

SEQ ID NO: 203253 - DNA, 2029 bp, Zea Mays
ctaaaaacacagtgaatatatgtttaatactggcgttatggagctttcattaaactagtgtcatcagtcagcatcagcatcatgttcagccaggactcatgatgggagacaagggaggcgagcagtgcctgccccccctgcattgtagccttaaaacgagtatatagctccacccctggatatgttagatacatacaccacgtttttgagaaatcggagcagagatacacaataatggaggcggcaggtggagagcagcacgaaacacgacgacgtgcaggtgcaggcctcgccctcctgggcgtcgtctactcatcgctgctcctgaacgccatcttcgtcgcgcaccacttcctctcgccgtcccggctgctgctccgtgacgacgggtgcgggtgcgggctcacctggtctctgcaggcggccagggaggccgaggcggtggccgccgtggagtgctcgggccacgggcaggtgttcgtcgatggcgtcgccggcgaggacgggcggcccgggtgcgagtgcaacagctgcttcggcgggccggactgctcccttcgcacgcccaactgcaccgccgacgccgacagcgggaacccgttgttcctggagccgtactggcggcgtcacgcggcggccagcgccgtggtgttctccgggtggcaccgcatgagctacaccaccacgggcgggttccagtcggtggagctggagcgccagatccggcgcctgcacggggccgtcggtaacgccgtcgcggacgacaagcacctggtcttcgccagcggctccctgcagctcatcaacgcgctggtgcacgcgctgtcgccgtactacccggcgtacagacagcaaacctccatgttcgacggccgcgagtacagatgggccggaaccacggccttgtgggccaactcgtcacgggcgaactccaccgacggcaccttcatcgagttcgtcacgtcgcctaacaacccagacgccctgctccgcgagcccgtcctccgcggctcggcggcggcgatcgtcgaccacgcgtactactggccgcacttcacgcacatcccggcgccggccgacgaggacatcatgatgttcaccgtctccaagccatccggacatgctggaagcagattcggatgggcgctgatcagggacgacgaggtggccaagcgggctttagagtacctgagggacagcaacatgggcgcgtcgcgggacacccagctgcggatgctggggatcttcaagttcatgctggccaacctgcgcggcaaggacgacatcttcgccttcggccacgacgtgatgaggagcaggtggctcaggctgagcgccgccgtgtcgcggacccgccgcatcacgctgcagaagatcgcgccccagtactgcacgtacttcggccgggtcagagagccatccccagcctacgcatgggtcaagtgcgagatggaggaagacgaagactgctacgaggcgctgctgaaggcgaacatcatcacgcgcagcggcgtccagtatgaggcgagcagcaggtacacgaggatcagcctcctcaagtcggacgacgacttcgacgtgctcatggagaggcttgaagatcttgtcgatgccgacaagtacgacgattccaacggttcgagctcaatgtagcaacggtaatccacggaagttcggaagcttggggcggtttagatccacctctctaaattttaagaacactctagctcacattgtatgaggtgggctaaattaaaatgcatatgatcagctaggcgctgattgttctgcgaatgtagtggaacagtcaactagaagttgactgtgttcccacaataaaactacctatattggattggcgcaaattatgcggtcagtatatcattccatatttatagtacaacttacagtttgttggattatttggttcatgttattacaattattctatctttttaggccagttttaatgaatagttttcgtaacacagttactaactccaaaagagagtcttaaactaggtccaag

SEQ ID NO: 203254 - DNA, 869 bp, Zea Mays
gctctacatacctttgagatcgagaggtgctcccatggtgtggtgatgatggaacgtgtgaactaactgcttcttttggttccaaactataagacggtttggtttttccggataaattggttggctagggattgccgccccagctggctggttatatattaggctgtcgccgccaaagaaagaaaggcctgcttcttcacctcgcgctccaggttcatgttttgagcgtgtacagtgcatgtggtttcagaaatggggacgctggcgtgcccatggagatctggccacctctttgctttcatcaccttcgccgtgctgttcttctcgacttcatttgccgggagacagtacagtttcttgatggatcaagatgccctacgtcaacaagaaggagagggagcacgaactgagcagaaggaagcgctagtgccactggtgcaagctcggcggctcagcgtcaagacgaacgattacagcagctatgacccttccccgtccatggacaagccacactccaagctcataccgaactgatcaatcatgtacccgtccaggttgcagcagtcgagttgccgatgagaaatttaacagcttaaatgtgtgcctgatttatatatacagaagcattatattactaggcttgcttaaactgttctcatgacatctaatatcatattattatagatgtgacatatagatgtttacttcttctttgtattcatacgcagtcacaggcttcttctcaagattagatcaagtagttagtataataagagtagcaactactttgtcaaactctgaatgcaagtctcctaaacaattttaacaacaagctggttctactgccagagcattcaaccacacaagag

SEQ ID NO: 203255 - DNA, 879 bp, Zea Mays
gctctacatacctttgagatcgagaggtgctcccatggtgtggtgatgatggaacgtgtgaactaactgcttcttttggttccaaactataagacggtttggtttttccggataaattgcagaaagcaggttggctagggattgccgccccagctggctggttatatattaggctgtcgccgccaaagaaagaaaggcctgcttcttcacctcgcgctccaggttcatgttttgagcgtgtacagtgcatgtggtttcagaaatggggacgctggcgtgcccatggagatctggccacctctttgctttcatcaccttcgccgtgctgttcttctcgacttcatttgccgggagacagtacagtttcttgatggatcaagatgccctacgtcaacaagaaggagagggagcacgaactgagcagaaggaagcgctagtgccactggtgcaagctcggcggctcagcgtcaagacgaacgattacagcagctatgacccttccccgtccatggacaagccacactccaagctcataccgaactgatcaatcatgtacccgtccaggttgcagcagtcgagttgccgatgagaaatttaacagcttaaatgtgtgcctgatttatatatacagaagcattatattactaggcttgcttaaactgttctcatgacatctaatatcatattattatagatgtgacatatagatgtttacttcttctttgtattcatacgcagtcacaggcttcttctcaagattagatcaagtagttagtataataagagtagcaactactttgtcaaactctgaatgcaagtctcctaaacaattttaacaacaagctggttctactgccagagcattcaaccacacaagag

SEQ ID NO: 203256 - DNA, 773 bp, Zea Mays
cgtgcagtatctacgaaagcaacgagggccggccggtcgctagatcgtcagtggaaattcttttaggctggcagtggcagcagccagcaggcccttttccctttcatctctgtctccatgccactgctctacatacctttgagatcgagaggtgctcccatggtgtggtgatgatggaacgtgtgaactaactgcttcttttggttccaaactataagacggtttggtttttccggataaattgggagacagtacagtttcttgatggatcaagatgccctacgtcaacaagaaggagagggagcacgaactgagcagaaggaagcgctagtgccactggtgcaagctcggcggctcagcgtcaagacgaacgattacagcagctatgacccttccccgtccatggacaagccacactccaagctcataccgaactgatcaatcatgtacccgtccaggttgcagcagtcgagttgccgatgagaaatttaacagcttaaatgtgtgcctgatttatatatacagaagcattatattactaggcttgcttaaactgttctcatgacatctaatatcatattattatagatgtgacatatagatgtttacttcttctttgtattcatacgcagtcacaggcttcttctcaagattagatcaagtagttagtataataagagtagcaactactttgtcaaactctgaatgcaagtctcctaaacaattttaacaacaagctggttctactgccagagcattcaaccacacaagag

SEQ ID NO: 203257 - DNA, 1203 bp, Zea Mays
tccccgcaacttatataaaaaccaatcgtctgtcctctctgccctctcgtccaaaaccctagccctcgcgccgccgcctccttcgccacccagcgctcgagctcctcgctccctgcgagcgcgcgccgcaacgccaccatgaagttcaacatcgcgaacccttccaccgggtgccaaaagaagctggaaatcgatgacgaccagaagctgcgtgccttttatgaccgaaggatatcccaggaggtcagtggtgatgctctgggtgaggagttcaagggttatgtcttcaagatcatgggtggatgtgacaagcaaggcttcccaatgaagcaaggagttttgacttctggtcgtgttcgtcttctgctccatagggggactccctgcttccgtggttatggcaggcgtaatggtgagcgcaggaggaagtctgtccgtggttgcatcgtgagccaagacctatctgttatcaacttggtgattgtgaagaagggtgagaatgatctgcctggtctgactgacactgagaagccaaggatgaggggtcccaagagggcctccaagatcagaaagctgttcaaccttaacaaggatgatgatgtacgcaagtacgtgaacacataccgcaggacattcactaccaagaacggtcagcaaggcacctaagatccaacggcttgtgacacccttgaccctccagaggaagcgtgctagaatcgctgacaagaagaagaggataactaagaagaagtctgaggctgctgagtaccagaagcttcttgcccagaggctgaaggaacagagagaccgccggagcgagagcttggccaagaggaggtccaagctttctgccgccgccaaggcttctgctgccacctctgcttaagaatgttcagtgttttgggatctttgtaaggtctatcttgtaacggcaaaagtgttttgggatctttgtaagctccatagttcacatcacttaagtgtttctgctagtagtggatccacaactatttgcttgcttggctctgagtcacacctgaccgatcaatgcaggtgtcactttgcttttaactgtttacatataaagagtcgagtttcgcacgtggccacctgggtcctgattaatctacccatatagctacgttgggtttagatgcttaggcattcttgtaaattgttttcttaaaactagttttgtttctc

SEQ ID NO: 203258 - DNA, 521 bp, Zea Mays
ctgggcatggccgcatggcccatctcttgtcacactggcttctatgagcccaagagccgcttcggccttccgctctccgtgttgccgagctgcggcgggcgttgcgcctccctcgcctcgccagtcccctcgcctctttctcgtttgcggcggcgtccacagcatctgcggctcctgccaccacgtttcggctgcgaccccttcgcccgaaatacgaatgatgagagcaggataagataagcaaagcaaattatgcgctgcagaagtcctttgcattgcagttttccactggaaggttgtgatgcaaggtgaaagatcccgcgccatttcagcagagcagatgttcccaagagcacacaatgcaaggcccacgatgaactggttcgtgtggttgagatctctgcccccaaattaagcactaaacattactcaaaactcagcactgcatttgaggaaacaacactcccggagcgatattgcagagacagcgtgggcggcctactgtttgagggagttggtga

SEQ ID NO: 203259 - DNA, 993 bp, Zea Mays
gaatttgatatactgaaccgacggctttcaatcggaagggcccctgtccccctcctaagtcctaactcctatccacaatggcacaatattatcgctgccctcccctttcgtcatccatgacttccctccccgccgcggtcatggccaccgcgacgacgctgcccctaggcctcctcccctccaaaacgctgaccctctcccctctcccttctgcgcgccgatccctctccatcgccgccgaggagcccgcggtaccggagcccgtagaggcgcagctcgccgccgcgggggctgggaaggacgccgacatcttcgctgttgtcatgattggttcaagacaatacattgtgatgccgggcaggtatatatacacacagagactgaaaggtgccaatgtcaatgatcagatcatattaaacaaggtgctactggtgtcaactagagaaaaagcttacattggcatgccagtggtgaccaacgctgctgttcacgcagtggttgaagaacagggacgtgatgataaagttatagtcttcaagtacaagaagaagaagaagtaccagaggaaacttggtcacagacagccaaacacaaggttaagaatcacaggcataagtggatacgaagagtaccctgctgacccaatacttgaccctgctgcagcttaagctaaattgtaagttatgtagttacaaatcggctggtagtacagtagcatgcaagttttgttcttgtttactttttttttctctggaaggaacacttttcatcaaaattttaccttgttttgtgttccaaatgctgccagtcaacaagtggttccatgtatttatttcatgagctcttattcttgttccttttcaacttgtgtgtgctagccactagccagttgtattacatgacattccataaagaagagatttctttttactacaagttgggcattctagccttcatttgggcagtttgcatggtaggtgatacgctcaccac

SEQ ID NO: 203260 - DNA, 792 bp, Zea Mays
gaatttgatatactgaaccgacggctttcaatcggaagggcccctgtccccctcctaagtcctaactcctatccacaatggcacaatattatcgctgccctcccctttcgtcatccatgacttccctccccgccgcggtcatggccaccgcgacgacgctgcccctaggcctcctcccctccaaaacgctgaccctctcccctctcccttctgcgcgccgatccctctccatcgccgccgtggagccccggcgctggctcctccgagccgccgctgaggaggcgcctgaggccgtggaggttgagttcgtggagcccgacgcggaggcggaggaggagcccgcggtaccggagcccgtagaggcgcagctcgccgccgcgggggctgggaaggacgccgacatcttcgctgttgtcatgattggttcaagacaatacattgtgatgccgggcaggtatatatacacacagagactgaaaggtgccaatgtcaatgatcagatcatattaaacaaggtgctactggtgtcaactagagaaaaagcttacattggcatgccagtggtgaccaacgctgctgttcacgcagtggttgaagaacagggacgtgatgataaagttatagtcttcaagtacaagaagaagaagaagtaccagaggaaacttggtcacagacagccaaacacaaggttaagaatcacaggcataagtggatacgaagagtaccctgctgacccaatacttgaccctgctgcagcttaagctaaattctaggcaaaaaatgcaattccat

SEQ ID NO: 203261 - DNA, 2887 bp, Zea Mays
agacgaaacctgtttttccgacaatcgagcgccgaaaaaggactgccaccaaccgctcgctttccctcacctccccacctctctcgctccctccctccctccctcccattgcaggatcggcaccgatgcgattcaaccgcggcctcgcatccggtgcggaggtctgcaattggggggaggctcctctccgccgttggaaccgctgcggcgtcgcagcctgtgcgactttcctgctggttcctcatccctcaggtacgcgcttcgcgccctggacgttctcttgttgccatccacatttgagtgtgatcctggccccgctgggcaatgttactctgttcttcttctcttttttttttgacggaactgtagtgaccggatcctctacaggaggaattaattaaagaaagaaagcgttacagggaatgctggtctgtctgtggatgctgtttgtgctaatgtggctgattcaggtttcattttctctgtggttttcagggacagattttgcattctttggcattactgtttgatggcagacagtagtgctccttctctgtggaggcattggggcaaaaggcagttgaactgaacgggcacatcaatagtctctggcctccaagggaaattgggaaattcagattgaacgtggctgcatcatttttcctttcattggtcttttcagcaacagcgatccattctcgtaggggggagagagagagagagagagagggagagaaatcaaagaggagagtgatcatggagcatgtgatcggagggaagtataagcttgggaggaagattgggagcggatccttcggagagctatatctcggtgttaatatacagaatggagaggaagtgggaataaaattggagcctgtgaaaacaaaacatccacagctgcactatgaatctaaagtttatatgctgctgcagggtggaaacggtatcccacacctcaagtggtatggtgttgagggggagtacaatgttatggtgatcgatcttcttggcccaagcttggaagatttgtttaattcctgcaacaggaaattttctatgaaaacggtgcttatgcttgctgatcaactggtgagtttattcattccatattcaaccttacgctgccctgcaacagttaggaggcaagtcaactttctggaatttgataacagctattggttgggagttacatgttcagaagtttcatgagcattctgccataagtgttgccttcttttgtgggttttaattccaaagtattagatcattgatggtacaaatggatttcatgaacaccgtatgttgttctaagtgtatcgcaggcaagctttgcaagattgtacatattttaagtttgattctttttccttagtgggtgttggaaggagagcgagattttattattgtcctggacttacattattaaatcttccatttttagataaaccgagtggaatacatgcattccaagggatttattcatcgtgacatcaagccagacaacttccttataggcttaggtcggaaagctaatcaggtctatatcattgattatgggcttgctaagaaatacaaggaccttcagactcataaacacatcccatacagggagaacaaaaatctgactggaacagcacgttatgctagtgtgaatactcatcttggaatagaacaaagcaggagagatgatctggagtctgttggctatcttctgctatattttttaagaggaagcctcccatggcagggccttaaagctggcactaagaaacaaaagtatgataaaattagtgaaaagaaaatgcttacctcggcagagattctgtgcaaatcttacccgccggagttcgtctcatatttccactattgtcgctccctgcgatttgaagacaggccagattactcttcaatgaagaagctctttcgtgatgtatttatacgggaaggataccaatttgattacgtatttgactggactgcactcaagtaccctcaaatgggctccaacaacaagcttgttcaacaaccaagtgcaagaatggctggagttggaccatcagttgagagaacagacaaagcttccatgggacaagagatccgggataggttcactggtgctgttgaggcattcgccagaagaaatccaggctctgggcgccctgcagatcattccagtcattccaggcacaaaagctttgcagattcctttggaacgtccaacgaagcagttgccgactcatcagagaaaacgcgcatcttgtcccggggagggagctcgtcgaaaatgcccgcagctccgtccacccggccgacctcttcgggggactgcagtgaccagaaccgccggtgggtctccggcagcagtggcggcagcgggcgcccgtcccccgcgcagaggctccaccactcgggaggcgccgagaacagcaggtcgtccccgcgctcccccgtggcccggaacgcggccgggaggggaggctccgcctcgcgggacaacacgacgttccgcagcctcgagcgcctcaccatcaccaccagcaggaggaagtgagctgccgaggaccacgccgacgaattctgagagtggaaggcggttactaggccgaggaacttttgcgggatccttgctctctgcagctaaagcaaatcggcaaatagatgatggatggatggttacaaggctgccatgaaaatgcaccctttccccaaaccccagcgtatagtataacgctctccccaaactccaagagggaagacaactccaaagtacaatgcaatcttgattctgtcgatctggcactagttttaaggtgttattgcagaatccctccatttgaccataaattttaaaaacgtatacaagaatctgagttaattttgttta

SEQ ID NO: 203262 - DNA, 2212 bp, Zea Mays
agacgaaacctgtttttccgacaatcgagcgccgaaaaaggactgccaccaaccgctcgctttccctcacctccccacctctctcgctccctccctccctccctcccattgcaggatcggcaccgatgcgattcaaccgcggcctcgcatccggtgcggaggtctgcaattggggggaggctcctctccgccgttggaaccgctgcggcgtcgcagcctgtgcgactttcctgctggttcctcatccctcagggacagattttgcattctttggcattactgtttgatggcagacagtagtgctccttctctgtggaggcattggggcaaaaggcagttgaactgaacgggcacatcaatagtctctggcctccaagggaaattgggaaattcagattgaacgtggctgcatcatttttcctttcattggtcttttcagcaacagcgatccattctcgtaggggggagagagagagagagagagagggagagaaatcaaagaggagagtgatcatggagcatgtgatcggagggaagtataagcttgggaggaagattgggagcggatccttcggagagctatatctcggtgttaatatacagaatggagaggaagtgggaataaaattggagcctcaagtggtatggtgttgagggggagtacaatgttatggtgatcgatcttcttggcccaagcttggaagatttgtttaattcctgcaacaggaaattttctatgaaaacggtgcttatgcttgctgatcaactgataaaccgagtggaatacatgcattccaagggatttattcatcgtgacatcaagccagacaacttccttataggcttaggtcggaaagctaatcaggtctatatcattgattatgggcttgctaagaaatacaaggaccttcagactcataaacacatcccatacagggagaacaaaaatctgactggaacagcacgttatgctagtgtgaatactcatcttggaatagaacaaagcaggagagatgatctggagtctgttggctatcttctgctatattttttaagaggaagcctcccatggcagggccttaaagctggcactaagaaacaaaagtatgataaaattagtgaaaagaaaatgcttacctcggcagagattctgtgcaaatcttacccgccggagttcgtctcatatttccactattgtcgctccctgcgatttgaagacaggccagattactcttcaatgaagaagctctttcgtgatgtatttatacgggaaggataccaatttgattacgtatttgactggactgcactcaagtaccctcaaatgggctccaacaacaagcttgttcaacaaccaagtgcaagaatggctggagttggaccatcagttgagagaacagacaaagcttccatgggacaagagatccgggataggttcactggtgctgttgaggcattcgccagaagaaatccaggctctgggcgccctgcagatcattccagtcattccaggcacaaaagctttgcagattcctttggaacgtccaacgaagcagttgccgactcatcagagaaaacgcgcatcttgtcccggggagggagctcgtcgaaaatgcccgcagctccgtccacccggccgacctcttcgggggactgcagtgaccagaaccgccggtgggtctccggcagcagtggcggcagcgggcgcccgtcccccgcgcagaggctccaccactcgggaggcgccgagaacagcaggtcgtccccgcgctcccccgtggcccggaacgcggccgggaggggaggctccgcctcgcgggacaacacgacgttccgcagcctcgagcgcctcaccatcaccaccagcaggaggaagtgagctgccgaggaccacgccgacgaattctgagagtggaaggcggttactaggccgaggaacttttgcgggatccttgctctctgcagctaaagcaaatcggcaaatagatgatggatggatggttacaaggctgccatgaaaatgcaccctttccccaaaccccagcgtatagtataacgctctccccaaactccaagagggaagacaactccaaagtacaatgcaatcttgattctgtcgatctggcactagttttaaggtgttattgcagaatccctccatttgaccataaattttaaaaacgtatacaagaatctgagttaattttgttta

SEQ ID NO: 203263 - DNA, 2312 bp, Zea Mays
agacgaaacctgtttttccgacaatcgagcgccgaaaaaggactgccaccaaccgctcgctttccctcacctccccacctctctcgctccctccctccctccctcccattgcaggatcggcaccgatgcgattcaaccgcggcctcgcatccggtgcggaggtctgcaattggggggaggctcctctccgccgttggaaccgctgcggcgtcgcagcctgtgcgactttcctgctggttcctcatccctcagggacagattttgcattctttggcattactgtttgatggcagacagtagtgctccttctctgtggaggcattggggcaaaaggcagttgaactgaacgggcacatcaatagtctctggcctccaagggaaattgggaaattcagattgaacgtggctgcatcatttttcctttcattggtcttttcagcaacagcgatccattctcgtaggggggagagagagagagagagagagggagagaaatcaaagaggagagtgatcatggagcatgtgatcggagggaagtataagcttgggaggaagattgggagcggatccttcggagagctatatctcgtgtgacttttcttgatctaggtgttaatatacagaatggagaggaagtgggaataaaattggagcctgtgaaaacaaaacatccacagctgcactatgaatctaaagtttatatgctgctgcagggtggaaacggtatcccacacctcaagtggtatggtgttgagggggagtacaatgttatggtgatcgatcttcttggcccaagcttggaagatttgtttaattcctgcaacaggaaattttctatgaaaacggtgcttatgcttgctgatcaactgataaaccgagtggaatacatgcattccaagggatttattcatcgtgacatcaagccagacaacttccttataggcttaggtcggaaagctaatcaggtctatatcattgattatgggcttgctaagaaatacaaggaccttcagactcataaacacatcccatacagggagaacaaaaatctgactggaacagcacgttatgctagtgtgaatactcatcttggaatagaacaaagcaggagagatgatctggagtctgttggctatcttctgctatattttttaagaggaagcctcccatggcagggccttaaagctggcactaagaaacaaaagtatgataaaattagtgaaaagaaaatgcttacctcggcagagattctgtgcaaatcttacccgccggagttcgtctcatatttccactattgtcgctccctgcgatttgaagacaggccagattactcttcaatgaagaagctctttcgtgatgtatttatacgggaaggataccaatttgattacgtatttgactggactgcactcaagtaccctcaaatgggctccaacaacaagcttgttcaacaaccaagtgcaagaatggctggagttggaccatcagttgagagaacagacaaagcttccatgggacaagagatccgggataggttcactggtgctgttgaggcattcgccagaagaaatccaggctctgggcgccctgcagatcattccagtcattccaggcacaaaagctttgcagattcctttggaacgtccaacgaagcagttgccgactcatcagagaaaacgcgcatcttgtcccggggagggagctcgtcgaaaatgcccgcagctccgtccacccggccgacctcttcgggggactgcagtgaccagaaccgccggtgggtctccggcagcagtggcggcagcgggcgcccgtcccccgcgcagaggctccaccactcgggaggcgccgagaacagcaggtcgtccccgcgctcccccgtggcccggaacgcggccgggaggggaggctccgcctcgcgggacaacacgacgttccgcagcctcgagcgcctcaccatcaccaccagcaggaggaagtgagctgccgaggaccacgccgacgaattctgagagtggaaggcggttactaggccgaggaacttttgcgggatccttgctctctgcagctaaagcaaatcggcaaatagatgatggatggatggttacaaggctgccatgaaaatgcaccctttccccaaaccccagcgtatagtataacgctctccccaaactccaagagggaagacaactccaaagtacaatgcaatcttgattctgtcgatctggcactagttttaaggtgttattgcagaatccctccatttgaccataaattttaaaaacgtatacaagaatctgagttaattttgttta

SEQ ID NO: 203264 - DNA, 2279 bp, Zea Mays
agacgaaacctgtttttccgacaatcgagcgccgaaaaaggactgccaccaaccgctcgctttccctcacctccccacctctctcgctccctccctccctccctcccattgcaggatcggcaccgatgcgattcaaccgcggcctcgcatccggtgcggaggtctgcaattggggggaggctcctctccgccgttggaaccgctgcggcgtcgcagcctgtgcgactttcctgctggttcctcatccctcagggacagattttgcattctttggcattactgtttgatggcagacagtagtgctccttctctgtggaggcattggggcaaaaggcagttgaactgaacgggcacatcaatagtctctggcctccaagggaaattgggaaattcagattgaacgtggctgcatcatttttcctttcattggtcttttcagcaacagcgatccattctcgtaggggggagagagagagagagagagagggagagaaatcaaagaggagagtgatcatggagcatgtgatcggagggaagtataagcttgggaggaagattgggagcggatccttcggagagctatatctcggtgttaatatacagaatggagaggaagtgggaataaaattggagcctgtgaaaacaaaacatccacagctgcactatgaatctaaagtttatatgctgctgcagggtggaaacggtatcccacacctcaagtggtatggtgttgagggggagtacaatgttatggtgatcgatcttcttggcccaagcttggaagatttgtttaattcctgcaacaggaaattttctatgaaaacggtgcttatgcttgctgatcaactgataaaccgagtggaatacatgcattccaagggatttattcatcgtgacatcaagccagacaacttccttataggcttaggtcggaaagctaatcaggtctatatcattgattatgggcttgctaagaaatacaaggaccttcagactcataaacacatcccatacagggagaacaaaaatctgactggaacagcacgttatgctagtgtgaatactcatcttggaatagaacaaagcaggagagatgatctggagtctgttggctatcttctgctatattttttaagaggaagggccttaaagctggcactaagaaacaaaagtatgataaaattagtgaaaagaaaatgcttacctcggcagagattctgtgcaaatcttacccgccggagttcgtctcatatttccactattgtcgctccctgcgatttgaagacaggccagattactcttcaatgaagaagctctttcgtgatgtatttatacgggaaggataccaatttgattacgtatttgactggactgcactcaagtaccctcaaatgggctccaacaacaagcttgttcaacaaccaagtgcaagaatggctggagttggaccatcagttgagagaacagacaaagcttccatgggacaagagatccgggataggttcactggtgctgttgaggcattcgccagaagaaatccaggctctgggcgccctgcagatcattccagtcattccaggcacaaaagctttgcagattcctttggaacgtccaacgaagcagttgccgactcatcagagaaaacgcgcatcttgtcccggggagggagctcgtcgaaaatgcccgcagctccgtccacccggccgacctcttcgggggactgcagtgaccagaaccgccggtgggtctccggcagcagtggcggcagcgggcgcccgtcccccgcgcagaggctccaccactcgggaggcgccgagaacagcaggtcgtccccgcgctcccccgtggcccggaacgcggccgggaggggaggctccgcctcgcgggacaacacgacgttccgcagcctcgagcgcctcaccatcaccaccagcaggaggaagtgagctgccgaggaccacgccgacgaattctgagagtggaaggcggttactaggccgaggaacttttgcgggatccttgctctctgcagctaaagcaaatcggcaaatagatgatggatggatggttacaaggctgccatgaaaatgcaccctttccccaaaccccagcgtatagtataacgctctccccaaactccaagagggaagacaactccaaagtacaatgcaatcttgattctgtcgatctggcactagttttaaggtgttattgcagaatccctccatttgaccataaattttaaaaacgtatacaagaatctgagttaattttgttta

SEQ ID NO: 203265 - DNA, 1500 bp, Zea Mays
agacgaaacctgtttttccgacaatcgagcgccgaaaaaggactgccaccaaccgctcgctttccctcacctccccacctctctcgctccctccctccctccctcccattgcaggatcggcaccgatgcgattcaaccgcggcctcgcatccggtgcggaggtctgcaattggggggaggctcctctccgccgttggaaccgctgcggcgtcgcagcctgtgcgactttcctgctggttcctcatccctcagggacagattttgcattctttggcattactgtttgatggcagacagtagtgctccttctctgtggaggcattggggcaaaaggcagttgaactgaacgggcacatcaatagtctctggcctccaagggaaattgggaaattcagattgaacgtggctgcatcatttttcctttcattggtcttttcagcaacagcgatccattctcgtaggggggagagagagagagagagagagggagagaaatcaaagaggagagtgatcatggagcatgtgatcggagggaagtataagcttgggaggaagattgggagcggatccttcggagagctatatctcggtgttaatatacagaatggagaggaagtgggaataaaattggagcctgtgaaaacaaaacatccacagctgcactatgaatctaaagtttatatgctgctgcagggtggaaacggtatcccacacctcaagtggtatggtgttgagggggagtacaatgttatggtgatcgatcttcttggcccaagcttggaagatttgtttaattcctgcaacaggaaattttctatgaaaacggtgcttatgcttgctgatcaactgataaaccgagtggaatacatgcattccaagggatttattcatcgtgacatcaagccagacaacttccttataggcttaggtcggaaagctaatcaggtctatatcattgattatgggcttgctaagaaatacaaggaccttcagactcataaacacatcccatacagggagaacaaaaatctgactggaacagcacgttatgctagtgtgaatactcatcttggaatagaacaaagcaggagagatgatctggagtctgttggctatcttctgctatattttttaagaggaagcctcccatggcagggccttaaagctggcactaagaaacaaaagtatgataaaattagtgaaaagaaaatgcttacctcggcagagattctgtgcaaatcttacccgccggagttcgtctcatatttccactattgtcgctccctgcgatttgaagacaggccagattactcttcaatgaagaagctctttcgtgatgtatttatacgggaaggataccaatttgattacgtatttgactggactgcactcaagtaccctcaaatgggctccaacaacaagcttgttcaacaaccaagtgcaagaatggctggagttggaccatcagttgagagaacagacaaagcttccattgcgttt

SEQ ID NO: 203266 - DNA, 1286 bp, Zea Mays
agacgaaacctgtttttccgacaatcgagcgccgaaaaaggactgccaccaaccgctcgctttccctcacctccccacctctctcgctccctccctccctccctcccattgcaggatcggcaccgatgcgattcaaccgcggcctcgcatccggtgcggaggtctgcaattggggggaggctcctctccgccgttggaaccgctgcggcgtcgcagcctgtgcgactttcctgctggttcctcatccctcagggacagattttgcattctttggcattactgtttgatggcagacagtagtgctccttctctgtggaggcattggggcaaaaggcagttgaactgaacgggcacatcaatagtctctggcctccaagggaaattgggaaattcagattgaacgtggctgcatcatttttcctttcattggtcttttcagcaacagcgatccattctcgtaggggggagagagagagagagagagagggagagaaatcaaagaggagagtgatcatggagcatgtgatcggagggaagtataagcttgggaggaagattgggagcggatccttcggagagctatatctcggtgttaatatacagaatggagaggaagtgggaataaaattggagcctgtgaaaacaaaacatccacagctgcactatgaatctaaagtttatatgctgctgcagggtggaaacggtatcccacacctcaagtggtatggtgttgagggggagtacaatgttatggtgatcgatcttcttggcccaagcttggaagatttgtttaattcctgcaacaggaaattttctatgaaaacggtgcttatgcttgctgatcaactgataaaccgagtggaatacatgcattccaagggatttattcatcgtgacatcaagccagacaacttccttataggcttaggtcggaaagctaatcaggtctatatcattgattatgggcttgctaagaaatacaaggaccttcagactcataaacacatcccatacagggagaacaaaaatctgactggaacagcacgttatgctagtgtgaatactcatcttggaatagaacaaagcaggagagatgatctggagtctgttggctatcttctgctatattttttaagaggaagattctgtgcaaatcttacccgccggagttcgtctcatatttccactattgtcgctccctttcttctgagtgaccccgctaatgtgaccattgttctcgcctgcactatgatccggtgttaggaaactgggtctcattatagatt

SEQ ID NO: 203267 - DNA, 4075 bp, Zea Mays
gtttagatcaactctgcccccgccgtacgccccacgccctcctccccgcgaggagccaccagcccaccatctacgccgcctgttctgatgccgccgcccacgcgaggccgaggccgaggccgtggccgcggccgcgggcgcgggcgcggtcgcggtcgcgggaggccaagtaaggacaccgttgctgaggactccgcgcacgccaccgaggaaagtggcgaggaaaacctccaggagaaggtgcaggaaggtggcaaggtaaacctcacggagaaggtgcaggaaggtggcgaggaaaacctcacggagaaggtgcaggaaggtggcgaggaaaacctcacggaaaaggagaatgaagggatagtggaggtctcaaaacccccccaaaggcgtcggaaggatcctgttgcagacccctcttctcttgagtctagtggtttcatgcgatttcgggagaggaggaatgcttcagcggttcaggagcaggggcctaagaagagaaggattactgaggattcaaacatgtgccatcagtgccagaggaatgatagcggaagagttgtacggtgccaaggctgtgtcgtccgaaaaagaaaatacagatattgtgtgaagtgcattaaacgctggtatccacatttatcagaggatgattttgcgaacaattgcccagtttgtcaaaataattgcaattgtaaggcttgtctgcggggagacataacccgagccaactcgaggaaaaaaaagaagttactgcaaataaattctggaggatatagtgtgtctgaacaagataaaattaaattctcaatgcgtatcgtgcactttttgcttccttggctgaaacaattccatcaagagcagatgcaagagaaaagtgccgaggctgcaactaaaggtattgatgcagacaaactggaggtccctctaaccatttgtggaaaaaaggaacgtatatactgcaacaactgcaggacatctattgttgacttccacagaacctgcaataaatgtaactatgatctctgtctccagtgctgccaggagcttcgtcgaggccttgtttctggtaatgatgccaaggttgatggtggaggcaagcaagattttctatcgggagttagtcatgataaaatcataagcaaagggccatccgatggacagaatgacatgttgatagatagtgtagttcctggtgaaaacaacacttctagcttgagacagtggagtgtgaataaagatggaaccataccttgcccaccaaatgcatttggtggttgtgggagctctcttcttgaactgaagtgcttgtttaaagagaagtttattgctgaattactggagaaagctaattcagcgctcaataatgaaatggaggtgaagatagaaggatcaaaatgtccctgcttcactgaatccggtgacatggatgatggtatatcacggaaatcatcttgcagggagaattcctgtgataactacatatattgcccaaccgctacagatgtccaaaatggaagtttagaccatttccaggagcattggttgaagggtgaacctgtaattgtccgtgatacacttgcgttgacttctggattaagctgggaaccgatggttatgtggcgtgccttacgagaaaagaaagagaaagttgagaggctctcagttcttgctcttgaatgcttgggttggtgtgaggtcgatgtaaatattcatatgttttttgcggggtattcaagtgggcttgttggtccagacgatttgcccctgttgcttaagcttaaagattggccaccacatagttcttttgaggagcggctcccaaggcatggtgcagagtttatgtctgcattgccatttcgtgaatacactgatcctaaatggggacctcttaatctggcagtaaagcttcccgataatgttaataagccagaccttggtccaaagacttatattgcatacggtgtttccaaagagttgggaattggtgattctgtcaccaagcttcactgtgatatgtctgatgcggtcaatatcctcacacatactgatgaaataaaactcaaagcaaaaaggattgccgcggtggaaaagaagaagcggtgtttaggaatgaagattctatctaccaaggaagcaagtggaggccttcaacggtgtgcagattattttggtatgccaacagctcccagtgaatctaacaaggagccaaggcctgaagagtgtgtaaatgaactgggcattaaacaaccagtacagcatgttgcttccgaggagcaggaaggagttcaagatgatgccaaggcagatgcaaatgttatgaatgtttcttttggtaagggaaaatcagaagattcttttggtacaattaatggtaccaacagtggagataaaatagaatctcctagtggtttagcagaaagaacattgactcagcctaccactaagggttgcagtaagcagcgtggccgtagttctaatggtagaggaaacaggactaaaaaaatagaagaggggaatgcgtctggactaattgctgtggctcccgagtcagaagatgatgatgatgatgccgcatttatagatggaaaccaagcagagggtggtgcactgtgggatatttttcgacgggaagatgtgagcaaactgcatgattatctaatgaagcatgcacatgagtttagacattgcaactttgagccagtgaagcaggttactcatcctatacatgatcagtgtttttatctaacaattgagcacaagagaaagcttaaggaagaatatggagtcgagccttggacatttgaacagaagctaggtgaggcagtatttatcccggcaggatgtccccaccagtcttgcataaaggttgcactagattttgtttctccggaaaatgtccgagagtgcatcaggttaacagaaggtttccgtctgctgccgaagtggcataaggtgaatgaagataaactggaggttaagaagatagctcttcatgcattcaatcaagctattaaagatatcactgatgaatcatctaatagcaatgaaagcaaatggatccggagataatgaggatcatgaaggccattgaatccatgcttgatgtcatggaagttagcaccacccgcattcgacatcttgctatcgagaacctgaatgaaaaccgtagtggcttatcggatgccgacaagataacaaaacctgattttagtgtactatgcatgatattagtaccttatataatacgtagcttggagaaaaggccattcaccgtttctcattgttgggaggttctaaagaatgaagccaaatggttacacttggagcagggctcacaaaatattgatgtgctggtgaacaaaggtgtagggttttctccaagatgtcggatttgacactgaagaagattgagtattggaagaggtccgattgaacatttggcactgacattcaccaacttgttcaaatagaggaaaagaatatggaaatggagaaagagcgcatgtatgcatgtgtaggtcagggagtggctcggatcagccttgagtcaatttccactgcgttttcttcggttatggatgagcacgaggagtaaaagaaacagaagaaggctgagtgtgattctcatatgcttattttcttgtcctgtgtaatggatgtgtgtatgtgaaccatatgcgaacttaaacgtctttgtttgtaccggtcaggccattctgagtgagggttccgtctcttctttttaggactccactgcgaggtgtcggtgtgtgagaaatggtgcaaacgtgtgtatgaaactctacgaggcatactcttatctagtattgtgtctagtgaagaatgggacacatccgatgctactgtaaactcacttgttgcactcactttttgagttggatttttctttcaaacttttttgtatgctctcttgagtttatctaacactagatttcataagtgtgcaccattgtccataactagactcacttaggtaaagctatccattccatgtcctctttataatgtgacataaataaggattttatcactaatctaagggtgtgttcgg

SEQ ID NO: 203268 - DNA, 4187 bp, Zea Mays
gattcgcttcaatcccgctattgtttcgcgtggcggggagataagctggctcatccacacgtggttcctactaatttccaatcccagcaaactacacctgccgctgcttggggctgcttccgccgccgccgctcgatctagttcgttgagcatggctgcggaggcactgggagctatgcgttcccgttaccgcagtgcggctattgagccccttcgattacgattgagcaacccatctgattctggttgcggaagatacgtgtttcgaaatttgatttccgctatgctactagcatatatgcatatggaaagtggcgaggaaaacctccaggagaaggtgcaggaaggtggcaaggtaaacctcacggagaaggtgcaggaaggtggcgaggaaaacctcacggagaaggtgcaggaaggtggcgaggaaaacctcacggaaaaggagaatgaagggatagtggaggtctcaaaacccccccaaaggcgtcggaaggatcctgttgcagacccctcttctcttgagtctagtggtttcatgcgatttcgggagaggaggaatgcttcagcggttcaggagcaggggcctaagaagagaaggattactgaggattcaaacatgtgccatcagtgccagaggaatgatagcggaagagttgtacggtgccaaggctgtgtcgtccgaaaaagaaaatacagatattgtgtgaagtgcattaaacgctggtatccacatttatcagaggatgattttgcgaacaattgcccagtttgtcaaaataattgcaattgtaaggcttgtctgcggggagacataacccgagccaactcgaggaaaaaaaagaagttactgcaaataaattctggaggatatagtgtgtctgaacaagataaaattaaattctcaatgcgtatcgtgcactttttgcttccttggctgaaacaattccatcaagagcagatgcaagagaaaagtgccgaggctgcaactaaaggtattgatgcagacaaactggaggtccctctaaccatttgtggaaaaaaggaacgtatatactgcaacaactgcaggacatctattgttgacttccacagaacctgcaataaatgtaactatgatctctgtctccagtgctgccaggagcttcgtcgaggccttgtttctggtaatgatgccaaggttgatggtggaggcaagcaagattttctatcgggagttagtcatgataaaatcataagcaaagggccatccgatggacagaatgacatgttgatagatagtgtagttcctggtgaaaacaacacttctagcttgagacagtggagtgtgaataaagatggaaccataccttgcccaccaaatgcatttggtggttgtgggagctctcttcttgaactgaagtgcttgtttaaagagaagtttattgctgaattactggagaaagctaattcagcgctcaataatgaaatggaggtgaagatagaaggatcaaaatgtccctgcttcactgaatccggtgacatggatgatggtatatcacggaaatcatcttgcagggagaattcctgtgataactacatatattgcccaaccgctacagatgtccaaaatggaagtttagaccatttccaggagcattggttgaagggtgaacctgtaattgtccgtgatacacttgcgttgacttctggattaagctgggaaccgatggttatgtggcgtgccttacgagaaaagaaagagaaagttgagaggctctcagttcttgctcttgaatgcttgggttggtgtgaggtcgatgtaaatattcatatgttttttgcggggtattcaagtgggcttgttggtccagacgatttgcccctgttgcttaagcttaaagattggccaccacatagttcttttgaggagcggctcccaaggcatggtgcagagtttatgtctgcattgccatttcgtgaatacactgatcctaaatggggacctcttaatctggcagtaaagcttcccgataatgttaataagccagaccttggtccaaagacttatattgcatacggtgtttccaaagagttgggaattggtgattctgtcaccaagcttcactgtgatatgtctgatgcggtcaatatcctcacacatactgatgaaataaaactcaaagcaaaaaggattgccgcggtggaaaagaagaagcggtgtttaggaatgaagattctatctaccaaggaagcaagtggaggccttcaacggtgtgcagattattttggtatgccaacagctcccagtgaatctaacaaggagccaaggcctgaagagtgtgtaaatgaactgggcattaaacaaccagtacagcatgttgcttccgaggagcaggaaggagttcaagatgatgccaaggcagatgcaaatgttatgaatgtttcttttggtaagggaaaatcagaagattcttttggtacaattaatggtaccaacagtggagataaaatagaatctcctagtggtttagcagaaagaacattgactcagcctaccactaagggttgcagtaagcagcgtggccgtagttctaatggtagaggaaacaggactaaaaaaatagaagaggggaatgcgtctggactaattgctgtggctcccgagtcagaagatgatgatgatgatgccgcatttatagatggaaaccaagcagagggtggtgcactgtgggatatttttcgacgggaagatgtgagcaaactgcatgattatctaatgaagcatgcacatgagtttagacattgcaactttgagccagtgaagcaggttactcatcctatacatgatcagtgtttttatctaacaattgagcacaagagaaagcttaaggaagaatatggagtcgagccttggacatttgaacagaagctaggtgaggcagtatttatcccggcaggatgtccccaccaggttagaaatttgaagtcttgcataaaggttgcactagattttgtttctccggaaaatgtccgagagtgcatcaggttaacagaaggtttccgtctgctgccgaagtggcataaggtgaatgaagataaactggaggttaagaagatagctcttcatgcattcaatcaagctattaaagatatcactgatgaatcatctaatagcaatgaaagcaaatggatccggagataatgaggatcatgaaggccattgaatccatgcttgatgtcatggaagttagcaccacccgcattcgacatcttgctatcgagaacctgaatgaaaaccgtagtggcttatcggatgccgacaagataacaaaacctgattttagtgtactatgcatgatattagtaccttatataatacgtagcttggagaaaaggccattcaccgtttctcattgttgggaggttctaaagaatgaagccaaatggttacacttggagcagggctcacaaaatattgatgtgctggtgaacaaaggtgtagggttttctccaagatgtcggatttgacactgaagaagattgagtattggaagaggtccgattgaacatttggcactgacattcaccaacttgttcaaatagaggaaaagaatatggaaatggagaaagagcgcatgtatgcatgtgtaggtcagggagtggctcggatcagccttgagtcaatttccactgcgttttcttcggttatggatgagcacgaggagtaaaagaaacagaagaaggctgagtgtgattctcatatgcttattttcttgtcctgtgtaatggatgtgtgtatgtgaaccatatgcgaacttaaacgtctttgtttgtaccggtcaggccattctgagtgagggttccgtctcttctttttaggactccactgcgaggtgtcggtgtgtgagaaatggtgcaaacgtgtgtatgaaactctacgaggcatactcttatctagtattgtgtctagtgaagaatgggacacatccgatgctactgtaaactcacttgttgcactcactttttgagttggatttttctttcaaacttttttgtatgctctcttgagtttatctaacactagatttcataagtgtgcaccattgtccataactagactcacttaggtaaagctatccattccatgtcctctttataatgtgacataaataaggattttatcactaatctaagggtgtgttcgg

SEQ ID NO: 203269 - DNA, 2496 bp, Zea Mays
atggctgcggaggcactgggagctatgcgttcccgttaccgcagtgcggctattgagccccttcgattacgattgagcaacccatctgattctggttgcggaagatacgtgtttcgaaatttgatttccgctatgctactagcatatatgcatatggaaagtggcgaggaaaacctccaggagaaggtgcaggaaggtggcaaggtaaacctcacggagaaggtgcaggaaggtggcgaggaaaacctcacggagaaggtgcaggaaggtggcgaggaaaacctcacggaaaaggagaatgaagggatagtggaggtctcaaaacccccccaaaggcgtcggaaggatcctgttgcagacccctcttctcttgagtctagtggtttcatgcgatttcgggagaggaggaatgcttcagcggttcaggagcaggggcctaagaagagaaggattactgaggattcaaacatgtgccatcagtgccagaggaatgatagcggaagagttgtacggtgccaaggctgtgtcgtccgaaaaagaaaatacagatattgtgtgaagtgcattaaacgctggtatccacatttatcagaggatgattttgcgaacaattgcccagtttgtcaaaataattgcaattgtaaggcttgtctgcggggagacataacccgagccaactcgaggaaaaaaaagaagttactgcaaataaattctggaggatatagtgtgtctgaacaagataaaattaaattctcaatgcgtatcgtgcactttttgcttccttggctgaaacaattccatcaagagcagatgcaagagaaaagtgccgaggctgcaactaaaggtattgatgcagacaaactggaggtccctctaaccatttgtggaaaaaaggaacgtatatactgcaacaactgcaggacatctattgttgacttccacagaacctgcaataaatgtaactatgatctctgtctccagtgctgccaggagcttcgtcgaggccttgtttctggtaatgatgccaaggttgatggtggaggcaagcaagattttctatcgggagttagtcatgataaaatcataagcaaagggccatccgatggacagaatgacatgttgatagatagtgtagttcctggtgaaaacaacacttctagcttgagacagtggagtgtgaataaagatggaaccataccttgcccaccaaatgcatttggtggttgtgggagctctcttcttgaactgaagtgcttgtttaaagagaagtttattgctgaattactggagaaagctaattcagcgctcaataatgaaatggaggtgaagatagaaggatcaaaatgtccctgcttcactgaatccggtgacatggatgatggtatatcacggaaatcatcttgcagggagaattcctgtgataactacatatattgcccaaccgctacagatgtccaaaatggaagtttagaccatttccaggagcattggttgaagggtgaacctgtaattgtccgtgatacacttgcgttgacttctggattaagctgggaaccgatggttatgtggcgtgccttacgagaaaagaaagagaaagttgagaggctctcagttcttgctcttgaatgcttgggttggtgtgaggtcgatgtaaatattcatatgttttttgcggggtattcaagtgggcttgttggtccagacgatttgcccctgttgcttaagcttaaagattggccaccacatagttcttttgaggagcggctcccaaggcatggtgcagagtttatgtctgcattgccatttcgtgaatacactgatcctaaatggggacctcttaatctggcagtaaagcttcccgataatgttaataagccagaccttggtccaaagacttatattgcatacggtgtttccaaagagttgggaattggtgattctgtcaccaagcttcactgtgatatgtctgatgcggtaaatatacagttttgtgtatgcttcttggcattgatatgcaactctcaacaataaagacctatcttgttaagggcttaacaacacttgaatttacagatctacaacagtagcttaggtaataaatgcttaagtcctgaatttggtgttgttgtagctgcacctattatggtagtaataatgggtgccagttttggccgaccatagttctggaaaatctagtaacaatgtctcagttattaataaatccggaaaaaggcgtttccactttgaatccttctggaccaagcttgaggggtttcaggatattgtcccttgctgcatggaattctattgagtcggctacatgcctttttaagtccctggagatgaagttacaaggagctacaaaaagtttgcaggcctggagcgaaagcaggtcgagcacgtgagatcccaacttgctcttgctaaagaaatcctccatatgctggaaatagcgcaggatggtagagtgctcagccctgctgaacgctggctcaa

SEQ ID NO: 203270 - DNA, 2087 bp, Zea Mays
atgttctcaaaggcagaaaatgaaggtcaatatcctcacacatactgatgaaataaaactcaaagcaaaaaggattgccgcggtggaaaagaagaagcggtgtttaggaatgaagattctatctaccaaggaagcaagtggaggccttcaacggtgtgcagattattttggtatgccaacagctcccagtgaatctaacaaggagccaaggcctgaagagtgtgtaaatgaactgggcattaaacaaccagtacagcatgttgcttccgaggagcaggaaggagttcaagatgatgccaaggcagatgcaaatgttatgaatgtttcttttggtaagggaaaatcagaagattcttttggtacaattaatggtaccaacagtggagataaaatagaatctcctagtggtttagcagaaagaacattgactcagcctaccactaagggttgcagtaagcagcgtggccgtagttctaatggtagaggaaacaggactaaaaaaatagaagaggggaatgcgtctggactaattgctgtggctcccgagtcagaagatgatgatgatgatgccgcatttatagatggaaaccaagcagagggtggtgcactgtgggatatttttcgacgggaagatgtgagcaaactgcatgattatctaatgaagcatgcacatgagtttagacattgcaactttgagccagtgaagcaggttactcatcctatacatgatcagtgtttttatctaacaattgagcacaagagaaagcttaaggaagaatatggagtcgagccttggacatttgaacagaagctaggtgaggcagtatttatcccggcaggatgtccccaccaggttagaaatttgaagtcttgcataaaggttgcactagattttgtttctccggaaaatgtccgagagtgcatcaggttaacagaaggtttccgtctgctgccgaagtggcataaggtgaatgaagataaactggaggttaagaagatagctcttcatgcattcaatcaagctattaaagatatcactgatgaatcatctaatagcaatgaaagcaaatggatccggagataatgaggatcatgaaggccattgaatccatgcttgatgtcatggaagttagcaccacccgcattcgacatcttgctatcgagaacctgaatgaaaaccgtagtggcttatcggatgccgacaagataacaaaacctgattttagtgtactatgcatgatattagtaccttatataatacgtagcttggagaaaaggccattcaccgtttctcattgttgggaggttctaaagaatgaagccaaatggttacacttggagcagggctcacaaaatattgatgtgctggtgaacaaaggtgtagggttttctccaagatgtcggatttgacactgaagaagattgagtattggaagaggtccgattgaacatttggcactgacattcaccaacttgttcaaatagaggaaaagaatatggaaatggagaaagagcgcatgtatgcatgtgtaggtcagggagtggctcggatcagccttgagtcaatttccactgcgttttcttcggttatggatgagcacgaggagtaaaagaaacagaagaaggctgagtgtgattctcatatgcttattttcttgtcctgtgtaatggatgtgtgtatgtgaaccatatgcgaacttaaacgtctttgtttgtaccggtcaggccattctgagtgagggttccgtctcttctttttaggactccactgcgaggtgtcggtgtgtgagaaatggtgcaaacgtgtgtatgaaactctacgaggcatactcttatctagtattgtgtctagtgaagaatgggacacatccgatgctactgtaaactcacttgttgcactcactttttgagttggatttttctttcaaacttttttgtatgctctcttgagtttatctaacactagatttcataagtgtgcaccattgtccataactagactcacttaggtaaagctatccattccatgtcctctttataatgtgacataaataaggattttatcactaatctaagggtgtgttcgg

SEQ ID NO: 203271 - DNA, 2975 bp, Zea Mays
gttttatctctttttatgtgtttccctgtttcgtcgtttttcggttctcctttgtctcccttttcttttctttgggggttgagctctgaggttttcatatgaggtttcatttctagcctaccccaacgtgcttgggacaaaaggctttgttgttgttgttgttgttgattggcgcaattccaaagcgggtaatcaactgtaggacagttcatgaagcaattgttagtgcctaatggatttctgatatcagaggagctttgtcagtgggggttttgacagattaccttcagctttggcctttgggatttgatatctggcatcgagctgcagccggaggttgacgacaagcatatcttcagtattgccccaaatggtgtgtactcagccaaatcagcatatgaaggtctgtttctgggatctgagacatttggacactataaaagaatatggaaatcttgggcattgccaaaatatcgtttcttcctttggttggttgcccataagagatgttggacaactgatagattggcaaagcgaggcctgaatcatccagagaaatgtcttctatgtgatcaagaggaagaaaatatggaccacctccttgtgcaatgttccttctcacgggaattctggtaccttttactcaggaaattcggtcttcactctcttgcaccatagctgactgtaaactctttcctgggatggtgggaagtggtgggaggagcagtccttggtctcacaaaaaaggccttaactcatcattttgggagcttggactttatggaatcatcgaaataaatgcatttttgatggctgcaatacaagtatgtccttatgtctcagagctgctgatgaggaaagaagatgggaagtagctggggcaaaaggcctcgctcatttggctgcacccttggtcaatatcctcacacatactgatgaaataaaactcaaagcaaaaaggattgccgcggtggaaaagaagaagcggtgtttaggaatgaagattctatctaccaaggaagcaagtggaggccttcaacggtgtgcagattattttggtatgccaacagctcccagtgaatctaacaaggagccaaggcctgaagagtgtgtaaatgaactgggcattaaacaaccagtacagcatgttgcttccgaggagcaggaaggagttcaagatgatgccaaggcagatgcaaatgttatgaatgtttcttttggtaagggaaaatcagaagattcttttggtacaattaatggtaccaacagtggagataaaatagaatctcctagtggtttagcagaaagaacattgactcagcctaccactaagggttgcagtaagcagcgtggccgtagttctaatggtagaggaaacaggactaaaaaaatagaagaggggaatgcgtctggactaattgctgtggctcccgagtcagaagatgatgatgatgatgccgcatttatagatggaaaccaagcagagggtggtgcactgtgggatatttttcgacgggaagatgtgagcaaactgcatgattatctaatgaagcatgcacatgagtttagacattgcaactttgagccagtgaagcaggttactcatcctatacatgatcagtgtttttatctaacaattgagcacaagagaaagcttaaggaagaatatggagtcgagccttggacatttgaacagaagctaggtgaggcagtatttatcccggcaggatgtccccaccaggttagaaatttgaagtcttgcataaaggttgcactagattttgtttctccggaaaatgtccgagagtgcatcaggttaacagaaggtttccgtctgctgccgaagtggcataaggtgaatgaagataaactggaggttaagaagatagctcttcatgcattcaatcaagctattaaagatatcactgatgaatcatctaatagcaatgaaagcaaatggatccggagataatgaggatcatgaaggccattgaatccatgcttgatgtcatggaagttagcaccacccgcattcgacatcttgctatcgagaacctgaatgaaaaccgtagtggcttatcggatgccgacaagataacaaaacctgattttagtgtactatgcatgatattagtaccttatataatacgtagcttggagaaaaggccattcaccgtttctcattgttgggaggttctaaagaatgaagccaaatggttacacttggagcagggctcacaaaatattgatgtgctggtgaacaaaggtgtagggttttctccaagatgtcggatttgacactgaagaagattgagtattggaagaggtccgattgaacatttggcactgacattcaccaacttgttcaaatagaggaaaagaatatggaaatggagaaagagcgcatgtatgcatgtgtaggtcagggagtggctcggatcagccttgagtcaatttccactgcgttttcttcggttatggatgagcacgaggagtaaaagaaacagaagaaggctgagtgtgattctcatatgcttattttcttgtcctgtgtaatggatgtgtgtatgtgaaccatatgcgaacttaaacgtctttgtttgtaccggtcaggccattctgagtgagggttccgtctcttctttttaggactccactgcgaggtgtcggtgtgtgagaaatggtgcaaacgtgtgtatgaaactctacgaggcatactcttatctagtattgtgtctagtgaagaatgggacacatccgatgctactgtaaactcacttgttgcactcactttttgagttggatttttctttcaaacttttttgtatgctctcttgagtttatctaacactagatttcataagtgtgcaccattgtccataactagactcacttaggtaaagctatccattccatgtcctctttataatgtgacataaataaggattttatcactaatctaagggtgtgttcgg

SEQ ID NO: 203272 - DNA, 413 bp, Zea Mays
ttaaggaccttcatgcaaaaccccaaccatttccccttctgcactccacggagcagtgaaaccgacctttctcccctcccccgcgttccacttcgcggagatctagcccttgggtttcgccagcggcgaggcctaagtcatcggcggcgagccaaactccacgagcggaggaagaggaggggaagctgagacgaggaggcagctatggggcagcagtcgctgatctatgcgttcgtggcccgtggcacggtcgtactggccgagtacacggagttcaccggcaacttcacaaccatcgcctcccagtgcctcatgaagctccccgcaagcaacaacaagttcacctacaactgcgacggccacaccttcaactacctcgtggaagacggattcagtctactgctctactttgc

SEQ ID NO: 203273 - DNA, 719 bp, Zea Mays
cttcgagccaaatacccggtaaacaaaattaactcagattcttgtatacgtttttaaaatttatggtcaaatggagggattctgcaataacaccttaaaactagtgccagatcgacagaatcaagattgcattgtactttggagttgtcttccctcttggagtttggggagagcgttatactatacgctggggtttggggaaagggtgcattttcatggcagccttgtaaccatccatccatcatctatttgccgatttgctttagctgcagagagcaaggatcccgcaaaagttcctcggcctagtaaccgccttccactctcagaattcgtcggcgtggtcctcggcagctcacttcctcctgctggtggtgatggtgaggcgctcgaggctgcggaacgtcgtgttgtcccgcgaggcggagcctcccctcccggccgcgttccgggccacgggggagcgcggggacgacctgctgttctcggcgcctcccgagtggtggagcctctgcgcgggggacgggcgcccgctgccgccactgctgccggagacccaccggcggttctggtcactgcagtcccccgaagaggtcggccgggtggacggagctgcgggcattttcgacgagctccctccccgggacaagatgcgcgttttctctgatgagtcggcaacctgagcaataaatcggatacttactgcttcgttggacgttcca

SEQ ID NO: 203274 - DNA, 3720 bp, Zea Mays
gtccagttccagtgctttagatccgcggccctgttcgcaccttgctcgcctcgcctcgcctcgccttccgctgcttcccgcctctaaccaccacggcatccagatcccgcgactccacctccactcgcggcggcgtgccctcgccgagatctcatcatggacacggtcgagaagatcgtcgaggacttcgcctcggacatcgccgtgagccccttctcctccgggacgagcctccgggagatgatacgcgcgatacgcgcgtgcaagacggcggcggaggagcgcgcggtggtgcggcgggaatgtgcggcgatacgcacggccatcagcgagaatgagccggagctccggcacaggaacatggccaagctcatgttcatccacatgctgggctaccccacccatttcgcgcagatggagtgcctcaagctcatcgcggccgcgggattcccggagaagcgggtgggctacctcggcctcatgctgctccttgacgagcggcaggaggtgctcatgctcgtcaccaactccctcaaacatgcttaatttgggggcagagatctcaaccacacgaaccagttcatcgtgggccttgcattgtgtgctcttgggaacatctgctctgctgaaatggcgcgggatctttcacctgaagtggagaggttgatgcgcagtagggaagtcaatacaaagaaaaaggctgctttgtgctctataaggattgtcaggaaagtgccagatttggcagagaacttcatgggcctggctgcatcattgttgaaggagaaacaccatggggtcctcatatctgcaattcagctctgcacagaactatgcaaagcaagcaaagattctctagagtacctgaggaagaactgcatcgaaggtttggctcgcatactgagagatgtgtccaataggtcatatgctccggagtatgatgtttctggcattgttgatccattcttgcatattcgagtccttaaacttttgcggatcttgggtcaaggagatgcagattgcagtgaatatatgaatgatattcttgctcaggttgcaacaaaaactgagtccaacaagaatgctggaaacgccattctgtatgaatgtgttcagactataatgggtattgaagctactagtggtttacgtgtgctggcaatcaatattttgggtagattcttgtctaaccgtgacaacaatataagatatgttgctcttaacatgcttatgagggccattacagttgatgcactagcagtgcagagacacagaacaacaatattagagtgtgtaaaggatgccgatgcctccattcgcaaaagggctcttgaacttgtttatttgttagtcaatgatacaaatgtaaagcctttgactaaagagctcatcgattacttaaacatagcggatccagattttataggagatctcacagtaaatatatgctctatagttgaaaagttttctcaagagaagttatggtaccttgaccagatgttcaatgttttatctctggctggaaatcatgtgaaggatgacatatgtcatgcccttattgttgtactaagtaatacatcagagcttcaaggatattcagtgaggtcattgtataaggccttacaagaatatggtaaacagggaagtttagtaagagtagctgtttggtgcattggtgaatatggtgaaatgctggtgaacaatgttggcatgctggatggggaggagccaattaaggtaacagaatcagatgctgtggatgctgtagaggtcgctcttaaccgctactcagcagatatgacaactggagcaatgtgtctggttgctcttctgaaactctcctcacgatttcctttgacatcagagaggataaaacaaatagttgcccagaataaagggaatgttgtccttgaactacagcaaagatcaattgaattcacttccattatacaaagacatcagtctatcagatcgtccttgcttgaacgcatgcctgtattagatgaagctagttatctggtgaagcgggctactgctacacaatcaactatttcagcagataaaattgctccaacagtcactcctggaagccttaagcttccgaatggtgtagcaaaacccacctcagctcctttagctgatttgcttgatttcagttctgatggtgccccagcttccaccgttgcttctactacaacacctaatgattttttgcaagatcttctgggtattggtggagttagttcatcaacgacaggtgtaacttcaaccgcaagcacagatattcttatggatcttctgtccattggatcatctccatcacagaatggcacccccgtaacagacttccgtcatcctggacaagagtctaaacctgttcctggtgtacctgaagctgttgacctcctcggtagtttgtcaccagccgagtctaaacccacaccagttgtacctaaggacatggatctgctcgacggtttgtcatcaaatacatctatttctggacatgagaatacaacccacccatcaataacagcttttcagagtgcaaccttgaagatcacgtttgatttcaaaatgaagcttggaaacccacgagagactacaattcatgccacttttaccaatttgacatctagtacttttacagattttatttttcaggctgctgttccaaagttcatccaattgagactggatccggctagtggcaacactgttccagctaatggaagtggttcagtcacacaagggctcaacatcaccaataaccaacagggacagaaaccgcttgcaatgcggatccggatgtcttataaagtgaatggcgaggacagattggaacaaggccaagtcagcaattttccttctggactataggccgtttctgtatactatgacgtgtcggggacaggcatatagaacgaagccttgttttaccctctacctcattttttaattattctggggatttgtcggggtgcttagagaaaatgttttttccggcggttagttttcctgtactaagtatattgtatattattccagcagcgatgtgatcttcaaattcatcgtgatgtattcgacaccacgctaaaggatggtctgagcaaactttcttcagctcctcaatcattgtaaaactagcttctgtttttcttgtacactagagagtagagactggtagcatattctgtagcatattctgccagtaccgttgcacttctgatttgcggccgtgcaaattatgggatgccgaacgcgcggatttctatcgtaatgcgcaaactttcaactgccttttaatttttaaaccgctggtctgtacatcgagcaggtcggtcaggtgcaggcgctggtgctcgtcaagcttggacagcgctgctgagtgctgagtaacctcttacaacaattgcaccatatgaacttataacaagtacagtacattgaaccacgacaattactctagttgaccataattgagatcgaataagcagggtcaggcattatggtttctgtctacaagtttatctttgtaccttgcatcacaaccttccagtggaaaactgcaatgcaaaggacttctgcagcgcataatttgctttgcttatcttatcctgctctcatctgcaataaagaaaatgacggtttctcaaatgatgaattgaagcttacaagatataaacatggaaaatagtaatatgcccccaaacttttcaa

SEQ ID NO: 203275 - DNA, 3604 bp, Zea Mays
gtccagttccagtgctttagatccgcggccctgttcgcaccttgctcgcctcgcctcgcctcgccttccgctgcttcccgcctctaaccaccacggcatccagatcccgcgactccacctccactcgcggcggcgtgccctcgccgagatctcatcatggacacggtcgagaagatcgtcgaggacttcgcctcggacatcgccgtgagccccttctcctccgggacgagcctccgggagatgatacgcgcgatacgcgcgtgcaagacggcggcggaggagcgcgcggtggtgcggcgggaatgtgcggcgatacgcacggccatcagcgagaatgagccggagctccggcacaggaacatggccaagctcatgttcatccacatgctgggctaccccacccatttcgcgcagatggagtgcctcaagctcatcgcggccgcgggattcccggagaagcgggtgggctacctcggcctcatgctgctccttgacgagcggcaggaggtgctcatgctcgtcaccaactccctcaaacaagatctcaaccacacgaaccagttcatcgtgggccttgcattgtgtgctcttgggaacatctgctctgctgaaatggcgcgggatctttcacctgaagtggagaggttgatgcgcagtagggaagtcaatacaaagaaaaaggctgctttgtgctctataaggattgtcaggaaagtgccagatttggcagagaacttcatgggcctggctgcatcattgttgaaggagaaacaccatggggtcctcatatctgcaattcagctctgcacagaactatgcaaagcaagcaaagattctctagagtacctgaggaagaactgcatcgaaggtttggctcgcatactgagagatgtgtccaataggtcatatgctccggagtatgatgtttctggcattgttgatccattcttgcatattcgagtccttaaacttttgcggatcttgggtcaaggagatgcagattgcagtgaatatatgaatgatattcttgctcaggttgcaacaaaaactgagtccaacaagaatgctggaaacgccattctgtatgaatgtgttcagactataatgggtattgaagctactagtggtttacgtgtgctggcaatcaatattttgggtagattcttgtctaaccgtgacaacaatataagatatgttgctcttaacatgcttatgagggccattacagttgatgcactagcagtgcagagacacagaacaacaatattagagtgtgtaaaggatgccgatgcctccattcgcaaaagggctcttgaacttgtttatttgttagtcaatgatacaaatgttttctcaagagaagttatggtaccttgaccagatgttcaatgttttatctctggctggaaatcatgtgaaggatgacatatgtcatgcccttattgttgtactaagtaatacatcagagcttcaaggatattcagtgaggtcattgtataaggccttacaagaatatggtaaacagggaagtttagtaagagtagctgtttggtgcattggtgaatatggtgaaatgctggtgaacaatgttggcatgctggatggggaggagccaattaaggtaacagaatcagatgctgtggatgctgtagaggtcgctcttaaccgctactcagcagatatgacaactggagcaatgtgtctggttgctcttctgaaactctcctcacgatttcctttgacatcagagaggataaaacaaatagttgcccagaataaagggaatgttgtccttgaactacagcaaagatcaattgaattcacttccattatacaaagacatcagtctatcagatcgtccttgcttgaacgcatgcctgtattagatgaagctagttatctggtgaagcgggctactgctacacaatcaactatttcagcagataaaattgctccaacagtcactcctggaagccttaagcttccgaatggtgtagcaaaacccacctcagctcctttagctgatttgcttgatttcagttctgatggtgccccagcttccaccgttgcttctactacaacacctaatgattttttgcaagatcttctgggtattggtggagttagttcatcaacgacaggtgtaacttcaaccgcaagcacagatattcttatggatcttctgtccattggatcatctccatcacagaatggcacccccgtaacagacttccgtcatcctggacaagagtctaaacctgttcctggtgtacctgaagctgttgacctcctcggtagtttgtcaccagccgagtctaaacccacaccagttgtacctaaggacatggatctgctcgacggtttgtcatcaaatacatctatttctggacatgagaatacaacccacccatcaataacagcttttcagagtgcaaccttgaagatcacgtttgatttcaaaatgaagcttggaaacccacgagagactacaattcatgccacttttaccaatttgacatctagtacttttacagattttatttttcaggctgctgttccaaagttcatccaattgagactggatccggctagtggcaacactgttccagctaatggaagtggttcagtcacacaagggctcaacatcaccaataaccaacagggacagaaaccgcttgcaatgcggatccggatgtcttataaagtgaatggcgaggacagattggaacaaggccaagtcagcaattttccttctggactataggccgtttctgtatactatgacgtgtcggggacaggcatatagaacgaagccttgttttaccctctacctcattttttaattattctggggatttgtcggggtgcttagagaaaatgttttttccggcggttagttttcctgtactaagtatattgtatattattccagcagcgatgtgatcttcaaattcatcgtgatgtattcgacaccacgctaaaggatggtctgagcaaactttcttcagctcctcaatcattgtaaaactagcttctgtttttcttgtacactagagagtagagactggtagcatattctgtagcatattctgccagtaccgttgcacttctgatttgcggccgtgcaaattatgggatgccgaacgcgcggatttctatcgtaatgcgcaaactttcaactgccttttaatttttaaaccgctggtctgtacatcgagcaggtcggtcaggtgcaggcgctggtgctcgtcaagcttggacagcgctgctgagtgctgagtaacctcttacaacaattgcaccatatgaacttataacaagtacagtacattgaaccacgacaattactctagttgaccataattgagatcgaataagcagggtcaggcattatggtttctgtctacaagtttatctttgtaccttgcatcacaaccttccagtggaaaactgcaatgcaaaggacttctgcagcgcataatttgctttgcttatcttatcctgctctcatctgcaataaagaaaatgacggtttctcaaatgatgaattgaagcttacaagatataaacatggaaaatagtaatatgcccccaaacttttcaa

SEQ ID NO: 203276 - DNA, 3717 bp, Zea Mays
ctaatcgctctttccaccgtcacctgtccagttccagtgctttagatccgcggccctgttcgcaccttgctcgcctcgcctcgcctcgccttccgctgcttcccgcctctaaccaccacggcatccagatcccgcgactccacctccactcgcggcggcgtgccctcgccgagatctcatcatggacacggtcgagaagatcgtcgaggacttcgcctcggacatcgccgtgagccccttctcctccgggacgagcctccgggagatgatacgcgcgatacgcgcgtgcaagacggcggcggaggagcgcgcggtggtgcggcgggaatgtgcggcgatacgcacggccatcagcgagaatgagccggagctccggcacaggaacatggccaagctcatgttcatccacatgctgggctaccccacccatttcgcgcagatggagtgcctcaagctcatcgcggccgcgggattcccggagaagcgggtgggctacctcggcctcatgctgctccttgacgagcggcaggaggtgctcatgctcgtcaccaactccctcaaacaagatctcaaccacacgaaccagttcatcgtgggccttgcattgtgtgctcttgggaacatctgctctgctgaaatggcgcgggatctttcacctgaagtggagaggttgatgcgcagtagggaagtcaatacaaagaaaaaggctgctttgtgctctataaggattgtcaggaaagtgccagatttggcagagaacttcatgggcctggctgcatcattgttgaaggagaaacaccatggggtcctcatatctgcaattcagctctgcacagaactatgcaaagcaagcaaagattctctagagtacctgaggaagaactgcatcgaaggtttggctcgcatactgagagatgtgtccaataggtcatatgctccggagtatgatgtttctggcattgttgatccattcttgcatattcgagtccttaaacttttgcggatcttgggtcaaggagatgcagattgcagtgaatatatgaatgatattcttgctcaggttgcaacaaaaactgagtccaacaagaatgctggaaacgccattctgtatgaatgtgttcagactataatgggtattgaagctactagtggtttacgtgtgctggcaatcaatattttgggtagattcttgtctaaccgtgacaacaatataagatatgttgctcttaacatgcttatgagggccattacagttgatgcactagcagtgcagagacacagaacaacaatattagagtgtgtaaaggatgccgatgcctccattcgcaaaagggctcttgaacttgtttatttgttagtcaatgatacaaatgtaaagcctttgactaaagagctcatcgattacttaaacatagcggatccagattttataggagatctcacagtaaatatatgctctatagttgaaaagttttctcaagagaagttatggtaccttgaccagatgttcaatgttttatctctggctggaaatcatgtgaaggatgacatatgtcatgcccttattgttgtactaagtaatacatcagagcttcaaggatattcagtgaggtcattgtataaggccttacaagaatatggtaaacagtaagagtagctgtttggtgcattggtgaatatggtgaaatgctggtgaacaatgttggcatgctggatggggaggagccaattaaggtaacagaatcagatgctgtggatgctgtagaggtcgctcttaaccgctactcagcagatatgacaactggagcaatgtgtctggttgctcttctgaaactctcctcacgatttcctttgacatcagagaggataaaacaaatagttgcccagaataaagggaatgttgtccttgaactacagcaaagatcaattgaattcacttccattatacaaagacatcagtctatcagatcgtccttgcttgaacgcatgcctgtattagatgaagctagttatctggtgaagcgggctactgctacacaatcaactatttcagcagataaaattgctccaacagtcactcctggaagccttaagcttccgaatggtgtagcaaaacccacctcagctcctttagctgatttgcttgatttcagttctgatggtgccccagcttccaccgttgcttctactacaacacctaatgattttttgcaagatcttctgggtattggtggagttagttcatcaacgacaggtgtaacttcaaccgcaagcacagatattcttatggatcttctgtccattggatcatctccatcacagaatggcacccccgtaacagacttccgtcatcctggacaagagtctaaacctgttcctggtgtacctgaagctgttgacctcctcggtagtttgtcaccagccgagtctaaacccacaccagttgtacctaaggacatggatctgctcgacggtttgtcatcaaatacatctatttctggacatgagaatacaacccacccatcaataacagcttttcagagtgcaaccttgaagatcacgtttgatttcaaaatgaagcttggaaacccacgagagactacaattcatgccacttttaccaatttgacatctagtacttttacagattttatttttcaggctgctgttccaaagttcatccaattgagactggatccggctagtggcaacactgttccagctaatggaagtggttcagtcacacaagggctcaacatcaccaataaccaacagggacagaaaccgcttgcaatgcggatccggatgtcttataaagtgaatggcgaggacagattggaacaaggccaagtcagcaattttccttctggactataggccgtttctgtatactatgacgtgtcggggacaggcatatagaacgaagccttgttttaccctctacctcattttttaattattctggggatttgtcggggtgcttagagaaaatgttttttccggcggttagttttcctgtactaagtatattgtatattattccagcagcgatgtgatcttcaaattcatcgtgatgtattcgacaccacgctaaaggatggtctgagcaaactttcttcagctcctcaatcattgtaaaactagcttctgtttttcttgtacactagagagtagagactggtagcatattctgtagcatattctgccagtaccgttgcacttctgatttgcggccgtgcaaattatgggatgccgaacgcgcggatttctatcgtaatgcgcaaactttcaactgccttttaatttttaaaccgctggtctgtacatcgagcaggtcggtcaggtgcaggcgctggtgctcgtcaagcttggacagcgctgctgagtgctgagtaacctcttacaacaattgcaccatatgaacttataacaagtacagtacattgaaccacgacaattactctagttgaccataattgagatcgaataagcagggtcaggcattatggtttctgtctacaagtttatctttgtaccttgcatcacaaccttccagtggaaaactgcaatgcaaaggacttctgcagcgcataatttgctttgcttatcttatcctgctctcatctgcaataaagaaaatgacggtttctcaaatgatgaattgaagcttacaagatataaacatggaaaatagtaatatgcccccaaacttttcaa

SEQ ID NO: 203277 - DNA, 1565 bp, Zea Mays
gctatcttttcttggacactgtacaatacttggatccggtaaaaaaagtttgtacctcttataggtttctatttagtttttttctgccaatctcttcaagctaactcatgtacgtgtatgaatcacattgttatagtagctaacaatgtcagtagtgtaccaatcaataactgtattgcagtcaagaaaatagtaatttccttgactgattttgacatccccatggctttaacagtttaaaaactgaaaattgattctactatatttgtgttttaaggccttagtgtaggcgtacaatctacgtcgacgccaaaattaaatcaccttcctacatccatagttgatatgaactggtgagattcttactgatgcactaaatttcaatcttaggatactctttaattgatgtatgctttgcttcagtcgtataatattagagcaacttatcatcccccatgttttataatccatcctagcatggtacatttttttctgcacaattgtacatggaagcattagtcataggatatcggttgttgaagtacgtcgtcaagtgtacatggaagcattagtgcattgaacggccgaagaatcaccgcaggtacatggctgatgtgttcatcttctagaggatatcttgcaccagagtacaccattcaagggcagctgaacaaaaagagcgacgtctacagctttggtgtgctgctgttggagattgtcagtggcagatgccacactgatcctagattacccgttgacgagcagttcctcctagaaaaggtctggacactctatgagttcgatgatctcgagagcatcattgataggacactaaagcgcgattttgacaccgaggaagcactctggttgcttaaggtcttcttcccatgggcggatcattgtcgactggtggtgtcaggtcttcttcccatgggcggtgccctggagcgcctgattgtctcacgtatttgaccagcaacaagggacgaagattggagctgtgtggattgtgtggaggcgacacgggtcaggagcatttcatctgatcccttttctctgatggatatgctgatattcaaggctgtggaagagcaggtcaagaagagagtagagaataaggcaatgatcttcgagcagaatgccactgatagtgagtgcaaggtcgatcctaaagtgctctccaagctatatgatcattgggtggatgccacacaccaaggatgtctgccttgactaatcaccgattagctgtagctgtaaattttatgtatacatggtttcagttgcgctcgatccaattgtcttaaccttgaatggacattttgatgtttctttcatgaatgttcaggtcaacggcaagataaaccaattgcgttgtatgagttttagatcataactcaagttttttgtagatcttggtgctatttcatatgatgtgtcatgtttcagtgattgctttatagtgaacccgtaagatgtaaaatgacctttatgacagaaccatatgtaataacagagtattctgaggaacctttgttgaagtaaatgtaatcgagtttcctagc

SEQ ID NO: 203278 - DNA, 2570 bp, Zea Mays
tttacttatcctggatgttcattttcttcttgcacttctgcagtgtttgttaaatagcattacagtaccatgaaagagcagtgacatattcatgcacttgccattatactttccttttcctgaactaactatataatcacttgataaagggacaaatactatgtcataattgttagttaagtatgttatcagctatcttttcttggacactgtacaatacttggatccggtaaaaaaagtttgtacctcttataggtttctatttagtttttttctgccaatctcttcaagctaactcatgtacgtgtatgaatcacattgttatagtagctaacaatgtcagtagtgtaccaatcaataactgtattgcagtcaagaaaatagtaatttccttgactgattttgacatccccatggctttaacagtttaaaaactgaaaattgattctactatatttgtgttttaaggccttagtgtaggcgtacaatctacgtcgacgccaaaattaaatcaccttcctacatccatagttgatatgaactggacatgcttaatccagggtacatggctgatgtgttcatcttctagaggatatcttgcaccagagtacaccattcaagggcagctgaacaaaaagagcgacgtctacagctttggtgtgctgctgttggagattgtcagtggcagatgccacactgatcctagattacccgttgacgagcagttcctcctagaaaaggtctggacactctatgagttcgatgatctcgagagcatcattgataggacactaaagcgcgattttgacaccgaggaagcactctggttgcttaaggtaagtcttgtgtgcatcccggatagccctaagatcaagtcctccatgtcaatggttgccaagatgctgcaaggtgagtgtgttgtgggtgataggatcatgaggctggcctgatcacagacgtcatggacctgaaagtcaggatggtagagccggttcagttcagcttgacatcatgctcgagcactatcgcgttgtggcctggggcgcgatgcgcccactccttgttggggatttcccattcagctactacgagtcatgccgtgtaggtacgcggtaggtacgcgatctgtcccctctgttctggataagacgttctgatgtgatagtgatagaaatagaatagaacgatgtggtggtgccacacagcccacaatgtagacgacacttggctatcacgttcgttcgtctcactacagaagggtgtgtcgcggttttcttttttttcactaagcaaatgtgatgcttgttagatttggataagaaaccttttgttttacaatataattcactaattgtatcggccgatattcgattgtttttggttcaatattagatgttcaacaacatggttttttttgcttaaccaaataataatgttgcaaaagtactaaggttagcttgtttattgttgttgatgtgcccacacaaatacacatgtatgaggaatattgttagtattttccatgttcttttaggttgttgattcaatcgtgagggtcctcaattaaggtcgaatggatgcaatcaaaactagaagggtgtgcgccatcgaggatcactgcagctaaggcaatcgtgaaggctggaatcgttgttatggcaccgcaagctattagtgtgctaggtggatttaggcctcaagggaaaacgattgacaatgttgtaaaggttgtggagacaacacttgccatgcaggaggctggatgcttctctgttgtgtattagttgttggcagatgatttataagatattgagatcaaaatcaggatgtttccaaactgtctataatcaggatggctattgtagcttttacagtaggttggtattatatgtttccaatttgtgtttttattaaaccattgtctaattggtgtcaggtcttcttcccatgggcggatcattgtcgactggtggtgtcaggtcttcttcccatgggcggtgccctggagcgcctgattgtctcacgtatttgaccagcaacaagggacgaagattggagctgtgtggattgtgtggaggcgacacgggtcaggagcatttcatctgatttacagagaagtaaagagaagttgtttacatttagtcatcctctgtatctgaaacaagactatgtttctaccttgtctttctcatggttcttagcctatggccgaagcttccatgcttgattcttcaaacatccaatgcagatcccttttctctgatggatatgctgatattcaaggctgtggaagagcaggtcaagaagagagtagagaataaggcaatgatcttcgagcagaatgccactgatagtcaacggcaagataaaccaattgcgttgtatgagttttagatcataactcaagttttttgtagatcttggtgctatttcatatgatgtgtcatgtttcagtgattgctttatagtgaacccgtaagatgtaaaatgacctttatgacagaaccatatgtaataacagagtattctgaggaacctttgttgaagtaaatgtaatcgagtttcctagc

SEQ ID NO: 203279 - DNA, 2144 bp, Zea Mays
gtttctacagctgtgtaggctgctgagcgatttaggccttagtgtaggcgtacaatctacgtcgacgccaaaattaaatcaccttcctacatccatagttgatatgaactggtgagattcttactgatgcactaaatttcaatcttaggatactctttaattgatgtatgctttgcttcagtcgtataatattagagcaacttatcatcccccatgttttataatccatcctagcatggtacatttttttctgcacaattgtacatggaagcattagtcataggatatcggttgttgaagtacgtcgtcaagtgtacatggaagcattagtgcattgaacggccgaagaatcaccgcaggtacatggctgatgtgttcatcttctagaggatatcttgcaccagagtacaccattcaagggcagctgaacaaaaagagcgacgtctacagctttggtgtgctgctgttggagattgtcagtggcagatgccacactgatcctagattacccgttgacgagcagttcctcctagaaaaggtctggacactctatgagttcgatgatctcgagagcatcattgataggacactaaagcgcgattttgacaccgaggaagcactctggttgcttaaggtaagtcttgtgtgcatcccggatagccctaagatcaagtcctccatgtcaatggttgccaagatgctgcaaggtgagtgtgttgtgggtgataggatcatgaggctggcctgatcacagacgtcatggacctgaaagtcaggatggtagagccggttcagttcagcttgacatcatgctcgagcactatcgcgttgtggcctggggcgcgatgcgcccactccttgttggggatttcccattcagctactacgagtcatgccgtgtaggtacgcggtaggtacgcgatctgtcccctctgttctggataagacgttctgatgtgatagtgatagaaatagaatagaacgatgtggtggtgccacacagcccacaatgtagacgacacttggctatcacgttcgttcgtctcactacagaagggtgtgtcgcggttttcttttttttcactaagcaaatgtgatgcttgttagatttggataagaaaccttttgttttacaatataattcactaattgtatcggccgatattcgattgtttttggttcaatattagatgttcaacaacatggttttttttgcttaaccaaataataatgttgcaaaagtactaaggttagcttgtttattgttgttgatgtgcccacacaaatacacatgtatgaggaatattgttagtattttccatgttcttttaggttgttgattcaatcgtgagggtcctcaattaaggtcgaatggatgcaatcaaaactagaagggtgtgcgccatcgaggatcactgcagctaaggcaatcgtgaaggctggaatcgttgttatggcaccgcaagctattagtgtgctaggtggatttaggcctcaagggaaaacgattgacaatgttgtaaaggttgtggagacaacacttgccatgcaggaggctggatgcttctctgttgtgtattagttgttggcagatgatttataagatattgagatcaaaatcaggatgtttccaaactgtctataatcaggatggctattgtagcttttacagtaggttggtattatatgtttccaatttgtgtttttattaaaccattgtctaattggtgtcaggtcttcttcccatgggcggatcattgtcgactggtggtgtcaggtcttcttcccatgggcggtgccctggagcgcctgattgtctcacatcccttttctctgatggatatgctgatattcaaggctgtggaagagcaggtcaagaagagagtagagaataaggcaatgatcttcgagcagaatgccactgatagtcaacggcaagataaaccaattgcgttgtatgagttttagatcataactcaagttttttgtagatcttggtgctatttcatatgatgtgtcatgtttcagtgattgctttatagtgaacccgtaagatgtaaaatgacctttatgacagaaccatatgtaataacagagtattctgaggaacctttgttgaagtaaatgtaatcgagtttcctagc

SEQ ID NO: 203280 - DNA, 2067 bp, Zea Mays
gtttctacagctgtgtaggctgctgagcgatttagcatggtacatttttttctgcacaattgtacatggaagcattagtcataggatatcggttgttgaagtacgtcgtcaagtgtacatggaagcattagtgcattgaacggccgaagaatcaccgcaggtacatggctgatgtgttcatcttctagaggatatcttgcaccagagtacaccattcaagggcagctgaacaaaaagagcgacgtctacagctttggtgtgctgctgttggagattgtcagtggcagatgccacactgatcctagattacccgttgacgagcagttcctcctagaaaaggtctggacactctatgagttcgatgatctcgagagcatcattgataggacactaaagcgcgattttgacaccgaggaagcactctggttgcttaaggtaagtcttgtgtgcatcccggatagccctaagatcaagtcctccatgtcaatggttgccaagatgctgcaaggtgagtgtgttgtgggtgataggatcatgaggctggcctgatcacagacgtcatggacctgaaagtcaggatggtagagccggttcagttcagcttgacatcatgctcgagcactatcgcgttgtggcctggggcgcgatgcgcccactccttgttggggatttcccattcagctactacgagtcatgccgtgtaggtacgcggtaggtacgcgatctgtcccctctgttctggataagacgttctgatgtgatagtgatagaaatagaatagaacgatgtggtggtgccacacagcccacaatgtagacgacacttggctatcacgttcgttcgtctcactacagaagggtgtgtcgcggttttcttttttttcactaagcaaatgtgatgcttgttagatttggataagaaaccttttgttttacaatataattcactaattgtatcggccgatattcgattgtttttggttcaatattagatgttcaacaacatggttttttttgcttaaccaaataataatgttgcaaaagtactaaggttagcttgtttattgttgttgatgtgcccacacaaatacacatgtatgaggaatattgttagtattttccatgttcttttaggttgttgattcaatcgtgagggtcctcaattaaggtcgaatggatgcaatcaaaactagaagggtgtgcgccatcgaggatcactgcagctaaggcaatcgtgaaggctggaatcgttgttatggcaccgcaagctattagtgtgctaggtggatttaggcctcaagggaaaacgattgacaatgttgtaaaggttgtggagacaacacttgccatgcaggaggctggatgcttctctgttgtgtattagttgttggcagatgatttataagatattgagatcaaaatcaggatgtttccaaactgtctataatcaggatggctattgtagcttttacagtaggtcttcttcccatgggcggtgccctggagcgcctgattgtctcacgtatttgaccagcaacaagggacgaagattggagctgtgtggattgtgtggaggcgacacgggtcaggagcatttcatctgatttacagagaagtaaagagaagttgtttacatttagtcatcctctgtatctgaaacaagactatgtttctaccttgtctttctcatggttcttagcctatggccgaagcttccatgcttgattcttcaaacatccaatgcagatcccttttctctgatggatatgctgatattcaaggctgtggaagagcaggtcaagaagagagtagagaataaggcaatgatcttcgagcagaatgccactgatagtcaacggcaagataaaccaattgcgttgtatgagttttagatcataactcaagttttttgtagatcttggtgctatttcatatgatgtgtcatgtttcagtgattgctttatagtgaacccgtaagatgtaaaatgacctttatgacagaaccatatgtaataacagagtattctgaggaacctttgttgaagtaaatgtaatcgagtttcctagc

SEQ ID NO: 203281 - DNA, 2727 bp, Zea Mays
ctcgaggtttctacagctgtgtaggctgctgagcgatttaggtggtacatttacttatcctggatgttcattttcttcttgcacttctgcagtgtttgttaaatagcattacagtaccatgaaagagcagtgacatattcatgcacttgccattatactttccttttcctgaactaactatataatcacttgataaagggacaaatactatgtcataattgttagttaagtatgttatcagctatcttttcttggacactgtacaatacttggatccggtaaaaaaagtttgtacctcttataggtttctatttagtttttttctgccaatctcttcaagctaactcatgtacgtgtatgaatcacattgttatagtagctaacaatgtcagtagtgtaccaatcaataactgtattgcagtcaagaaaatagtaatttccttgactgattttgacatccccatggctttaacagtttaaaaactgaaaattgattctactatatttgtgttttaaggccttagtgtaggcgtacaatctacgtcgacgccaaaattaaatcaccttcctacatccatagttgatatgaactgcatggtacatttttttctgcacaattgtacatggaagcattagtcataggatatcggttgttgaagtacgtcgtcaagtgtacatggaagcattagtgcattgaacggccgaagaatcaccgcaggtacatggctgatgtgttcatcttctagaggatatcttgcaccagagtacaccattcaagggcagctgaacaaaaagagcgacgtctacagctttggtgtgctgctgttggagattgtcagtggcagatgccacactgatcctagattacccgttgacgagcagttcctcctagaaaaggtctggacactctatgagttcgatgatctcgagagcatcattgataggacactaaagcgcgattttgacaccgaggaagcactctggttgcttaaggtaagtcttgtgtgcatcccggatagccctaagatcaagtcctccatgtcaatggttgccaagatgctgcaaggtgagtgtgttgtgggtgataggatcatgaggctggcctgatcacagacgtcatggacctgaaagtcaggatggtagagccggttcagttcagcttgacatcatgctcgagcactatcgcgttgtggcctggggcgcgatgcgcccactccttgttggggatttcccattcagctactacgagtcatgccgtgtaggtacgcggtaggtacgcgatctgtcccctctgttctggataagacgttctgatgtgatagtgatagaaatagaatagaacgatgtggtggtgccacacagcccacaatgtagacgacacttggctatcacgttcgttcgtctcactacagaagggtgtgtcgcggttttcttttttttcactaagcaaatgtgatgcttgttagatttggataagaaaccttttgttttacaatataattcactaattgtatcggccgatattcgattgtttttggttcaatattagatgttcaacaacatggttttttttgcttaaccaaataataatgttgcaaaagtactaaggttagcttgtttattgttgttgatgtgcccacacaaatacacatgtatgaggaatattgttagtattttccatgttcttttaggttgttgattcaatcgtgagggtcctcaattaaggtcgaatggatgcaatcaaaactagaagggtgtgcgccatcgaggatcactgcagctaaggcaatcgtgaaggctggaatcgttgttatggcaccgcaagctattagtgtgctaggtggatttaggcctcaagggaaaacgattgacaatgttgtaaaggttgtggagacaacacttgccatgcaggaggctggatgcttctctgttgtgtattagttgttggcagatgatttataagatattgagatcaaaatcaggatgtttccaaactgtctataatcaggatggctattgtagcttttacagtaggttggtattatatgtttccaatttgtgtttttattaaaccattgtctaattggtgtcaggtcttcttcccatgggcggatcattgtcgactggtggtgtcaggtcttcttcccatgggcggtgccctggagcgcctgattgtctcacgtatttgaccagcaacaagggacgaagattggagctgtgtggattgtgtggaggcgacacgggtcaggagcatttcatctgatttacagagaagtaaagagaagttgtttacatttagtcatcctctgtatctgaaacaagactatgtttctaccttgtctttctcatggttcttagcctatggccgaagcttccatgcttgattcttcaaacatccaatgcagatcccttttctctgatggatatgctgatattcaaggctgtggaagagcaggtcaagaagagagtagagaataaggcaatgatcttcgagcagaatgccactgatagtcaacggcaagataaaccaattgcgttgtatgagttttagatcataactcaagttttttgtagatcttggtgctatttcatatgatgtgtcatgtttcagtgattgctttatagtgaacccgtaagatgtaaaatgacctttatgacagaaccatatgtaataacagagtattctgaggaacctttgttgaagtaaatgtaatcgagtttcctagc

SEQ ID NO: 203282 - DNA, 2154 bp, Zea Mays
aactcgaggtttctacagctgtgtaggctgctgagcgatttaggtggtacatttacttatcctggatgttcattttcttcttgcacttctgcagtgtttgttaaatagcattacagtaccatgaaagagcagtgacatattcatgcacttgccattatactttccttttcctgaactaactatataatcacttgataaagggacaaatactatgtcataattgttagttaagtatgttatcagctatcttttcttggacactgtacaatacttggatccggtaaaaaaagtttgtacctcttataggtttctatttagtttttttctgccaatctcttcaagctaactcatgtacgtgtatgaatcacattgttatagtagctaacaatgtcagtagtgtaccaatcaataactgtattgcagtcaagaaaatagtaatttccttgactgattttgacatccccatggctttaacagtttaaaaactgaaaattgattctactatatttgtgttttaaggccttagtgtaggcgtacaatctacgtcgacgccaaaattaaatcaccttcctacatccatagttgatatgaactggtgagattcttactgatgcactaaatttcaatcttaggatactctttaattgatgtatgctttgcttcagtcgtataatattagagcaacttatcatcccccatgttttataatccatcctagcatggtacatttttttctgcacaattgtacatggaagcattagtcataggatatcggttgttgaagtacgtcgtcaagtgtacatggaagcattagtgcattgaacggccgaagaatcaccgcaggtacatggctgatgtgttcatcttctagaggatatcttgcaccagagtacaccattcaagggcagctgaacaaaaagagcgacgtctacagctttggtgtgctgctgttggagattgtcagtggcagatgccacactgatcctagattacccgttgacgagcagttcctcctagaaaaggtctggacactctatgagttcgatgatctcgagagcatcattgataggacactaaagcgcgattttgacaccgaggaagcactctggttgcttaaggttgttgattcaatcgtgagggtcctcaattaaggtcgaatggatgcaatcaaaactagaagggtgtgcgccatcgaggatcactgcagctaaggcaatcgtgaaggctggaatcgttgttatggcaccgcaagctattagtgtgctaggtggatttaggcctcaagggaaaacgattgacaatgttgtaaaggttgtggagacaacacttgccatgcaggaggctggatgcttctctgttgtgtattagttgttggcagatgatttataagatattgagatcaaaatcaggatgtttccaaactgtctataatcaggatggctattgtagcttttacagtaggttggtattatatgtttccaatttgtgtttttattaaaccattgtctaattggtgtcaggtcttcttcccatgggcggatcattgtcgactggtggtgtcaggtcttcttcccatgggcggtgccctggagcgcctgattgtctcacgtatttgaccagcaacaagggacgaagattggagctgtgtggattgtgtggaggcgacacgggtcaggagcatttcatctgatttacagagaagtaaagagaagttgtttacatttagtcatcctctgtatctgaaacaagactatgtttctaccttgtctttctcatggttcttagcctatggccgaagcttccatgcttgattcttcaaacatccaatgcagatcccttttctctgatggatatgctgatattcaaggctgtggaagagcaggtcaagaagagagtagagaataaggcaatgatcttcgagcagaatgccactgatagtcaacggcaagataaaccaattgcgttgtatgagttttagatcataactcaagttttttgtagatcttggtgctatttcatatgatgtgtcatgtttcagtgattgctttatagtgaacccgtaagatgtaaaatgacctttatgacagaaccatatgtaataacagagtattctgaggaacctttgttgaagtaaatgtaatcgagtttcctagc

SEQ ID NO: 203283 - DNA, 1971 bp, Zea Mays
cagaactcgaggtttctacagctgtgtaggctgctgagcgatttagcatggtacatttttttctgcacaattgtacatggaagcattagtcataggatatcggttgttgaagtacgtcgtcaagtgtacatggaagcattagtgcattgaacggccgaagaatcaccgcaggtacatggctgatgtgttcatcttctagaggatatcttgcaccagagtacaccattcaagggcagctgaacaaaaagagcgacgtctacagctttggtgtgctgctgttggagattgtcagtggcagatgccacactgatcctagattacccgttgacgagcagttcctcctagaaaaggtctggacactctatgagttcgatgatctcgagagcatcattgataggacactaaagcgcgattttgacaccgaggaagcactctggttgcttaaggtaagtcttgtgtgcatcccggatagccctaagatcaagtcctccatgtcaatggttgccaagatgctgcaaggtgagtgtgttgtgggtgataggatcatgaggctggcctgatcacagacgtcatggacctgaaagtcaggatggtagagccggttcagttcagcttgacatcatgctcgagcactatcgcgttgtggcctggggcgcgatgcgcccactccttgttggggatttcccattcagctactacgagtcatgccgtgtaggtacgcggtaggtacgcgatctgtcccctctgttctggataagacgttctgatgtgatagtgatagaaatagaatagaacgatgtggtggtgccacacagcccacaatgtagacgacacttggctatcacgttcgttcgtctcactacagaagggtgtgtcgcggttttcttttttttcactaagcaaatgtgatgcttgttagatttggataagaaaccttttgttttacaatataattcactaattgtatcggccgatattcgattgtttttggttcaatattagatgttcaacaacatggttttttttgcttaaccaaataataatgttgcaaaagtactaaggttagcttgtttattgttgttgatgtgcccacacaaatacacatgtatgaggaatattgttagtattttccatgttcttttaggttgttgattcaatcgtgagggtcctcaattaaggtcgaatggatgcaatcaaaactagaagggtgtgcgccatcgaggatcactgcagctaaggcaatcgtgaaggctggaatcgttgttatggcaccgcaagctattagtgtgctaggtggatttaggcctcaagggaaaacgattgacaatgttgtaaaggtcttcttcccatgggcggatcattgtcgactggtggtgtcaggtcttcttcccatgggcggtgccctggagcgcctgattgtctcacgtatttgaccagcaacaagggacgaagattggagctgtgtggattgtgtggaggcgacacgggtcaggagcatttcatctgatttacagagaagtaaagagaagttgtttacatttagtcatcctctgtatctgaaacaagactatgtttctaccttgtctttctcatggttcttagcctatggccgaagcttccatgcttgattcttcaaacatccaatgcagatcccttttctctgatggatatgctgatattcaaggctgtggaagagcaggtcaagaagagagtagagaataaggcaatgatcttcgagcagaatgccactgatagtcaacggcaagataaaccaattgcgttgtatgagttttagatcataactcaagttttttgtagatcttggtgctatttcatatgatgtgtcatgtttcagtgattgctttatagtgaacccgtaagatgtaaaatgacctttatgacagaaccatatgtaataacagagtattctgaggaacctttgttgaagtaaatgtaatcgagtttcctagc

SEQ ID NO: 203284 - DNA, 3828 bp, Zea Mays
cccgtctcacgaacccgtcccctcacatccctcgcgttgccattgcttggtcctctccgcgcccgccgcccctgctcggctgctccccatgtcccgcgccgcggtgacaaggatccgagaacacccctgcggacgcatccgggattcaaggcctcccctcccttcccctgcccccaccccctcggtgatgcccggatccacgactgctaccgtccagcctcgttctccgtccgcgaccgcttcacggtggcgcagacgctggaggtgtccacagggggcgacaccgtgaccctgcctccgttcgacatcagcgcccctccccccaccaccgtcgatttgtagaagctcctcgcccgttcttgcttcaccagcgattcggggaggccatgcccccctcggccgcaccccttctcctcctcgccgcatcccgcctctgggcagccgcgccacccctccctccacctcgccgtctcctacctcctccccctcgaccgcatctgcctccctctgtggcctcgctaccaaggtcaagatcgtcgagatttgttagggtttggggtttttgcggttgactctgaatcccgccgccgctgctcgcgcaggaggcctcgagctcccagtgctcccctcctcaaccaccctgggtaagtggctcccagattgatagggaaagagttcggactgtaggggctattgaatacttgattgatgccacaagatctggaaatgtgtcccgctatatcaatcacagaagttgttccccaaatctcagcacccgattggttttggtagagagcaaagattgccagcttgctcacattagcttgtttgctaatcaaaacattgccgtaggagaagaactcgcctatgattaccgacaaaagcttgtagcaggcgatggctgcttctgccattgtggggaactcgaggtttctacagctgtgtaggctgctgagcgatttaggtggtacatttacttatcctggatgttcattttcttcttgcacttctgcagtgtttgttaaatagcattacagtaccatgaaagagcagtgacatattcatgcacttgccattatactttccttttcctgaactaactatataatcacttgataaagggacaaatactatgtcataattgttagttaagtatgttatcagctatcttttcttggacactgtacaatacttggatccggtaaaaaaagtttgtacctcttataggtttctatttagtttttttctgccaatctcttcaagctaactcatgtacgtgtatgaatcacattgttatagtagctaacaatgtcagtagtgtaccaatcaataactgtattgcagtcaagaaaatagtaatttccttgactgattttgacatccccatggctttaacagtttaaaaactgaaaattgattctactatatttgtgttttaaggccttagtgtaggcgtacaatctacgtcgacgccaaaattaaatcaccttcctacatccatagttgatatgaactggtgagattcttactgatgcactaaatttcaatcttaggatactctttaattgatgtatgctttgcttcagtcgtataatattagagcaacttatcatcccccatgttttataatccatcctagcatggtacatttttttctgcacaattgtacatggaagcattagtcataggatatcggttgttgaagtacgtcgtcaagtgtacatggaagcattagtgcattgaacggccgaagaatcaccgcaggtacatggctgatgtgttcatcttctagaggatatcttgcaccagagtacaccattcaagggcagctgaacaaaaagagcgacgtctacagctttggtgtgctgctgttggagattgtcagtggcagatgccacactgatcctagattacccgttgacgagcagttcctcctagaaaaggtctggacactctatgagttcgatgatctcgagagcatcattgataggacactaaagcgcgattttgacaccgaggaagcactctggttgcttaaggtaagtcttgtgtgcatcccggatagccctaagatcaagtcctccatgtcaatggttgccaagatgctgcaaggtgagtgtgttgtgggtgataggatcatgaggctggcctgatcacagacgtcatggacctgaaagtcaggatggtagagccggttcagttcagcttgacatcatgctcgagcactatcgcgttgtggcctggggcgcgatgcgcccactccttgttggggatttcccattcagctactacgagtcatgccgtgtaggtacgcggtaggtacgcgatctgtcccctctgttctggataagacgttctgatgtgatagtgatagaaatagaatagaacgatgtggtggtgccacacagcccacaatgtagacgacacttggctatcacgttcgttcgtctcactacagaagggtgtgtcgcggttttcttttttttcactaagcaaatgtgatgcttgttagatttggataagaaaccttttgttttacaatataattcactaattgtatcggccgatattcgattgtttttggttcaatattagatgttcaacaacatggttttttttgcttaaccaaataataatgttgcaaaagtactaaggttagcttgtttattgttgttgatgtgcccacacaaatacacatgtatgaggaatattgttagtattttccatgttcttttaggttgttgattcaatcgtgagggtcctcaattaaggtcgaatggatgcaatcaaaactagaagggtgtgcgccatcgaggatcactgcagctaaggcaatcgtgaaggctggaatcgttgttatggcaccgcaagctattagtgtgctaggtggatttaggcctcaagggaaaacgattgacaatgttgtaaaggttgtggagacaacacttgccatgcaggaggctggatgcttctctgttgtgtattagttgttggcagatgatttataagatattgagatcaaaatcaggatgtttccaaactgtctataatcaggatggctattgtagcttttacagtaggttggtattatatgtttccaatttgtgtttttattaaaccattgtctaattggtgtcaggtcttcttcccatgggcggatcattgtcgactggtggtgtcaggtcttcttcccatgggcggtgccctggagcgcctgattgtctcacgtatttgaccagcaacaagggacgaagattggagctgtgtggattgtgtggaggcgacacgggtcaggagcatttcatctgatcccttttctctgatggatatgctgatattcaaggctgtggaagagcaggtcaagaagagagtagagaataaggcaatgatcttcgagcagaatgccactgatagtgagtgcaaggtcgatcctaaagtgctctccaagctatatgatcattgggtggatgccacacaccaaggatgtctgccttgactaatcaccgattagctgtagctgtaaattttatgtatacatggtttcagttgcgctcgatccaattgtcttaaccttgaatggacattttgatgtttctttcatgaatgttcaggtcaacggcaagataaaccaattgcgttgtatgagttttagatcataactcaagttttttgtagatcttggtgctatttcatatgatgtgtcatgtttcagtgattgctttatagtgaacccgtaagatgtaaaatgacctttatgacagaaccatatgtaataacagagtattctgaggaacctttgttgaagtaaatgtaatcgagtttcctagc

SEQ ID NO: 203285 - DNA, 2506 bp, Zea Mays
cccgtctcacgaacccgtcccctcacatccctcgcgttgccattgcttggtcctctccgcgcccgccgcccctgctcggctgctccccatgtcccgcgccgcggtgacaaggatccgagaacacccctgcggacgcatccgggattcaaggcctcccctcccttcccctgcccccaccccctcggtgatgcccggatccacgactgctaccgtccagcctcgttctccgtccgcgaccgcttcacggtggcgcagacgctggaggtgtccacagggggcgacaccgtgaccctgcctccgttcgacatcagcgcccctccccccaccaccgtcgatttgtagaagctcctcgcccgttcttgcttcaccagcgattcggggaggccatgcccccctcggccgcaccccttctcctcctcgccgcatcccgcctctgggcagccgcgccacccctccctccacctcgccgtctcctacctcctccccctcgaccgcatctgcctccctctgtggcctcgctaccaaggtcaagatcgtcgagatttgttagggtttggggtttttgcggttgactctgaatcccgccgccgctgctcgcgcaggaggcctcgagctcccagtgctcccctcctcaaccaccctgggtaagtggctcccagattgatagggaaagagttcggactgtaggggctattgaatacttgattgatgccacaagatctggaaatgtgtcccgctatatcaatcacagaagttgttccccaaatctcagcacccgattggttttggtagagagcaaagattgccagcttgctcacattagcttgtttgctaatcaaaacattgccgtaggagaagaactcgcctatgattaccgacaaaagcttgtagcaggcgatggctgcttctgccattgtgggggccttagtgtaggcgtacaatctacgtcgacgccaaaattaaatcaccttcctacatccatagttgatatgaactggacatgcttaatccagggtacatggctgatgtgttcatcttctagaggatatcttgcaccagagtacaccattcaagggcagctgaacaaaaagagcgacgtctacagctttggtgtgctgctgttggagattgtcagtggcagatgccacactgatcctagattacccgttgacgagcagttcctcctagaaaaggtctggacactctatgagttcgatgatctcgagagcatcattgataggacactaaagcgcgattttgacaccgaggaagcactctggttgcttaaggatcatgaggctggcctgatcacagacgtcatggacctgaaagtcaggatggtagagccggttcagttcagcttgacatcatgctcgagcactatcgcgttgtggcctggggcgcgatgcgcccactccttgttggggatttcccattcagctactacgagtcatgccgtgtaggtacgcggttgttgattcaatcgtgagggtcctcaattaaggtcgaatggatgcaatcaaaactagaagggtgtgcgccatcgaggatcactgcagctaaggcaatcgtgaaggctggaatcgttgttatggcaccgcaagctattagtgtgctaggtggatttaggcctcaagggaaaacgattgacaatgttgtaaaggttgtggagacaacacttgccatgcaggaggctggatgcttctctgttgtgtattagttgttggcagatgatttataagatattgagatcaaaatcaggatgtttccaaactgtctataatcaggatggctattgtagcttttacagtaggttggtattatatgtttccaatttgtgtttttattaaaccattgtctaattggtgtcaggtcttcttcccatgggcggatcattgtcgactggtggtgtcaggtcttcttcccatgggcggtgccctggagcgcctgattgtctcacgtatttgaccagcaacaagggacgaagattggagctgtgtggattgtgtggaggcgacacgggtcaggagcatttcatctgatttacagagaagtaaagagaagttgtttacatttagtcatcctctgtatctgaaacaagactatgtttctaccttgtctttctcatggttcttagcctatggccgaagcttccatgcttgattcttcaaacatccaatgcagatcccttttctctgatggatatgctgatattcaaggctgtggaagagcaggtcaagaagagagtagagaataaggcaatgatcttcgagcagaatgccactgatagtcaacggcaagataaaccaattgcgttgtatgagttttagatcataactcaagttttttgtagatcttggtgctatttcatatgatgtgtcatgtttcagtgattgctttatagtgaacccgtaagatgtaaaatgacctttatgacagaaccatatgtaataacagagtattctgaggaacctttgttgaagtaaatgtaatcgagtttcctagc

SEQ ID NO: 203286 - DNA, 2296 bp, Zea Mays
cccgtctcacgaacccgtcccctcacatccctcgcgttgccattgcttggtcctctccgcgcccgccgcccctgctcggctgctccccatgtcccgcgccgcggtgacaaggatccgagaacacccctgcggacgcatccgggattcaaggcctcccctcccttcccctgcccccaccccctcggtgatgcccggatccacgactgctaccgtccagcctcgttctccgtccgcgaccgcttcacggtggcgcagacgctggaggtgtccacagggggcgacaccgtgaccctgcctccgttcgacatcagcgcccctccccccaccaccgtcgatttgtagaagctcctcgcccgttcttgcttcaccagcgattcggggaggccatgcccccctcggccgcaccccttctcctcctcgccgcatcccgcctctgggcagccgcgccacccctccctccacctcgccgtctcctacctcctccccctcgaccgcatctgcctccctctgtggcctcgctaccaaggaggcctcgagctcccagtgctcccctcctcaaccaccctgggtaagtggctcccagattgatagggaaagagttcggactgtaggggctattgaatacttgattgatgccacaagatctggaaatgtgtcccgctatatcaatcacagaagttgttccccaaatctcagcacccgattggttttggtagagagcaaagattgccagcttgctcacattagcttgtttgctaatcaaaacattgccgtaggagaagaactcgcctatgattaccgacaaaagcttgtagcaggcgatggctgcttctgccattgtgggggccttagtgtaggcgtacaatctacgtcgacgccaaaattaaatcaccttcctacatccatagttgatatgaactggacatgcttaatccagggtacatggctgatgtgttcatcttctagaggatatcttgcaccagagtacaccattcaagggcagctgaacaaaaagagcgacgtctacagctttggtgtgctgctgttggagattgtcagtggcagatgccacactgatcctagattacccgttgacgagcagttcctcctagaaaaggtctggacactctatgagttcgatgatctcgagagcatcattgataggacactaaagcgcgattttgacaccgaggaagcactctggttgcttaaggatcatgaggctggcctgatcacagacgtcatggacctgaaagtcaggatggtagagccggttcagttcagcttgacatcatgctcgagcactatcgcgttgtggcctggggcgcgatgcgcccactccttgttggggatttcccattcagctactacgagtcatgccgtgtaggtacgcggtaggttgtggagacaacacttgccatgcaggaggctggatgcttctctgttgtgtattagttgttggcagatgatttataagatattgagatcaaaatcaggatgtttccaaactgtctataatcaggatggctattgtagcttttacagtaggttggtattatatgtttccaatttgtgtttttattaaaccattgtctaattggtgtcaggtcttcttcccatgggcggatcattgtcgactggtggtgtcaggtcttcttcccatgggcggtgccctggagcgcctgattgtctcacgtatttgaccagcaacaagggacgaagattggagctgtgtggattgtgtggaggcgacacgggtcaggagcatttcatctgatcccttttctctgatggatatgctgatattcaaggctgtggaagagcaggtcaagaagagagtagagaataaggcaatgatcttcgagcagaatgccactgatagtgagtgcaaggtcgatcctaaagtgctctccaagctatatgatcattgggtggatgccacacaccaaggatgtctgccttgactaatcaccgattagctgtagctgtaaattttatgtatacatggtttcagttgcgctcgatccaattgtcttaaccttgaatggacattttgatgtttctttcatgaatgttcaggtcaacggcaagataaaccaattgcgttgtatgagttttagatcataactcaagttttttgtagatcttggtgctatttcatatgatgtgtcatgtttcagtgattgctttatagtgaacccgtaagatgtaaaatgacctttatgacagaaccatatgtaataacagagtattctgaggaacctttgttgaagtaaatgtaatcgagtttcctagc

SEQ ID NO: 203287 - DNA, 3001 bp, Zea Mays
cccgtctcacgaacccgtcccctcacatccctcgcgttgccattgcttggtcctctccgcgcccgccgcccctgctcggctgctccccatgtcccgcgccgcggtgacaaggatccgagaacacccctgcggacgcatccgggattcaaggcctcccctcccttcccctgcccccaccccctcggtgatgcccggatccacgactgctaccgtccagcctcgttctccgtccgcgaccgcttcacggtggcgcagacgctggaggtgtccacagggggcgacaccgtgaccctgcctccgttcgacatcagcgcccctccccccaccaccgtcgatttgtagaagctcctcgcccgttcttgcttcaccagcgattcggggaggccatgcccccctcggccgcaccccttctcctcctcgccgcatcccgcctctgggcagccgcgccacccctccctccacctcgccgtctcctacctcctccccctcgaccgcatctgcctccctctgtggcctcgctaccaaggaggcctcgagctcccagtgctcccctcctcaaccaccctgggtaagtggctcccagattgatagggaaagagttcggactgtaggggctattgaatacttgattgatgccacaagatctggaaatgtgtcccgctatatcaatcacagaagttgttccccaaatctcagcacccgattggttttggtagagagcaaagattgccagcttgctcacattagcttgtttgctaatcaaaacattgccgtaggagaagaactcgcctatgattaccgacaaaagcttgtagcaggcgatggctgcttctgccattgtgggggtaccaattgccgaggccgtgtctattgacttcgcaggaagacactaaactgttcaacgcttggttgcagaactcgaggtttctacagctgtgtaggctgctgagcgatttaggtggtacatttacttatcctggatgttcattttcttcttgcacttctgcagtgtttgttaaatagcattacagtaccatgaaagagcagtgacatattcatgcacttgccattatactttccttttcctgaactaactatataatcacttgataaagggacaaatactatgtcataattgttagttaagtatgttatcagctatcttttcttggacactgtacaatacttggatccggtaaaaaaagtttgtacctcttataggtttctatttagtttttttctgccaatctcttcaagctaactcatgtacgtgtatgaatcacattgttatagtagctaacaatgtcagtagtgtaccaatcaataactgtattgcagtcaagaaaatagtaatttccttgactgattttgacatccccatggctttaacagtttaaaaactgaaaattgattctactatatttgtgttttaaggccttagtgtaggcgtacaatctacgtcgacgccaaaattaaatcaccttcctacatccatagttgatatgaactgcatggtacatttttttctgcacaattgtacatggaagcattagtcataggatatcggttgttgaagtacgtcgtcaagtgtacatggaagcattagtgcattgaacggccgaagaatcaccgcaggtacatggctgatgtgttcatcttctagaggatatcttgcaccagagtacaccattcaagggcagctgaacaaaaagagcgacgtctacagctttggtgtgctgctgttggagattgtcagtggcagatgccacactgatcctagattacccgttgacgagcagttcctcctagaaaaggtctggacactctatgagttcgatgatctcgagagcatcattgataggacactaaagcgcgattttgacaccgaggaagcactctggttgcttaaggttgttgattcaatcgtgagggtcctcaattaaggtcgaatggatgcaatcaaaactagaagggtgtgcgccatcgaggatcactgcagctaaggcaatcgtgaaggctggaatcgttgttatggcaccgcaagctattagtgtgctaggtggatttaggcctcaagggaaaacgattgacaatgttgtaaaggttgtggagacaacacttgccatgcaggaggctggatgcttctctgttgtgtattagttgttggcagatgatttataagatattgagatcaaaatcaggatgtttccaaactgtctataatcaggatggctattgtagcttttacagtaggttggtattatatgtttccaatttgtgtttttattaaaccattgtctaattggtgtcaggtcttcttcccatgggcggatcattgtcgactggtggtgtcaggtcttcttcccatgggcggtgccctggagcgcctgattgtctcacgtatttgaccagcaacaagggacgaagattggagctgtgtggattgtgtggaggcgacacgggtcaggagcatttcatctgatcccttttctctgatggatatgctgatattcaaggctgtggaagagcaggtcaagaagagagtagagaataaggcaatgatcttcgagcagaatgccactgatagtgagtgcaaggtcgatcctaaagtgctctccaagctatatgatcattgggtggatgccacacaccaaggatgtctgccttgactaatcaccgattagctgtagctgtaaattttatgtatacatggtttcagttgcgctcgatccaattgtcttaaccttgaatggacattttgatgtttctttcatgaatgttcaggtcaacggcaagataaaccaattgcgttgtatgagttttagatcataactcaagttttttgtagatcttggtgctatttcatatgatgtgtcatgtttcagtgattgctttatagtgaacccgtaagatgtaaaatgacctttatgacagaaccatatgtaataacagagtattctgaggaacctttgttgaagtaaatgtaatcgagtttcctagc

SEQ ID NO: 203288 - DNA, 3126 bp, Zea Mays
cccgtctcacgaacccgtcccctcacatccctcgcgttgccattgcttggtcctctccgcgcccgccgcccctgctcggctgctccccatgtcccgcgccgcggtgacaaggatccgagaacacccctgcggacgcatccgggattcaaggcctcccctcccttcccctgcccccaccccctcggtgatgcccggatccacgactgctaccgtccagcctcgttctccgtccgcgaccgcttcacggtggcgcagacgctggaggtgtccacagggggcgacaccgtgaccctgcctccgttcgacatcagcgcccctccccccaccaccgtcgatttgtagaagctcctcgcccgttcttgcttcaccagcgattcggggaggccatgcccccctcggccgcaccccttctcctcctcgccgcatcccgcctctgggcagccgcgccacccctccctccacctcgccgtctcctacctcctccccctcgaccgcatctgcctccctctgtggcctcgctaccaaggaggcctcgagctcccagtgctcccctcctcaaccaccctgggtaagtggctcccagattgatagggaaagagttcggactgtaggggctattgaatacttgattgatgccacaagatctggaaatgtgtcccgctatatcaatcacagaagttgttccccaaatctcagcacccgattggttttggtagagagcaaagattgccagcttgctcacattagcttgtttgctaatcaaaacattgccgtaggagaagaactcgcctatgattaccgacaaaagcttgtagcaggcgatggctgcttctgccattgtggggaactcgaggtttctacagctgtgtaggctgctgagcgatttaggccttagtgtaggcgtacaatctacgtcgacgccaaaattaaatcaccttcctacatccatagttgatatgaactggtgagattcttactgatgcactaaatttcaatcttaggatactctttaattgatgtatgctttgcttcagtcgtataatattagagcaacttatcatcccccatgttttataatccatcctagcatggtacatttttttctgcacaattgtacatggaagcattagtcataggatatcggttgttgaagtacgtcgtcaagtgtacatggaagcattagtgcattgaacggccgaagaatcaccgcaggtacatggctgatgtgttcatcttctagaggatatcttgcaccagagtacaccattcaagggcagctgaacaaaaagagcgacgtctacagctttggtgtgctgctgttggagattgtcagtggcagatgccacactgatcctagattacccgttgacgagcagttcctcctagaaaaggtctggacactctatgagttcgatgatctcgagagcatcattgataggacactaaagcgcgattttgacaccgaggaagcactctggttgcttaaggatcatgaggctggcctgatcacagacgtcatggacctgaaagtcaggatggtagagccggttcagttcagcttgacatcatgctcgagcactatcgcgttgtggcctggggcgcgatgcgcccactccttgttggggatttcccattcagctactacgagtcatgccgtgtaggtacgcggtaggtacgcgatctgtcccctctgttctggataagacgttctgatgtgatagtgatagaaatagaatagaacgatgtggtggtgccacacagcccacaatgtagacgacacttggctatcacgttcgttcgtctcactacagaagggtgtgtcgcggttttcttttttttcactaagcaaatgtgatgcttgttagatttggataagaaaccttttgttttacaatataattcactaattgtatcggccgatattcgattgtttttggttcaatattagatgttcaacaacatggttttttttgcttaaccaaataataatgttgcaaaagtactaaggttagcttgtttattgttgttgatgtgcccacacaaatacacatgtatgaggaatattgttagtattttccatgttcttttaggttgttgattcaatcgtgagggtcctcaattaaggtcgaatggatgcaatcaaaactagaagggtgtgcgccatcgaggatcactgcagctaaggcaatcgtgaaggctggaatcgttgttatggcaccgcaagctattagtgtgctaggtggatttaggcctcaagggaaaacgattgacaatgttgtaaaggttgtggagacaacacttgccatgcaggaggctggatgcttctctgttgtgtattagttgttggcagatgatttataagatattgagatcaaaatcaggatgtttccaaactgtctataatcaggatggctattgtagcttttacagtaggttggtattatatgtttccaatttgtgtttttattaaaccattgtctaattggtgtcaggtcttcttcccatgggcggatcattgtcgactggtggtgtcaggtcttcttcccatgggcggtgccctggagcgcctgattgtctcacgtatttgaccagcaacaagggacgaagattggagctgtgtggattgtgtggaggcgacacgggtcaggagcatttcatctgatttacagagaagtaaagagaagttgtttacatttagtcatcctctgtatctgaaacaagactatgtttctaccttgtctttctcatggttcttagcctatggccgaagcttccatgcttgattcttcaaacatccaatgcagatcccttttctctgatggatatgctgatattcaaggctgtggaagagcaggtcaagaagagagtagagaataaggcaatgatcttcgagcagaatgccactgatagtcaacggcaagataaaccaattgcgttgtatgagttttagatcataactcaagttttttgtagatcttggtgctatttcatatgatgtgtcatgtttcagtgattgctttatagtgaacccgtaagatgtaaaatgacctttatgacagaaccatatgtaataacagagtattctgaggaacctttgttgaagtaaatgtaatcgagtttcctagc

SEQ ID NO: 203289 - DNA, 3131 bp, Zea Mays
cccgtctcacgaacccgtcccctcacatccctcgcgttgccattgcttggtcctctccgcgcccgccgcccctgctcggctgctccccatgtcccgcgccgcggtgacaaggatccgagaacacccctgcggacgcatccgggattcaaggcctcccctcccttcccctgcccccaccccctcggtgatgcccggatccacgactgctaccgtccagcctcgttctccgtccgcgaccgcttcacggtggcgcagacgctggaggtgtccacagggggcgacaccgtgaccctgcctccgttcgacatcagcgcccctccccccaccaccgtcgatttgtagaagctcctcgcccgttcttgcttcaccagcgattcggggaggccatgcccccctcggccgcaccccttctcctcctcgccgcatcccgcctctgggcagccgcgccacccctccctccacctcgccgtctcctacctcctccccctcgaccgcatctgcctccctctgtggcctcgctaccaaggaggcctcgagctcccagtgctcccctcctcaaccaccctgggtaagtggctcccagattgatagggaaagagttcggactgtaggggctattgaatacttgattgatgccacaagatctggaaatgtgtcccgctatatcaatcacagaagttgttccccaaatctcagcacccgattggttttggtagagagcaaagattgccagcttgctcacattagcttgtttgctaatcaaaacattgccgtaggagaagaactcgcctatgattaccgacaaaagcttgtagcaggcgatggctgcttctgccattgtgggggccttagtgtaggcgtacaatctacgtcgacgccaaaattaaatcaccttcctacatccatagttgatatgaactggtgagattcttactgatgcactaaatttcaatcttaggatactctttaattgatgtatgctttgcttcagtcgtataatattagagcaacttatcatcccccatgttttataatccatcctagcatggtacatttttttctgcacaattgtacatggaagcattagtcataggatatcggttgttgaagtacgtcgtcaagtgtacatggaagcattagtgcattgaacggccgaagaatcaccgcaggtacatggctgatgtgttcatcttctagaggatatcttgcaccagagtacaccattcaagggcagctgaacaaaaagagcgacgtctacagctttggtgtgctgctgttggagattgtcagtggcagatgccacactgatcctagattacccgttgacgagcagttcctcctagaaaaggtctggacactctatgagttcgatgatctcgagagcatcattgataggacactaaagcgcgattttgacaccgaggaagcactctggttgcttaaggtaagtcttgtgtgcatcccggatagccctaagatcaagtcctccatgtcaatggttgccaagatgctgcaaggtgagtgtgttgtgggtgataggatcatgaggctggcctgatcacagacgtcatggacctgaaagtcaggatggtagagccggttcagttcagcttgacatcatgctcgagcactatcgcgttgtggcctggggcgcgatgcgcccactccttgttggggatttcccattcagctactacgagtcatgccgtgtaggtacgcggtaggtacgcgatctgtcccctctgttctggataagacgttctgatgtgatagtgatagaaatagaatagaacgatgtggtggtgccacacagcccacaatgtagacgacacttggctatcacgttcgttcgtctcactacagaagggtgtgtcgcggttttcttttttttcactaagcaaatgtgatgcttgttagatttggataagaaaccttttgttttacaatataattcactaattgtatcggccgatattcgattgtttttggttcaatattagatgttcaacaacatggttttttttgcttaaccaaataataatgttgcaaaagtactaaggttagcttgtttattgttgttgatgtgcccacacaaatacacatgtatgaggaatattgttagtattttccatgttcttttaggttgttgattcaatcgtgagggtcctcaattaaggtcgaatggatgcaatcaaaactagaagggtgtgcgccatcgaggatcactgcagctaaggcaatcgtgaaggctggaatcgttgttatggcaccgcaagctattagtgtgctaggtggatttaggcctcaagggaaaacgattgacaatgttgtaaaggttgtggagacaacacttgccatgcaggaggctggatgcttctctgttgtgtattagttgttggcagatgatttataagatattgagatcaaaatcaggatgtttccaaactgtctataatcaggatggctattgtagcttttacagtaggtcttcttcccatgggcggtgccctggagcgcctgattgtctcacgtatttgaccagcaacaagggacgaagattggagctgtgtggattgtgtggaggcgacacgggtcaggagcatttcatctgatcccttttctctgatggatatgctgatattcaaggctgtggaagagcaggtcaagaagagagtagagaataaggcaatgatcttcgagcagaatgccactgatagtgagtgcaaggtcgatcctaaagtgctctccaagctatatgatcattgggtggatgccacacaccaaggatgtctgccttgactaatcaccgattagctgtagctgtaaattttatgtatacatggtttcagttgcgctcgatccaattgtcttaaccttgaatggacattttgatgtttctttcatgaatgttcaggtcaacggcaagataaaccaattgcgttgtatgagttttagatcataactcaagttttttgtagatcttggtgctatttcatatgatgtgtcatgtttcagtgattgctttatagtgaacccgtaagatgtaaaatgacctttatgacagaaccatatgtaataacagagtattctgaggaacctttgttgaagtaaatgtaatcgagtttcctagc

SEQ ID NO: 203290 - DNA, 2891 bp, Zea Mays
cccgtctcacgaacccgtcccctcacatccctcgcgttgccattgcttggtcctctccgcgcccgccgcccctgctcggctgctccccatgtcccgcgccgcggtgacaaggatccgagaacacccctgcggacgcatccgggattcaaggcctcccctcccttcccctgcccccaccccctcggtgatgcccggatccacgactgctaccgtccagcctcgttctccgtccgcgaccgcttcacggtggcgcagacgctggaggtgtccacagggggcgacaccgtgaccctgcctccgttcgacatcagcgcccctccccccaccaccgtcgatttgtagaagctcctcgcccgttcttgcttcaccagcgattcggggaggccatgcccccctcggccgcaccccttctcctcctcgccgcatcccgcctctgggcagccgcgccacccctccctccacctcgccgtctcctacctcctccccctcgaccgcatctgcctccctctgtggcctcgctaccaaggtcaagatcgtcgagatttgttagggtttggggtttttgcggttgactctgaatcccgccgccgctgctcgcgcaggaggcctcgagctcccagtgctcccctcctcaaccaccctgggtaagtggctcccagattgatagggaaagagttcggactgtaggggctattgaatacttgattgatgccacaagatctggaaatgtgtcccgctatatcaatcacagaagttgttccccaaatctcagcacccgattggttttggtagagagcaaagattgccagcttgctcacattagcttgtttgctaatcaaaacattgccgtaggagaagaactcgcctatgattaccgacaaaagcttgtagcaggcgatggctgcttctgccattgtgggggccttagtgtaggcgtacaatctacgtcgacgccaaaattaaatcaccttcctacatccatagttgatatgaactggtgagattcttactgatgcactaaatttcaatcttaggatactctttaattgatgtatgctttgcttcagtcgtataatattagagcaacttatcatcccccatgttttataatccatcctagcatggtacatttttttctgcacaattgtacatggaagcattagtcataggatatcggttgttgaagtacgtcgtcaagtgtacatggaagcattagtgcattgaacggccgaagaatcaccgcaggtacatggctgatgtgttcatcttctagaggatatcttgcaccagagtacaccattcaagggcagctgaacaaaaagagcgacgtctacagctttggtgtgctgctgttggagattgtcagtggcagatgccacactgatcctagattacccgttgacgagcagttcctcctagaaaaggtctggacactctatgagttcgatgatctcgagagcatcattgataggacactaaagcgcgattttgacaccgaggaagcactctggttgcttaaggtaagtcttgtgtgcatcccggatagccctaagatcaagtcctccatgtcaatggttgccaagatgctgcaaggtgagtgtgttgtgggtgataggatcatgaggctggcctgatcacagacgtcatggacctgaaagtcaggatggtagagccggttcagttcagcttgacatcatgctcgagcactatcgcgttgtggcctggggcgcgatgcgcccactccttgttggggatttcccattcagctactacgagtcatgccgtgtaggtacgcggtaggttgttgattcaatcgtgagggtcctcaattaaggtcgaatggatgcaatcaaaactagaagggtgtgcgccatcgaggatcactgcagctaaggcaatcgtgaaggctggaatcgttgttatggcaccgcaagctattagtgtgctaggtggatttaggcctcaagggaaaacgattgacaatgttgtaaaggttgtggagacaacacttgccatgcaggaggctggatgcttctctgttgtgtattagttgttggcagatgatttataagatattgagatcaaaatcaggatgtttccaaactgtctataatcaggatggctattgtagcttttacagtaggttggtattatatgtttccaatttgtgtttttattaaaccattgtctaattggtgtcaggtcttcttcccatgggcggatcattgtcgactggtggtgtcaggtcttcttcccatgggcggtgccctggagcgcctgattgtctcacgtatttgaccagcaacaagggacgaagattggagctgtgtggattgtgtggaggcgacacgggtcaggagcatttcatctgatcccttttctctgatggatatgctgatattcaaggctgtggaagagcaggtcaagaagagagtagagaataaggcaatgatcttcgagcagaatgccactgatagtgagtgcaaggtcgatcctaaagtgctctccaagctatatgatcattgggtggatgccacacaccaaggatgtctgccttgactaatcaccgattagctgtagctgtaaattttatgtatacatggtttcagttgcgctcgatccaattgtcttaaccttgaatggacattttgatgtttctttcatgaatgttcaggtcaacggcaagataaaccaattgcgttgtatgagttttagatcataactcaagttttttgtagatcttggtgctatttcatatgatgtgtcatgtttcagtgattgctttatagtgaacccgtaagatgtaaaatgacctttatgacagaaccatatgtaataacagagtattctgaggaacctttgttgaagtaaatgtaatcgagtttcctagc

SEQ ID NO: 203291 - DNA, 3352 bp, Zea Mays
cccgtctcacgaacccgtcccctcacatccctcgcgttgccattgcttggtcctctccgcgcccgccgcccctgctcggctgctccccatgtcccgcgccgcggtgacaaggatccgagaacacccctgcggacgcatccgggattcaaggcctcccctcccttcccctgcccccaccccctcggtgatgcccggatccacgactgctaccgtccagcctcgttctccgtccgcgaccgcttcacggtggcgcagacgctggaggtgtccacagggggcgacaccgtgaccctgcctccgttcgacatcagcgcccctccccccaccaccgtcgatttgtagaagctcctcgcccgttcttgcttcaccagcgattcggggaggccatgcccccctcggccgcaccccttctcctcctcgccgcatcccgcctctgggcagccgcgccacccctccctccacctcgccgtctcctacctcctccccctcgaccgcatctgcctccctctgtggcctcgctaccaaggtcaagatcgtcgagatttgttagggtttggggtttttgcggttgactctgaatcccgccgccgctgctcgcgcaggaggcctcgagctcccagtgctcccctcctcaaccaccctgggtaagtggctcccagattgatagggaaagagttcggactgtaggggctattgaatacttgattgatgccacaagatctggaaatgtgtcccgctatatcaatcacagaagttgttccccaaatctcagcacccgattggttttggtagagagcaaagattgccagcttgctcacattagcttgtttgctaatcaaaacattgccgtaggagaagaactcgcctatgattaccgacaaaagcttgtagcaggcgatggctgcttctgccattgtggggaactcgaggtttctacagctgtgtaggctgctgagcgatttaggccttagtgtaggcgtacaatctacgtcgacgccaaaattaaatcaccttcctacatccatagttgatatgaactggtgagattcttactgatgcactaaatttcaatcttaggatactctttaattgatgtatgctttgcttcagtcgtataatattagagcaacttatcatcccccatgttttataatccatcctagcatggtacatttttttctgcacaattgtacatggaagcattagtcataggatatcggttgttgaagtacgtcgtcaagtgtacatggaagcattagtgcattgaacggccgaagaatcaccgcaggtacatggctgatgtgttcatcttctagaggatatcttgcaccagagtacaccattcaagggcagctgaacaaaaagagcgacgtctacagctttggtgtgctgctgttggagattgtcagtggcagatgccacactgatcctagattacccgttgacgagcagttcctcctagaaaaggtctggacactctatgagttcgatgatctcgagagcatcattgataggacactaaagcgcgattttgacaccgaggaagcactctggttgcttaaggtaagtcttgtgtgcatcccggatagccctaagatcaagtcctccatgtcaatggttgccaagatgctgcaaggtgagtgtgttgtgggtgataggatcatgaggctggcctgatcacagacgtcatggacctgaaagtcaggatggtagagccggttcagttcagcttgacatcatgctcgagcactatcgcgttgtggcctggggcgcgatgcgcccactccttgttggggatttcccattcagctactacgagtcatgccgtgtaggtacgcggtaggtacgcgatctgtcccctctgttctggataagacgttctgatgtgatagtgatagaaatagaatagaacgatgtggtggtgccacacagcccacaatgtagacgacacttggctatcacgttcgttcgtctcactacagaagggtgtgtcgcggttttcttttttttcactaagcaaatgtgatgcttgttagatttggataagaaaccttttgttttacaatataattcactaattgtatcggccgatattcgattgtttttggttcaatattagatgttcaacaacatggttttttttgcttaaccaaataataatgttgcaaaagtactaaggttagcttgtttattgttgttgatgtgcccacacaaatacacatgtatgaggaatattgttagtattttccatgttcttttaggttgttgattcaatcgtgagggtcctcaattaaggtcgaatggatgcaatcaaaactagaagggtgtgcgccatcgaggatcactgcagctaaggcaatcgtgaaggctggaatcgttgttatggcaccgcaagctattagtgtgctaggtggatttaggcctcaagggaaaacgattgacaatgttgtaaaggttgtggagacaacacttgccatgcaggaggctggatgcttctctgttgtgtattagttgttggcagatgatttataagatattgagatcaaaatcaggatgtttccaaactgtctataatcaggatggctattgtagcttttacagtaggttggtattatatgtttccaatttgtgtttttattaaaccattgtctaattggtgtcaggtcttcttcccatgggcggatcattgtcgactggtggtgtcaggtcttcttcccatgggcggtgccctggagcgcctgattgtctcacgtatttgaccagcaacaagggacgaagattggagctgtgtggattgtgtggaggcgacacgggtcaggagcatttcatctgatcccttttctctgatggatatgctgatattcaaggctgtggaagagcaggtcaagaagagagtagagaataaggcaatgatcttcgagcagaatgccactgatagtgagtgcaaggtcgatcctaaagtgctctccaagctatatgatcattgggtggatgccacacaccaaggatgtctgccttgactaatcaccgattagctgtagctgtaaattttatgtatacatggtttcagttgcgctcgatccaattgtcttaaccttgaatggacattttgatgtttctttcatgaatgttcaggtcaacggcaagataaaccaattgcgttgtatgagttttagatcataactcaagttttttgtagatcttggtgctatttcatatgatgtgtcatgtttcagtgattgctttatagtgaacccgtaagatgtaaaatgacctttatgacagaaccatatgtaataacagagtattctgaggaacctttgttgaagtaaatgtaatcgagtttcctagc

SEQ ID NO: 203292 - DNA, 2331 bp, Zea Mays
cccgtctcacgaacccgtcccctcacatccctcgcgttgccattgcttggtcctctccgcgcccgccgcccctgctcggctgctccccatgtcccgcgccgcggtgacaaggatccgagaacacccctgcggacgcatccgggattcaaggcctcccctcccttcccctgcccccaccccctcggtgatgcccggatccacgactgctaccgtccagcctcgttctccgtccgcgaccgcttcacggtggcgcagacgctggaggtgtccacagggggcgacaccgtgaccctgcctccgttcgacatcagcgcccctccccccaccaccgtcgatttgtagaagctcctcgcccgttcttgcttcaccagcgattcggggaggccatgcccccctcggccgcaccccttctcctcctcgccgcatcccgcctctgggcagccgcgccacccctccctccacctcgccgtctcctacctcctccccctcgaccgcatctgcctccctctgtggcctcgctaccaaggtcaagatcgtcgagatttgttagggtttggggtttttgcggttgactctgaatcccgccgccgctgctcgcgcaggaggcctcgagctcccagtgctcccctcctcaaccaccctgggtaagtggctcccagattgatagggaaagagttcggactgtaggggctattgaatacttgattgatgccacaagatctggaaatgtgtcccgctatatcaatcacagaagttgttccccaaatctcagcacccgattggttttggtagagagcaaagattgccagcttgctcacattagcttgtttgctaatcaaaacattgccgtaggagaagaactcgcctatgattaccgacaaaagcttgtagcaggcgatggctgcttctgccattgtgggggccttagtgtaggcgtacaatctacgtcgacgccaaaattaaatcaccttcctacatccatagttgatatgaactggacatgcttaatccagggtacatggctgatgtgttcatcttctagaggatatcttgcaccagagtacaccattcaagggcagctgaacaaaaagagcgacgtctacagctttggtgtgctgctgttggagattgtcagtggcagatgccacactgatcctagattacccgttgacgagcagttcctcctagaaaaggtctggacactctatgagttcgatgatctcgagagcatcattgataggacactaaagcgcgattttgacaccgaggaagcactctggttgcttaaggtaagtcttgtgtgcatcccggatagccctaagatcaagtcctccatgtcaatggttgccaagatgctgcaagggtcctcaattaaggtcgaatggatgcaatcaaaactagaagggtgtgcgccatcgaggatcactgcagctaaggcaatcgtgaaggctggaatcgttgttatggcaccgcaagctattagtgtgctaggtggatttaggcctcaagggaaaacgattgacaatgttgtaaaggttgtggagacaacacttgccatgcaggaggctggatgcttctctgttgtgtattagttgttggcagatgatttataagatattgagatcaaaatcaggatgtttccaaactgtctataatcaggatggctattgtagcttttacagtaggtcttcttcccatgggcggtgccctggagcgcctgattgtctcacgtatttgaccagcaacaagggacgaagattggagctgtgtggattgtgtggaggcgacacgggtcaggagcatttcatctgatcccttttctctgatggatatgctgatattcaaggctgtggaagagcaggtcaagaagagagtagagaataaggcaatgatcttcgagcagaatgccactgatagtgagtgcaaggtcgatcctaaagtgctctccaagctatatgatcattgggtggatgccacacaccaaggatgtctgccttgactaatcaccgattagctgtagctgtaaattttatgtatacatggtttcagttgcgctcgatccaattgtcttaaccttgaatggacattttgatgtttctttcatgaatgttcaggtcaacggcaagataaaccaattgcgttgtatgagttttagatcataactcaagttttttgtagatcttggtgctatttcatatgatgtgtcatgtttcagtgattgctttatagtgaacccgtaagatgtaaaatgacctttatgacagaaccatatgtaataacagagtattctgaggaacctttgttgaagtaaatgtaatcgagtttcctagc

SEQ ID NO: 203293 - DNA, 4769 bp, Zea Mays
gaacaatgaagatctgctgatgatggtattcattgctcaagagcaaagatgtctaaggaggctttggattagtgaccgaccttgctggactatctcttttatgtctgaaatcaagcgtagacgtatatatattaaactagttgaatctacaaggagtgaagatttcagtgagagcaaaatcattaccatttcctttttgtatgcgacaatgccagtttggttgttgttctttgcacttggaatatcatcagataaggaagtgtttgatatgatagatatgcaagattgtgatgcttctgttatcaacacgatatctgcaactatcaaagaatctgataaactgtgtgaagacttccgtaaatcagataaagctcgtcaatatgttgatgagttggtaaaaagttcgagatttcctccagcggagtcctttgatgactatattgctaggtttctctttcctgatattagtggaaatagaaacaaagcacttttcttagggtacatggttaaatgtctgctaatggcttttactgggaagcgtaaatgtgataataaggatgatttcaggaacaaaaggctggacctacctggtgaattgcttggaagggaacttagggcacagcttaggctggcagagaaacgcatggttaaggccatccaaagagatttgaatagtgaccgtgagttacaagatcttgaacgttatatagatgcatcaattgttactaatggtctaaatcgtgccttttccactggttcttggtgccatccgtacaaaagagctgaacgatgctcaggaattgttgcgactctaaggagaactaatcctcttcaaatgatgtctgacttgaggaaaacccggcagcgggttgcttacgctgggaaagctggtgatgcaagatatccgaatccatcctattggggaaagctatgctttatgtccactccggatggtgaaaactgtggacttgtaaaaaatctagctgttactgctattgttagctcaagggtgatgcagcccttgattgagagcttcatttcttgtggaatgagtaagctgaatgacattcctactgaacacattcaaagaatggataagatctttttgaatggcaattgggtgggatcttgtgaaaattcagcttcatttgtatttcgattgaggtgcatgagacgcagcagtctgattgatcctcaggttgaaattaaaagggacaagcaccacaatgaggttcgcgtgtttactgatgcagggcgaatcctcagaccccttcttgtggttgagaatctgaataaaatcagaaaacctaaggggcgctcattctctttccatgaattaatgcaacaagaaataattgagttcattggtgttgaagaggaggaagatatacaatgtgcgtggggaatcaggcatttgtttgagagtgaaggtgcgatatctagttatactcactgtgaactggatccttcctttcttctgggattaagctgtggtatcattccttttgcaaaccacaattttgctcggagggtattgtaccaatctgaaaaacactcgcaacaagctattgggtactcaacgacaaatccacacatcagagttgatactctttctcatcaactatattatcctcagaggcctcttttcaaaacagttatagccgactgtcttggcagatcagattatgcttcttttggaagaaaaaatgatttcgcgagaccagaatattttaatggacaaaatgcaattgtagcagtcaatgttcatcaggggtttaaccaagaggattccctggttatgaatagggcttctcttgaacgaggtatgtttaggactgaacacctcaggagctataaggcagatgtagaaaacaaggatggaaccaaacgactgaaattgaaggaaaaaatagactttggaaaaacagaaagcaaaagaggacgtgttgacaatcttgatgatgatggcttaccttacgttggtgcaagtcttcagaccaatgacattgttattggcaaagtctcagaatctggagaagaccacagtattaagctgaagcatacagaaaagggaatggttcagaaagtattgctttcagcaaatgatgaagggaagaattttgctgtggttactctaagacaggttcggacaccttgccttggagataagttttccagcatgcatggccaaaaaggtgttgttggttttctagaatctcaagagaacttcccatttactcacgaaggtatagtcccggatattgtgataaatccacatgccttcccaacacgtcaaactcccggacagctgcttgaagctgctctggggaagggaatagcttgcaaaggtacaatgagatatgcaacaccattcaccacagcatcagttgacgttattgcagaacagttgcacaggtaagtgtttcttctaacggatgaatagctgcttgccttaattcagtaacccaccccttgcacatgaaacgaagatctgagaccctttcaaagggttgggcattttttagcctcttctaggtgaactttgtaattgttaagcttattaatacatcttataagaaccttggacgtcattaatgcaccctatgctctcaagtcttaactctgttagtactttactgcttattacacatacagaagaagaaaagggaaaggtagggaaacaatgtacacagagagagagaacagaatggctggtggccatcctcatattttgtatatgagtaaacatgtatcagtaatttcacatgtatctttttgtcatattttgcaccaaaatggtggaaacacacgagtttccttcccgtttcccttttacttgtattactatcagttgctgcttatctaacggagacatccatattggtaccgctaaatataaaactgagtgcactcacacactactatgttctcagtgaggatcttacttcagataatcaagtgatgtatctgattttttttgtgtgtgtttagacttgttttcgtctgtgacttgtttagttaattttcaagattttatgtatcttgttgcattgcagggctggttattcacgatggggatctgagaacgttctaaatgggcgaacaggtgaaagagtgcaatccttggttttcatgggccctaccttttaccagaggctgattcatatgtccgaagataaggtgaaattccgtaacactgggccggtgcaccccctcacgaggcagcctgttgccgacaggaaaaggtttggtggagttaagtttggagaaatggagcgtgactgcctcctcgcccatgggtcagctgccaacctgcatgaacgcctcttcctgcttagtgacttctcccagatgcacatctgccagacatgcgagcgcgtggctaatgttgtcatgaggtctgtccccggaggcaagaagatccgtggcccctactgcggcttctgcaagtcttcggagaacatagtgagaatcaatgtgccctatggcgcgaagctgctctaccaggaactcttcagcatggggatctgcctcaagtttgagacccaagtctgctagaacttgtagacctgcttgcatccagttattacatatgtacatacagctagcctatgaggatctccaagctggtgtgccggtgtgtgatgctggcatagtaaggatgggcgagctagaaaccctgttgtgtttatgtgctgttttctccctgctcatgtggtaaactatgctaaagtgaatgaacactcgtttcctgttccctctttgaatgcgctgtgttagcatgcccttttgtttgaagattgcgtcttttgtggagcaccttgtattgctccgtagggatcacaccccttaccgccggcgatggccgacgatttgagataagatataatatttctggtcgtccttgttaaagagttcatgcatatacagtacacaagaaatgtcgatcgaatatagctagtaaaacaacttcaagaaacatgtacatgcggttggatggatcctttctcatcgatgatttgtctgcattgattcatccaaatcaagatacaagaggcagcatgagatgatctgtctgtgtctgcattgatccaaatcaagacacaatagagggacagcatgaggacgaacagagacaaatccatcgccccgtgcttgagtttctccacgagctagtaagagatcagcaagatcctctctagctaactacctgagggaaacgaacagcaggggaggaccaagaagtgatgagtgggggaactccatgcgagccctctggcctctcctcccacaggctacatcttgaggacgaagaagaacagtcctcgatgcgtcttcacctagctgctgcttaatttacgagtgatgctcttcgatccaaaggtacttatactacaaatacccctccccctctctctctctgtctccatcgccccaatgcaaagccggtctttctatagctcatagctgctggaatttggacctggctttgaaacatgtcgtgcactcgcgttgggtttgaaagagatgacttgcgttgcagcgagcgagcgacacaggtcaggtcacactgcaggggggaagcgaagcacgagtgtacatgcattgaacctggacgccctctttagcttttgcgtttgggcatacagtatttttattttggccttctgggatttgggaatacgagtcatcgattccctcagtgtcgtcccgtcacagctttttttttccgttgcctttatgctgcatgcccattcagcagtcacgca

SEQ ID NO: 203294 - DNA, 4938 bp, Zea Mays
cacccgccagaggctataagctgctagtgcttgtggaatggaagagccacagaaggacagtgggcaaccatcaaaaagttctgattctgagctagaagctatggtattggatgataatggagcgggaaaatcccatagtatggaggaaaacagggattctcctatagatgtcgatggtgggcagtcatctatggatgtggatatcaagggaaaatcatccctcagtgatgatgttaatggaaagtcttcttccgagccatattccaatgctccaattgacatgagtgtcgaaagcctagagaagttttgcaaagaagcgtcaaggtccttctttgatgaagttggtctgattagccatcagataaattcctacaatgagtttgtctcgcatgggctccaggagctttttgattcgcttggggaagtgattgttgaacctggctatgatccttcgaagaaaggatcaggtggctggaagcatgccatcatcaagtttgggagagtgaagcttgaaaagcctgtgttttggactggcaaggatgaaggttctgttgattttaaaccttggcatgctcgtctccagaatatgacatatgcttcaagacttatagtagaagtgactattcaggtttattctttggagaaaagtgacaaatctaaaacagggaatgatggttttgttcaaaaaaggaacttcatgaatgaaactcattggatatttattggcctccttccggttatggtcaaatcaaacttatgtttgctgcatagcctcaacgaaagtgagtgcctgttcgacgcaggtggatactttttggtcaagggaatggagaaggtattcattgctcaagagcaaagatgtctaaggaggctttggattagtgaccgaccttgctggactatctcttttatgtctgaaatcaagcgtagacgtatatatattaaactagttgaatctacaaggagtgaagatttcagtgagagcaaaatcattaccatttcctttttgtatgcgacaatgccagtttggttgttgttctttgcacttggaatatcatcagataaggaagtgtttgatatgatagatatgcaagattgtgatgcttctgttatcaacacgatatctgcaactatcaaagaatctgataaactgtgtgaagacttccgtaaatcagataaagctcgtcaatatgttgatgagttggtaaaaagttcgagatttcctccagcggagtcctttgatgactatattgctaggtttctctttcctgatattagtggaaatagaaacaaagcacttttcttagggtacatggttaaatgtctgctaatggcttttactgggaagcgtaaatgtgataataaggatgatttcaggaacaaaaggctggacctacctggtgaattgcttggaagggaacttagggcacagcttaggctggcagagaaacgcatggttaaggccatccaaagagatttgaatagtgaccgtgagttacaagatcttgaacgttatatagatgcatcaattgttactaatggtctaaatcgtgccttttccactggttcttggtgccatccgtacaaaagagctgaacgatgctcaggaattgttgcgactctaaggagaactaatcctcttcaaatgatgtctgacttgaggaaaacccggcagcgggttgcttacgctgggaaagctggtgatgcaagatatccgaatccatcctattggggaaagctatgctttatgtccactccggatggtgaaaactgtggacttgtaaaaaatctagctgttactgctattgttagctcaagggtgatgcagcccttgattgagagcttcatttcttgtggaatgagtaagctgaatgacattcctactgaacacattcaaagaatggataagatctttttgaatggcaattgggtgggatcttgtgaaaattcagcttcatttgtatttcgattgaggtgcatgagacgcagcagtctgattgatcctcaggttgaaattaaaagggacaagcaccacaatgaggttcgcgtgtttactgatgcagggcgaatcctcagaccccttcttgtggttgagaatctgaataaaatcagaaaacctaaggggcgctcattctctttccatgaattaatgcaacaagaaataattgagttcattggtgttgaagaggaggaagatatacaatgtgcgtggggaatcaggcatttgtttgagagtgaaggtgcgatatctagttatactcactgtgaactggatccttcctttcttctgggattaagctgtggtatcattccttttgcaaaccacaattttgctcggagggtattgtaccaatctgaaaaacactcgcaacaagctattgggtactcaacgacaaatccacacatcagagttgatactctttctcatcaactatattatcctcagaggcctcttttcaaaacagttatagccgactgtcttggcagatcagattatgcttcttttggaagaaaaaatgatttcgcgagaccagaatattttaatggacaaaatgcaattgtagcagtcaatgttcatcaggggtttaaccaagaggattccctggttatgaatagggcttctcttgaacgaggtatgtttaggactgaacacctcaggagctataaggcagatgtagaaaacaaggatggaaccaaacgactgaaattgaaggaaaaaatagactttggaaaaacagaaagcaaaagaggacgtgttgacaatcttgatgatgatggcttaccttacgttggtgcaagtcttcagaccaatgacattgttattggcaaagtctcagaatctggagaagaccacagtattaagctgaagcatacagaaaagggaatggttcagaaagtattgctttcagcaaatgatgaagggaagaattttgctgtggttactctaagacaggttcggacaccttgccttggagataagttttccagcatgcatggccaaaaaggtgttgttggttttctagaatctcaagagaacttcccatttactcacgaaggtatagtcccggatattgtgataaatccacatgccttcccaacacgtcaaactcccggacagctgcttgaagctgctctggggaagggaatagcttgcaaaggtacaatgagatatgcaacaccattcaccacagcatcagttgacgttattgcagaacagttgcacagggctggttattcacgatggggatctgagaacgttctaaatgggcgaacaggtgaaagagtgcaatccttggttttcatgggccctaccttttaccagaggctgattcatatgtccgaagataaggtgaaattccgtaacactgggccggtgcaccccctcacgaggcagcctgttgccgacaggaaaaggtttggtggagttaagtttggagaaatggagcgtgactgcctcctcgcccatgggtcagctgccaacctgcatgaacgcctcttcctgcttagtgacttctcccagatgcacatctgccagacatgcgagcgcgtggctaatgttgtcatgaggtctgtccccggaggcaagaagatccgtggcccctactgcggcttctgcaagtcttcggagaacatagtgagaatcaatgtgccctatggcgcgaagctgctctaccaggaactcttcagcatggggatctgcctcaagtttgagacccaagtctgctagaacttgtagacctgcttgcatccagttattacatatgtacatacagctagcctatgaggatctccaagctggtgtgccggtgtgtgatgctggcatagtaaggatgggcgagctagaaaccctgttgtgtttatgtgctgttttctccctgctcatgtggtaaactatgctaaagtgaatgaacactcgtttcctgttccctctttgaatgcgctgtgttagcatgcccttttgtttgaagattgcgtcttttgtggagcaccttgtattgctccgtagggatcacaccccttaccgccggcgatggccgacgatttgagataagatataatatttctggtcgtccttgttaaagagttcatgcatatacagtacacaagaaatgtcgatcgaatatagctagtaaaacaacttcaagaaacatgtacatgcggttggatggatcctttctcatcgatgatttgtctgcattgattcatccaaatcaagatacaagaggcagcatgagatgatctgtctgtgtctgcattgatccaaatcaagacacaatagagggacagcatgaggacgaacagagacaaatccatcgccccgtgcttgagtttctccacgagctagtaagagatcagcaagatcctctctagctaactacctgagggaaacgaacagcaggggaggaccaagaagtgatgagtgggggaactccatgcgagccctctggcctctcctcccacaggctacatcttgaggacgaagaagaacagtcctcgatgcgtcttcacctagctgctgcttaatttacgagtgatgctcttcgatccaaaggtacttatactacaaatacccctccccctctctctctctgtctccatcgccccaatgcaaagccggtctttctatagctcatagctgctggaatttggacctggctttgaaacatgtcgtgcactcgcgttgggtttgaaagagatgacttgcgttgcagcgagcgagcgacacaggtcaggtcacactgcaggggggaagcgaagcacgagtgtacatgcattgaacctggacgccctctttagcttttgcgtttgggcatacagtatttttattttggccttctgggatttgggaatacgagtcatcgattccctcagtgtcgtcccgtcacagctttttttttccgttgcctttatgctgcatgcccattcagcagtcacgca

SEQ ID NO: 203295 - DNA, 1216 bp, Zea Mays
agaagagctcccgtttgtttcctcgcgcgcttacgttgtcggcggagcatgaccaagtgtccgtgataagccccggatgagcccccgatggccaagactcccgtcttcttcctcgaccgctaaccttaccggtccccaaatgtcgcctctcgtgctgctgctcctcgcgcacctactcgccacggccactgcagcgggagcagcgcggaccagggacgacgggcctcctgctccgtcgtcgtcgtccccgcgggtgccggcgacgacgccgccgtggccggaccagttccacgcggtggtggtgacgaacctgagcgcgcgcggcggcgggctgcagctgatcgacctgtactacgactggccgcgagggcgcgacctgaacatcgtccgcgaccagctgtccggcgagcggcgctggagctggaacgtggagtggagcaacggcaccgccttcctgttcgactccgcgtcctgccgcaccttccagttcgccgtgggcctcctgccgcccgactggaaggcccgcggcgccgcctacctggggcgcgaccgcgtcgacggcttcgactgccacgtctggtccaacttcgtcttcgcccgctactacgaggacgtcgccaccggacgccccgtcagctggaacttcaatgggctgcagcggcatgtgctgagcttcgaggcgggggcagtgctgcaggactcctccaagtggcaggcgccggcttactgcttcaccaacaccaatggcagcagtgccgacgccgccgcttcgtcttcctgagatcacgtcgctgggcctccggagtccgggctccacctgcagctggacgctgcatgtcatttggcagtcggctctcatcttgatggttgactcaggagagccttttactattagtcagtaccgattctcgcgtcgcgtgggctagaatccgtgcgatgccacggaacataaattgacgagccttcaatagcgcgacggacgacgtgagtataatggtgggattgtttagtggtgctattaagaatcaactcaataatcataatacatattgaatcctgtcatttttattgaaagagatccaagaaattccaacacacgtttaagcatcgtctcggatgtttatctttcaaacgtctgacaagaaaaaatgatgttctgttaacaattaatcaaggcatgagaatttgtgaagcaccaaaaagattaagtttggca

SEQ ID NO: 203296 - DNA, 1241 bp, Zea Mays
gataagccccggatgagcccccgatggccaaggtctcgcctcctcctcgggatcatcatgtcgtcgttggtccctcgagagcggcaaattaataagtaaatgagcaactttttctcgcgtgtggtccagactcccgtcttcttcctcgaccgctaaccttaccggtccccaaatgtcgcctctcgtgctgctgctcctcgcgcacctactcgccacggccactgcagcgggagcagcgcggaccagggacgacgggcctcctgctccgtcgtcgtcgtccccgcgggtgccggcgacgacgccgccgtggccggaccagttccacgcggtggtggtgacgaacctgagcgcgcgcggcggcgggctgcagctgatcgacctgtactacgactggccgcgagggcgcgacctgaacatcgtccgcgaccagctgtccggcgagcggcgctggagctggaacgtggagtggagcaacggcaccgccttcctgttcgactccgcgtcctgccgcaccttccagttcgccgtgggcctcctgccgcccgactggaaggcccgcggcgccgcctacctggggcgcgaccgcgtcgacggcttcgactgccacgtctggtccaacttcgtcttcgcccgctactacgaggacgtcgccaccggacgccccgtcagctggaacttcaatgcggcatgtgctgagcttcgaggcgggggcagtgctgcaggactcctccaagtggcaggcgccggcttactgcttcaccaacaccaatggcagcagtgccgacgccgccgcttcgtcttcctgagatcacgtcgctgggcctccggagtccgggctccacctgcagctggacgctgcatgtcatttggcagtcggctctcatcttgatggttgactcaggagagccttttactattagtcagtaccgattctcgcgtcgcgtgggctagaatccgtgcgatgccacggaacataaattgacgagccttcaatagcgcgacggacgacgtgagtataatggtgggattgtttagtggtgctattaagaatcaactcaataatcataatacatattgaatcctgtcatttttattgaaagagatccaagaaattccaacacacgtttaagcatcgtctcggatgtttatctttcaaacgtctgacaagaaaaaatgatgttctgttaacaattaatcaaggcatgagaatttgtgaagcaccaaaaagattaagtttggca

SEQ ID NO: 203297 - DNA, 806 bp, Zea Mays
ttccaggataggcccacctcaagctctccgaactggggtatgctgatgcttaaatggtccatatcctggagcgggacacaaactgctgcctgtatggactcgtgcgattcagggtgaaccatcagattgtctagtgtcttctttgtaataaatttatctgttcttggtactttgtctatggttgaatcggaacccattttccgtttgcctagattcttaatttctggtgctgtatccagctgaaactagtagatctatgatcttgtggctgcagcatgttcttgtcacttttatctggtctccgttggttcggttcacaggttgtgtgctttaaaaggctgtgcttaagtcctgcaattcgagtccaccaaactgtagggtgcaagtcgagattttattagtgatgcaagttgctggtattggtgcattatcgggctaatacgcttgcgttgccttctgattttataagtgatgtaaattgctggttttaacgtgcattacctggtgggctggttctataactgatgcaaattcctggttttaacttggtgcattaatggtgcgtttggcaagcaggatctgctgtcatgcatttgtggcgcacccgtttcaagcgtgaaacgttcaacacttctacttgtcaaaagtcgtgcctaaaacaatctgcttgttacgttttctcgatttctgcttgtagggttgcaatggccagacgctagttttgcagtgattctggttttcaatttctgaaatatgaattattgctctaatccatttgttacataggcttttacccaaaaaaaaac

SEQ ID NO: 203298 - DNA, 1174 bp, Zea Mays
gtagatttctaatctttactagattggcatgaatgctgagttaatgggttacattgaccttgcatctttttttaagtgtttcaaagatgttgttttggcatccctgtacccagcttgctttgggtaacagtggttccttgtagccaaggcaccgcataggcggccagaccaaacactcgttttcatgtcacttctattgacacgaggactggcacttgctgcttgcttttttttaaccaggttctgaccacctgaggcaagtctttggcaagcagatgggtttgagtgatcaggacattgttgccctctctggtggccacaccttgggaaggtgccacaaagagcggtctggttttgagggggcctggactacaaagaggcccacctcaagctctccgaactggggtatgctgatgcttaaatggtccatatcctggagcgggacacaaactgctgcctgtatggactcgtgcgattcagggtgaaccatcagattgtctagtgtcttctttgtaataaatttatctgttcttggtactttgtctatggttgaatcggaacccattttccgtttgcctagattcttaatttctggtgctgtatccagctgaaactagtagatctatgatcttgtggctgcagcatgttcttgtcacttttatctggtctccgttggttcggttcacaggttgtgtgctttaaaaggctgtgcttaagtcctgcaattcgagtccaccaaactgtagggtgcaagtcgagattttattagtgatgcaagttgctggtattggtgcattatcgggctaatacgcttgcgttgccttctgattttataagtgatgtaaattgctggttttaacgtgcattacctggtgggctggttctataactgatgcaaattcctggttttaacttggtgcattaatggtgcgtttggcaagcaggatctgctgtcatgcatttgtggcgcacccgtttcaagcgtgaaacgttcaacacttctacttgtcaaaagtcgtgcctaaaacaatctgcttgttacgttttctcgatttctgcttgtagggttgcaatggccagacgctagttttgcagtgattctggttttcaatttctgaaatatgaattattgctctaatccatttgttacataggcttttacccaaaaaaaaac

SEQ ID NO: 203299 - DNA, 699 bp, Zea Mays
tgtcgttggacaggaaagggggagctcaggcctcaagaagaaagagcccgcgccacgccacgccacgccgccgtggacatggaggtggagctggagcacggcggggatgaaggcggcgacagagggagcgagtcctcctcctcctcctccaagaggagcttcggcgcttcttcggacgcaaccgtcagcagcacaccaagcaagctgcaagccctgaggtttgcagaggacctctcgctgccgtcggtgcaggtggtggtgatgagcgccaacatggggtgttcgcactgccggcagcgggtcgccaacgtcgtctccaagatgaacggcctgctggactacatggtggacttcgggaagaaggaggtgacggtgcgcgggaaggtggtgcataccaagaagaagaagaagaggcacatgagggcactgctgggtgcagcaggagcaggttgggacgacgcccgatcggcggcgtctttgcccggcggccatgccaggacgctgtcctggttttgggggtgctacagctcatgacggccatagctagtatagtctttatataatactaatatataccgcatatatatagagagactatcatacgtctgtatgttacatttatatgtaactagtaggagctgcgtatatatagttgttgtattaataatctgttagtagtaatatatttcttctcctggt

SEQ ID NO: 203300 - DNA, 2578 bp, Zea Mays
acctggaacacacgcaccgtcccaagttaacctctcgtgctcgggcactttctttttccttcccccctgtgcgctcggccgcctccgccgctgcctcgctccctccgcgcccaccacggaggcgcacgcgcgggcgcagcgtccctcgcgtgcctcgccttccgcactgctctgtccgcccgcctggctcctgcctcctcctcctcctcctcctctagggttagggcacgcgtcgcgggggcccgtggcgcccggcgcaatgcggaggccgtcgggggccggcgtgccgagccgccgccgccgcgcgatccaggtgctcgtggcggtctccctcgcctacgcggtcgccgtgctgctcctcgagtcgcccctcgtgtccacgtcgctgcccggggcgggggcgtccgccgcggcgtcgcggaagctccacctcgacggcgcgtgggagggcgcgggacgagcagcgccggcgcgccccgcgaagcacccgcacagggagaccctctcggcggacgcggggcggggacgggcgcgccggttggcggggatcgtctctggcctcgagctccgccacctcaactccacccgctccggctcgctccgcaaggtcgccgcggaggccgccgagtcaggggcccgcgtgttctccgacctggaggctctagcgacggccttgactttctcgggcgattcgtcaggggaggaggaggagaagagcaagtgcccgcactcgatcgtcctcagcggcgacgagttccgggagagggggcgggcggtggagctgccgtgcgggctcacgctgggttcgtatatcacggtcgccgcgacgccgcacgaggcgcaccctgagcgggatcctaagatcacgctgctcagggagggggaagagccgatcatggtgtcgcagttcatgatggagctgcaggggctcaagacggtggacggcgaggatccgcccaggattctccacttcaacccccgcctccgcggcgactggagcggcaagccggtgatcgagcagaacacctgctaccgcatgcagtggggcactccgctccgctgcgatggctggaggtcccgtgccgacgaggagactgtggatgggttggccaagtgtgagaagtggattcgggatgatgaagggcggtccgaggagtcgaaaacatcatggtggctgaaccggctcattggccgtacgaagaccgtctccgttgattggccatacccattcgtggagaaccacctgtttgttctaactctcactgctggattggaaggttaccatgtgaatgttgatggacggcatgtgacatcatttccataccgcactggatttgttcttgaggatgctactggcttatcattgaatggggacctggatgtgcaatcagtgttcgcggggactctgcccactacacatcctagcttttctccacagaaacatctagagttgttacccagttggcaggcccctccccttccagacgaaccagttgagattttcatcggtatcctgtcagcaggcaaccattttgctgagcgtatggctgcaagaaagacatggatgtctgctgctcagaagtcgtcgaatgttgtggcccgtttttttgttgccctgcatggcagaaatgaggttaatgtggagctgaaaaaagaggctgagttttttggtgacattgttattgtcccattcatggatagctatgatttggttgttctcaagacaattgccatatgcgagtatggggtccatgttgtatctgctagatacataatgaagtgtgatgatgatacttttgttagacttgattcagtaatggctgaagtgaagaaaatccagaatggtgaaagtctctatatagggaacatgaattatcaccacaagccattacgtgatgggaaatgggctgttacttacgaggaatggccagaagaggattatcccatctatgcaaatggtcctggatatgttatatcctctgatattgcaggttccattctatcggaatttttaaagcataaattaaggcttttcaaaatggaggatgtgagcatgggcatgtgggtagagcggttcaacaacaccagacttgttaaatatgtccacagcatcaaattttgtcaatttggatgcatagatgattattacactgcacactaccaatcaccaaggcagatgttgtgtttgtgggacaaactgcaggctggaaaagcccaatgctgcaatatgagatagcaagaatggatgtggtggtactgctgaccaggtggtgtttgagctggaaatggaaacaaggggaacagacagcagcctgtaacgcctttccctcttcttttctcaacgtatagaccgagttctttgagcagtatgagacctgcttggggacttgatttgtaaatggaacggttagaaagcttagttaaataactgttactttttggcaccattggctgtggttgctgtcagacaacccagctggtacacatgagcgatcttggtggacaagaattttgctgtgtaacttctcttaacatggtcataatttatgatttgatcagttggtggatgtatcactat

SEQ ID NO: 203301 - DNA, 2270 bp, Zea Mays
gtcatcatgtgcctcgagactggaggattttcagtggctaacatgttgcatataaagctgacagttgatttacggagtacaaattatttttgggttccttttcaatcctctcatttgggccgagagaaggatagtgtcgtcgtagcccatgtcaattttgaggtcaaaagcatcggtccgtccactatccaagccccgaattacgtcacattctccaaaatggctgcgggtcgcacccggcgctcgtccctccctgccgcaaccaacgccaccgcttcggcgcttacccatcagatcagacagacaaacaaggcaaacgagaccctagcgcagcatggcttggacggctgcgggcacagtttgctggcgcctcctccgcctcccctccgtccgctgccctctctcgtcccgggcccggtgttccgctgcgcagagcctagacgccgtggacaaggagtatgccgacctcaacctccggcctctgtaccccaacaggggccatcacatgcgcatacggtagcacgtgaacccgctcagctcatccttctcggagcccacggggccgccagagtggaaggaggtgttcgacgaccccttgcttcccctcatggtcgacatcggctgcgggaatcttgatgtccagggagtgggaggttcttgatttggcacgcgaagaattctggcaagagtcaaaactaccttgggctagaaatccgccaaaagtttaagagagaaaagagaagatcagaacagttttagaaacaaagcactgggaacctcaagctcaagcagccccccgccccaaagcatgacacagcacacagactgcaccctcataacacggaacaaagataatgaactgcagaatcgcatgccatcatttcgctttcaaagacacttgctttgctgtttggaacaattctcgaagatgattcagtttcattctttcctgagtcccacattacatagattgccaggccgttgaaatattttggcataaaagatataagcgtatgccagtatcacacggtccattgcgcataatgcaattatcttgatgtggccagccccttaaatccaagttgtctgctgcagaattttgtcttgtataagtgtccaagcaaaccatttaaatgtgcctttgaactgcacccggtacttatgcattgttaaatttgtagtttggtgacactctacttgttttgtttctgtagttggtggagcgggcacagttctgggtgaatgaattggagcttatgtacgttgtcctgatccacacttcaaaaagagacatcacaaaagaagagttctgcagcaaccattggtcgattcaatcataaataatctatgtttaggcggacaggttttcatacaatcagatgtactggaagtagcggtagacatgagggaaaggtttgatgggtactctggtattttggcacatgttaattatgtcgatcaagatcttcagtgtgacaatgaaggatggcttctggacaacccaatgggaatccggacagagcgagaaatccatgcagagcttgaaggagcaacgatatacaggagggtgtaccaaaagttgggaaaaaacaaagcatccaagtacaaagcctggcgaaccaaaacgaagagaagcccaagcaattagccaatgcttttgatgaagatgacaactggcaaaagtgttcctttgttggtcaaattgtacttatggtgtttagcatcaggtgttgtcttcgttctgtccataattcaggtctggaattggtcaccatctatcggtatgcagagagtttgtagaggcaatccagatgaggcaatttgatgtgcgctaggattgttcaaactttggtccgctcaacgttctcttgacttggtagatatacaagaatggacaacgttttcttgacttggtaaagtttggtcattagtttgtgaaacagaatgctgcattgctcttggcatttgataagtgacaggtggataagacgacaccgaggtgtgggcactttttagtgtttgatgtttgctaagtcctctaccatcaggtcaatacatatgttaatcaatttgaataactccttaattgaaattttgttgctaatggtatcgaattaactcaccattgtattcggcgaataatgtttcgttgcaacacagtcatattgtactagtgatagctgatattgttgggttgcccgtgtattttgtaataagacacataaatatatgttctattggttagatgagtgtgaatgctaacaatcaag

SEQ ID NO: 203302 - DNA, 2124 bp, Zea Mays
gctatcatgtgtgttgcaaaaagaaagaagctgtcatcatgtgcctcgagactggaggattttcagtggctaacatgttgcatataaagctgacagttgatttacggagtacaaattatttttgggttccttttcaatcctctcatttgggccgagagaaggatagtgtcgtcgtagcccatgtcaattttgaggtcaaaagcatcggtccgtccactatccaagccccgaattacgtcacattctccaaaatggctgcgggtcgcacccggcgctcgtccctccctgccgcaaccaacgccaccgcttcggcgcttacccatcagatcagacagacaaacaaggcaaacgagaccctagcgcagcatggcttggacggctgcgggcacagtttgctggcgcctcctccgcctcccctccgtccgctgccctctctcgtcccgggcccggtgttccgctgcgcagagcctagacgccgtggacaaggagtatgccgacctcaacctccggcctctgtaccccaacaggggccatcacatgcgcatacggtagcacgtgaacccgctcagctcatccttctcggagcccacggggccgccagagtggaaggaggtgttcgacgaccccttgcttcccctcatggtcgacatcggctgcgggaatcttgatgtccagggagtgggaggttcttgatttggcacgcgaagaattctggcaagagtcaaaactaccttgggctagaaatccgccaaaagttggtggagcgggcacagttctgggtgaatgaattggagcttatgtacgtctattttatgtttgcaaatgcaacgatgtcttttgagaaaatcatatcgtcataccctggtcccctgtcacttgtttcaatactgtgtcctgatccacacttcaaaaagagacatcacaaaagaagagttctgcagcaaccattggtcgattcaatcataaataatctatgtttaggcggacaggttttcatacaatcagatgtactggaagtagcggtagacatgagggaaaggtttgatgggtactctggtattttggcacatgttaattatgtcgatcaagatcttcagtgtgacaatgaaggatggcttctggacaacccaatgggaatccggacagagcgagaaatccatgcagagcttgaaggagcaacgatatacaggagggtgtaccaaaaggttagagatgcttctttctagctgtttatcagctacagaagttgtccgaggagtaaggtttccaagaatgttcattgcatgtatttcattaagagaagttgggaaaaaacaaagcatccaagtacaaagcctggcgaaccaaaacgaagagaagcccaagcagtaacacacctgatgtcttcctgcttgaaccatgccacaagttgcctttactacatcaagctgcattacatttctgacagtgcgcttgtgcacatctaatctttttttttcacctgatgcaatgagtcagattagccaatgcttttgatgaagatgacaactggcaaaagtgttcctttgttggtcaaattgtacttatggtgtttagcatcaggtgttgtcttcgttctgtccataattcaggtctggaattggtcaccatctatcggtatgcagagagtttgtagaggcaatccagatgaggcaatttgatgtgcgctaggattgttcaaactttggtccgctcaacgttctcttgacttggtagatatacaagaatggacaacgttttcttgacttggtaaagtttggtcattagtttgtgaaacagaatgctgcattgctcttggcatttgataagtgacaggtggataagacgacaccgaggtgtgggcactttttagtgtttgatgtttgctaagtcctctaccatcaggtcaatacatatgttaatcaatttgaataactccttaattgaaattttgttgctaatggtatcgaattaactcaccattgtattcggcgaataatgtttcgttgcaacacagtcatattgtactagtgatagctgatattgttgggttgcccgtgtattttgtaataagacacataaatatatgttctattggttagatgagtgtgaatgctaacaatcaag

SEQ ID NO: 203303 - DNA, 4481 bp, Zea Mays
atggcggcgccggaatcggaatgcggcgggagtgacggctaccgcgacctccgcggcgtgcgcgtcgacctggacacgggagcagccggagccgatgggggaggaggcttcgccgtctccttctggctctacctgtccgtctccgccagaccgtcctcagtgatcctccaccagatcacagcgggagatgacaccaagttgccgtttcttgctttaggtgaaggaaacaaactgcttctcttcccgttgatgaggctgcacagggaagctcctgctcctgctagttcctacccatggactgacacaaccaatctatcatctacgagtgtatgccctcttgagaaatggttccacattgggtgtgaggttactgaaaatgttatgtgtcttcacgttgatggtttcctaactgctgaggcccccctttgttcactgtttgatgagccagaccgtcaggatgattcaaaccaaattagcttagttggaaatgatggcaagcttgaaggctatatctataatattgaggtttcatatgtactaggagctataaaagaacaatacacaaagaacccaccttttaagttatctattgactattcatgctctgatggaatcgaagagggtgatgacggcatttggagcatcgttggtgggaagctctcttccaaatgtgacaataagctcttccgtattaaattctctacacttcacatgcaaagatattcttttctggaagcatattccaaaccgattcgctgtatatctcgaagccgcactgtccgccccttgggtcctacaaagcgggcgagttctgcaacagcaaatgaaattgacatgctcagtaatggccaagggtttgttagtactgacaaagtaaatagtcgtggacattcagtgtgtctgcatacgcccatgtttcccaagatagaaggtggaatggtggaggtagtagaggcccccaaaatagcatcacagaataagaatgccagaaaggtggtagtaagcaaagaagcacagaatgtcatagggactgattcctcaacatccaactatgacagttttgattcaggaagttcttggagtggatcagaaggagatgatggtattgaaaccttttcagacgctgtggttttcagatactgtctagacagcacatatgaccggtcaaagtttcttagaggtgcatctcttactgttaacaaagatgacttggtaaaacttgcagaccgagtctcgttatatagtggatgctcccaccacagaaaccaaatattaatgtcgaagagattgttcagagagggtgctgacacttggaacatgatctcaaagaacaatgaacgtgctctttggtcatctgccattccagagatcataacaaaatttacgaacattgtccattctgtgcgtaggggtttatcagagcaggatcttgaggttttaagaggcattgctggttgtggtgaggacataggaagagatgaatttgataggctatggtgctggttatacctagtggttgtttcattatcgagagagagaattaaaaagctgtgggattgcacagcacctagatggatagagggcttgattacaacagaagaagctgagaatgcactaagaagttccagggaattgttaaaggaggcaggaacatttgttctcagatttcctatcacccgaagctggccacatccagatgctggaagcctagttgtcaattacattggctctgatagctcaattcatcataggctactctctcttgattccagtgatgctagcgctgagaaactgcaagatttgctgctccaggaaccagaactatcacagttgggcagggttgatcgggtctcaatcaccatccggagatgaccaaggcttcaaacggttaaacttacattcaaaagcaggatttaggatgctgccacgagaagagggtcaaaagcatccaagagcatagcccataacacccattgcctgttgttaccatgcacaggttgtaaattggttcccttcgtagttcgtacaaagaggatgttttgccgtactagtgaggtctagtctagttgcttcagaaaaccaacagtaacatcagctatcatgtgtgttgcaaaaagaaagaagctgtcatcatgtgcctcgagactggaggattttcagtggctaacatgttgcatataaagctgacagttgatttacggagtacaaattatttttgggttccttttcaatcctctcatttgggccgagagaaggatagtgtcgtcgtagcccatgtcaattttgaggtcaaaagcatcggtccgtccactatccaagccccgaattacgtcacattctccaaaatggctgcgggtcgcacccggcgctcgtccctccctgccgcaaccaacgccaccgcttcggcgcttacccatcagatcagacagacaaacaaggcaaacgagaccctagcgcagcatggcttggacggctgcgggcacagtttgctggcgcctcctccgcctcccctccgtccgctgccctctctcgtcccgggcccggtgttccgctgcgcagagcctagacgccgtggacaaggagtatgccgacctcaacctccggcctctgtaccccaacaggggccatcacatgcgcatacggtagcacgtgaacccgctcagctcatccttctcggagcccacggggccgccagagtggaaggaggtgttcgacgaccccttgcttcccctcatggtcgacatcggctgcgggaatcttgatgtccagggagtgggaggttcttgatttggcacgcgaagaattctggcaagagtcaaaactaccttgggctagaaatccgccaaaagtttaagagagaaaagagaagatcagaacagttttagaaacaaagcactgggaacctcaagctcaagcagccccccgccccaaagcatgacacagcacacagactgcaccctcataacacggaacaaagataatgaactgcagaatcgcatgccatcatttcgctttcaaagacacttgctttgctgtttggaacaattctcgaagatgattcagtttcattctttcctgagtcccacattacatagattgccaggccgttgaaatattttggcataaaagatataagcgtatgccagtatcacacggtccattgcgcataatgcaattatcttgatgtggccagccccttaaatccaagttgtctgctgcagaattttgtcttgtataagtgtccaagcaaaccatttaaatgtgcctttgaactgcacccggtacttatgcattgttaaatttgtagtttggtgacactctacttgttttgtttctgtagttggtggagcgggcacagttctgggtgaatgaattggagcttatgtacgtctattttatgtttgcaaatgcaacgatgtcttttgagaaaatcatatcgtcataccctggtcccctgtcacttgtttcaatactgtgtcctgatccacacttcaaaaagagacatcacaaaagaagagttctgcagcaaccattggtcgattcaatcataaataatctatgtttaggcggacaggttttcatacaatcagatgtactggaagtagcggtagacatgagggaaaggtttgatgggtactctggtattttggcacatgttaattatgtcgatcaagatcttcagtgtgacaatgaaggatggcttctggacaacccaatgggaatccggacagagcgagaaatccatgcagagcttgaaggagcaacgatatacaggagggtgtaccaaaagttgggaaaaaacaaagcatccaagtacaaagcctggcgaaccaaaacgaagagaagcccaagcaattagccaatgcttttgatgaagatgacaactggcaaaagtgttcctttgttggtcaaattgtacttatggtgtttagcatcaggtgttgtcttcgttctgtccataattcaggtctggaattggtcaccatctatcggtatgcagagagtttgtagaggcaatccagatgaggcaatttgatgtgcgctaggattgttcaaactttggtccgctcaacgttctcttgacttggtagatatacaagaatggacaacgttttcttgacttggtaaagtttggtcattagtttgtgaaacagaatgctgcattgctcttggcatttgataagtgacaggtggataagacgacaccgaggtgtgggcactttttagtgtttgatgtttgctaagtcctctaccatcaggtcaatacatatgttaatcaatttgaataactccttaattgaaattttgttgctaatggtatcgaattaactcaccattgtattcggcgaataatgtttcgttgcaacacagtcatattgtactagtgatagctgatattgttgggttgcccgtgtattttgtaataagacacataaatatatgttctattggttagatgagtgtgaatgctaacaatcaag

SEQ ID NO: 203304 - DNA, 4255 bp, Zea Mays
atggcggcgccggaatcggaatgcggcgggagtgacggctaccgcgacctccgcggcgtgcgcgtcgacctggacacgggagcagccggagccgatgggggaggaggcttcgccgtctccttctggctctacctgtccgtctccgccagaccgtcctcagtgatcctccaccagatcacagcgggagatgacaccaagttgccgtttcttgctttaggtgaaggaaacaaactgcttctcttcccgttgatgaggctgcacagggaagctcctgctcctgctagttcctacccatggactgacacaaccaatctatcatctacgagtgtatgccctcttgagaaatggttccacattgggtgtgaggttactgaaaatgttatgtgtcttcacgttgatggtttcctaactgctgaggcccccctttgttcactgtttgatgagccagaccgtcaggatgattcaaaccaaattagcttagttggaaatgatggcaagcttgaaggctatatctataatattgaggtttcatatgtactaggagctataaaagaacaatacacaaagaacccaccttttaagttatctattgactattcatgctctgatggaatcgaagagggtgatgacggcatttggagcatcgttggtgggaagctctcttccaaatgtgacaataagctcttccgtattaaattctctacacttcacatgcaaagatattcttttctggaagcatattccaaaccgattcgctgtatatctcgaagccgcactgtccgccccttgggtcctacaaagcgggcgagttctgcaacagcaaatgaaattgacatgctcagtaatggccaagggtttgttagtactgacaaagtaaatagtcgtggacattcagtgtgtctgcatacgcccatgtttcccaagatagaaggtggaatggtggaggtagtagaggcccccaaaatagcatcacagaataagaatgccagaaaggtggtagtaagcaaagaagcacagaatgtcatagggactgattcctcaacatccaactatgacagttttgattcaggaagttcttggagtggatcagaaggagatgatggtattgaaaccttttcagacgctgtggttttcagatactgtctagacagcacatatgaccggtcaaagtttcttagaggtgcatctcttactgttaacaaagatgacttggtaaaacttgcagaccgagtctcgttatatagtggatgctcccaccacagaaaccaaatattaatgtcgaagagattgttcagagagggtgctgacacttggaacatgatctcaaagaacaatgaacgtgctctttggtcatctgccattccagagatcataacaaaatttacgaacattgtccattctgtgcgtaggggtttatcagagcaggatcttgaggttttaagaggcattgctggttgtggtgaggacataggaagagatgaatttgataggctatggtgctggttatacctagtggttgtttcattatcgagagagagaattaaaaagctgtgggattgcacagcacctagatggatagagggcttgattacaacagaagaagctgagaatgcactaagaagttccagggaattgttaaaggaggcaggaacatttgttctcagatttcctatcacccgaagctggccacatccagatgctggaagcctagttgtcaattacattggctctgatagctcaattcatcataggctactctctcttgattccagtgatgctagcgctgagaaactgcaagatttgctgctccaggaaccagaactatcacagttgggcagggttgatcgggtctcaatcaccatccggagatgaccaaggcttcaaacggttaaacttacattcaaaagcaggatttaggatgctgccacgagaagagggtcaaaagcatccaagagcatagcccataacacccattgcctgttgttaccatgcacaggttgtaaattggttcccttcgtagttcgtacaaagaggatgttttgccgtactagtgaggtctagtctagttgcttcagaaaaccaacagtaacatcagctatcatgtgtgttgcaaaaagaaagaagctgtcatcatgtgcctcgagactggaggattttcagtggctaacatgttgcatataaagctgacagttgatttacggagtacaaattatttttgggttccttttcaatcctctcatttgggccgagagaaggatagtgtcgtcgtagcccatgtcaattttgaggtcaaaagcatcggtccgtccactatccaagccccgaattacgtcacattctccaaaatggctgcgggtcgcacccggcgctcgtccctccctgccgcaaccaacgccaccgcttcggcgcttacccatcagatcagacagacaaacaaggcaaacgagaccctagcgcagcatggcttggacggctgcgggcacagtttgctggcgcctcctccgcctcccctccgtccgctgccctctctcgtcccgggcccggtgttccgctgcgcagagcctagacgccgtggacaaggagtatgccgacctcaacctccggcctctgtaccccaacaggggccatcacatgcgcatacggtagcacgtgaacccgctcagctcatccttctcggagcccacggggccgccagagtggaaggaggtgttcgacgaccccttgcttcccctcatggtcgacatcggctgcgggagtgggaggttcttgatttggcacgcgaagaattctggcaagagtcaaaactaccttgggctagaaatccgccaaaagaattttgtcttgtataagtgtccaagcaaaccatttaaatgtgcctttgaactgcacccgttggtggagcgggcacagttctgggtgaatgaattggagcttatctattttatgtttgcaaatgcaacgatgtcttttgagaaaatcatatcgtcataccctggtcccctgtcacttgtttcaatactgtgtcctgatccacacttcaaaaagagacatcacaaaagaagagttctgcagcaaccattggtcgattcaatcataaataatctatgtttaggcggacaggttttcatacaatcagatgtactggaagtagcggtagacatgagggaaaggtttgatgggtactctggtattttggcacatgttaattatgtcgatcaagatcttcagtgtgacaatgaaggatggcttctggacaacccaatgggaatccggacagagcgagaaatccatgcagagcttgaaggagcaacgatatacaggagggtgtaccaaaaggttagagatgcttctttctagctgtttatcagctacagaagttgtccgaggagtaaggtttccaagaatgttcattgcatgtatttcattaagagaagttgggaaaaaacaaagcatccaagtacaaagcctggcgaaccaaaacgaagagaagcccaagcagtaacacacctgatgtcttcctgcttgaaccatgccacaagttgcctttactacatcaagctgcattacatttctgacagtgcgcttgtgcacatctaatctttttttttcacctgatgcaatgagtcagattagccaatgcttttgatgaagatgacaactggcaaaagtgttcctttgttggtcaaattgtacttatggtgtttagcatcaggtgttgtcttcgttctgtccataattcaggtctggaattggtcaccatctatcggtatgcagagagtttgtagaggcaatccagatgaggcaatttgatgtgcgctaggattgttcaaactttggtccgctcaacgttctcttgacttggtagatatacaagaatggacaacgttttcttgacttggtaaagtttggtcattagtttgtgaaacagaatgctgcattgctcttggcatttgataagtgacaggtggataagacgacaccgaggtgtgggcactttttagtgtttgatgtttgctaagtcctctaccatcaggtcaatacatatgttaatcaatttgaataactccttaattgaaattttgttgctaatggtatcgaattaactcaccattgtattcggcgaataatgtttcgttgcaacacagtcatattgtactagtgatagctgatattgttgggttgcccgtgtattttgtaataagacacataaatatatgttctattggttagatgagtgtgaatgctaacaatcaag

SEQ ID NO: 203305 - DNA, 1044 bp, Zea Mays
aaggcacaccagctgcttgtggtgctggttgcacacttgaaccgcaccaccagttcaccccctctcctctccgggagcttagacacctgtaggctagcgcattgttctcaaggtcagagcttcgccgaggaggcgaggacgatggcaatcgccgggcagtgctcctcctgctattatacgtcacccaccctgcagctccaccgacgtcacagccacctgccgcggcagccccaagccgcacgaagagcgcggcggccgaggttgcaggtggccgcagctgccgacagcgggcccatcagggcggccacggacgccgagttcttccagccttccgacaccaggccaatcatgctcttcgacggcgtctgcaacctctgcaacggcggcgtccgcttcgtgcgggagcacgaccccaacaggtatagccgcgctgctcaatcctcagtcaaagcaacagcgattcagccgctgataggttcttccgatgggttcgcaactccaacaggagcatcaggtacgtgccgctgcagagcgagtccgggaggaagctcctgcagaggtcagggaggtcccctgacgacatctccagcgttgttctcgtcgagaaagacaggtctttcatcaagtctgaagcggtgctgaggataatggagtacctcaacctgcccttcccgcagctcgccgtcttcctcaagttcctgagggacttcgcgtacgacaacgttgcgaacaacaggtacgccatgtttggccgcgccgaagcagaagcatgcgagatactgtaacaactggtgcccctgagatctcgatacttagtctatacgattcgatgtcaacagtcgcatacatgatgtcccacgaacatctatgtgtgcgtagttttagccatctaaacaaagctcaaacaaaaaaaaccttgctctatctctatgctccttgcagtgcagtgagcgataggcactgaagggcgtatgctagctacaaaggctgtaaaaactgtatctttggcacgacgacgccctcggttgtcccgtgggcgttcag

SEQ ID NO: 203306 - DNA, 3938 bp, Zea Mays
ggtagtacacccgagggtcgtacccgaggagcgataggtgcgccgtatcgctgccgcaggcgagccccggctccacggggtccatgagcccggtcaccccgaccgccgccaccgcgtccagccgcggcgtgcacgccgcctccagtggcgtacgcccgcccagcgacggaacgctcacgtccccgatcccgtccaccagcacgaacgccacgcggctccgcctcggacctctcccctccgcgcctgccatcgccgtctccgcagccgccgcaaaggcccctcgcctctctcaatttcagctctctgctgctgcttacgagatgcctctgccgcgtgctggttcagccgcgggtcgggcccgggcacagggttcacgggccggtttggtcactacaagaaccgggcgagcccgaggcccggcccccaaatctgcaacgcttggcgctcgctcggctccgccctccgcccccctgctccgtccgatcgccgcgccccctcgccgccggtgatcgctggggagccgacgaggccggacgccggaggttctcgctccctcctctgtgtctcccttcctcccgcgcgtcccgcctgctcgtcgcgtggcctcctgctcggggcttcctctcgccgcggaatttggcatgtgacgtggggcgaggccaacgaggcgcagccggcggcggcgtggggttgattggttaactggatttcgagattgttttgtctggatttttttccgagggaagcgcgcgctccaggttcatttccaaaatggtttgcatggtggggaattttaaaatgtcttctgtgttgaagcttgtaatgatggaaaatcacgcaacaccaggtaaagtatagttaagattttaacctcttttgactttccatttagcctgtgactttcatggataatactttaatagaggctttgagacctgtgtccagagtaaataaagagaaaattatattgcacagttgtcagttaggatggaaatttgatatccatcaataaaattgataaattatagaatggtgcaccttatcttttattttactagaacacagtgcaacttctatatattcttatttgtaacttggatatgttgcaaaaataataaatattactagatccttgcaaagagaaggagaaataataaaatctagaaaagaataatacaatacaagggagctttgaaatgaaatattatttatatacaaaccttctatggattgaaaagaccgtttaatctgttactggatttcattatatttgattcagctcctcagtgcaggtatgtactgttttcagtatcatgtttattttatgttctgaagtagaaatgcctttgtagggccataaatactttgtcttttactgctttcaggtttctggatttgtttttaccaaggttcaagaaaacctaggcgctagtcacacgttatcctactgactagcgtctaggaagattaaacgtagattaagcgtgattaatcgtttgttttttaatttttgtgctgcagaaagcaagatcagcagtgagtaactaagtactaagtaataataacacaactactaagtagtgatactagtgaacctaccttttactgttccgcacatttattttttacataagttgctttcctccttggcttcttgcaagttgcttccaacagcagctgatcatcaaagagagacaagttaataatctgaaaactatacaatcagataatttggaaagagtagaaactcatctgaggggcagctcaatattgtacatgcacagccaagcttgcaaacaacagggcaacatcacaagtcaaaggatcacaagaaatacagaaaacactcacagttcatcacatgccttaatggtccacaaattaaatagcagtacagcacacaataattgttttatggtccacacacattaggataagtaaataactagatattaactacacggcgcctagcgcgtgcacaccgtgtctaggcgcgcccagcgcctaatactgcgcctagtccataaacgagacactagaccttcgttagcgtttaatcgagattaatctccgtttaattgtgttttttcgaaccttggtttttacaaaatgttgataatgtggcctgtatagtgcaatatcaatgttcttattaatccactttaaaaacatatataattattgtgttcatattatcttggtttactggtactttgataaccttcagattctcatcatatgcatgcaaagcaaaaaatgattgtgatgtttttcggtcacatgtgcatggatagcttatggttgatcattgatcatttgatcgttatccatattttattccttgagtttctttttgtctctcttgagtgaacaaaatattgggtctggtactgagatgattcttcttgttgggcgtttgagcatgaaaagaatttgctctgtcacttttggcagatgacgtgatccatgagatgactgctgcacaggtcctacagaagcaactgtttgatgcacacgaaccaaatttactggatgaaaatgatatgcatatatttggatcaaaaccgatggccgacccattggacttggtctgctgtagtacttgcaagaagccagtcaaagccagccaatatgcaattcatacagggcaatgtagttcagggaaggtaaacacaaatggttcagtgggtgtggatcatgccaatcctacaaagcccctgaagaaaggcagaaaaataaagttgataagtaatggaaatcaaaaagtgcacataaaagtgaaagcaaaatctcaaactgaaagcaataacattgccaatagtttcgagttggacaatggacatgtcactaaagtacaacctatagattccacagggctgggcctgtctgctgatagttcagctactatcaatgtgcctaaaaatcatcccagagatgcgccagttcctcttgcaacaaaaatgtatcattcacagggcaactaccgtcttcgatttgagcttggccagctttatcgcgaatcatgtgtgcagcatttgagtggccacacaactccaaacgtgtcacatgagaatggattgatggcatcatcacggttttcttcttgtggcaactcagcattgcctactcagaagagccttgttcctcaaacaaagcctctcgcagaccctcagcaattagcagcaagcaggcctaaccagtcacaaggaacaaaaactgatagagcaagtgcacaagcatctgcaattaaaaatgaaggttcacgatccagatgcaataaagctaccattccccattcgagaaacaaaggcagcaagaagacgcaacagcaacctaatggacgtgttcatgcgatcaagttcccagtagagtagcccattcgtaggtaatttattggttaagtggaagtgtctcttctggtgaacagtctcttcttttctcctttccaaatgaaattggttattgtcaggattgttctaatttggactgtcccgatccgaggttttggttcgccggccattggtactagaagctaacagcactagttgtagcactgacgatgaacttacctgtaaatatggccacagaggccttggcttcttcctgccgaaggtcgtggacctgatgaacattttgaatgtagccttcatcttttgggcattgagttctagttgattgatgttttgtgtttgattcttgccctaagtttagctttctagccggcgattgaaccgttttacgggctaccgctgccagctgccggtggatgagcccttccgtattcaccttgccggaaagctgtcgctgttgctgggcgtatcgagggatgtagttgtcggttgagggcgattgcgcggcggagtggttcactttcaatttataattcgtttaacttttttatattaaatttgactgaccgatcttacttaaaaaaattc

SEQ ID NO: 203307 - DNA, 1640 bp, Zea Mays
atcattgggatcaatcattaaaaccttaatgggcagagatagttatattcatgcaggctgttatttggttcatttccaaaatggtttgcatggtggggaattttaaaatgtcttctgtgttgaagcttgtaatgatggaaaatcacgcaacaccagatgacgtgatccatgagatgactgctgcacaggtcctacagaagcaactgtttgatgcacacgaaccaaatttactggatgaaaatgatatgcatatatttggatcaaaaccgatggccgacccattggacttggtctgctgtagtacttgcaagaagccagtcaaagccagccaatatgcaattcatacagggcaatgtagttcagggaaggtaaacacaaatggttcagtgggtgtggatcatgccaatcctacaaagcccctgaagaaaggcagaaaaataaagttgataagtaatggaaatcaaaaagtgcacataaaagtgaaagcaaaatctcaaactgaaagcaataacattgccaatagtttcgagttggacaatggacatgtcactaaagtacaacctatagattccacagggctgggcctgtctgctgatagttcagctactatcaatgtgcctaaaaatcatcccagagatgcgccagttcctcttgcaacaaaaatgtatcattcacagggcaactaccgtcttcgatttgagcttggccagctttatcgcgaatcatgtgtgcagcatttgagtggccacacaactccaaacgtgtcacatgagaatggattgatggcatcatcacggttttcttcttgtggcaactcagcattgcctactcagaagagccttgttcctcaaacaaagcctctcgcagaccctcagcaattagcagcaagcaggcctaaccagtcacaaggaacaaaaactgatagagcaagtgcacaagcatctgcaattaaaaatgaaggttcacgatccagatgcaataaagctaccattccccattcgagaaacaaaggcagcaagaagacgcaacagcaacctaatggacgtgttcatgcgatcaagttcccagtagagtagcccattcgtaggtaatttattggttaagtggaagtgtctcttctggtgaacagtctcttcttttctcctttccaaatgaaattggttattgtcaggattgttctaatttggactgtcccgatccgaggttttggttcgccggccattggtactagaagctaacagcactagttgtagcactgacgatgaacttacctgtaaatatggccacagaggccttggcttcttcctgccgaaggtcgtggacctgatgaacattttgaatgtagccttcatcttttgggcattgagttctagttgattgatgttttgtgtttgattcttgccctaagtttagctttctagccggcgattgaaccgttttacgggctaccgctgccagctgccggtggatgagcccttccgtattcaccttgccggaaagctgtcgctgttgctgggcgtatcgagggatgtagttgtcggttgagggcgattgcgcggcggagtggttcactttcaatttataattcgtttaacttttttatattaaatttgactgaccgatcttacttaaaaaaattc

SEQ ID NO: 203308 - DNA, 2864 bp, Zea Mays
cgcgcatccaggaatcatcgcgtcgtgctcaagccaccccgccgtcatcgcctcacgcaccttccttcggcaaccttctataggcgcaatcacaggaatccccgcggcctcgccccagatccctaaaccccgcctcgtctctcatggaaagtgcgtcctctgcgctcggctctctccgcgtctgcgacagcccgctatccatggaacgtgggtcctctgccctggatcgtcacgtcggccctcgattcgcgtccgcgacagcctaatcccgcacgtggattgggtacccctctgccccgaatcgtcgctcccgcccggcatcagcgtccgcgtccgcgttgtggtgtccgcagtctccatggaaggcgatcccgcgtgtggattagcattagcagatgaagaggcggaatgttcttcttgggatagcgacgatgagtaccagaaattcatccaaaatatgaaccctccaagggtcaccatcgacaacacctcatgtccaagtgctatagttattcatgaaagtgtccaccgacgaaggagaagccaaagcacaggagcatggtgctatgttcatggagaccagtgcaaaagctgggttcaacgtcaagcccctattccgcaagatcgctggatcccttctaggactagacgcactttcgtcaggaaagcaggaagacatggtcgacataaacctcagacctgccagcggttcgtcggcttcaggtgcagccgcgcagctggagcagaaatcaggcggttgctcctgttgagacttcgacagttttgtgttcagagaagctacaacagtactgcaacatcgagttaagtactttcagagagattgtgacgaagagtgttttcgcccaaacgtccagtagtgatatactgacatccatagcgagaagccaatttctgtgtacagatttgtttagcaagttatcatatgctaggatataactgtttgatacacaagggacaaaatctgtggaggtaagggcatctcacattttttttgatgaaacattagcaggagctctgccatatcatataagaagagcaagctagagtgtcacagtctttattacatgaatgatcaaatacttagagtccatagggaaaaagtgaaaactgttgactatatggctaagagacaatcatgatccatgaaaaattctaatggactcatatacacagagggggctagcgtgcttgagagaataatattagccgccaccgcatctctctatagaggtgtacgtgctcaagtcgccaccgttgtttctgtcgtggacatggaaattatatggcggattgctggacatgtagtattggcttatctggtggacgatagactgcctagaccacatgaattaccaaatacttttgagtctttgacatgcaaaaaagggtgaaaactccattagaaaactttagaagctgaaacaaatattcccttcagtattgagttatattagggtatttcatatccccttcaatattcagttttattagagtacttcattctaataaatcacatccaatttcattctgccaatcatattttctttttatgcaattttattctattgatcctattttctttgttttgtttttggcaatgaggtgtttcagcatcgacattcaatttcacagcaggaacttctccattccattccaatccaacatcgacaggcattccatttcacacagctaatcggtggagggaaaaatattcatcaggaaaccagctaatcgtggaaggaaaaaatattcatcaaagtggatgtcactggatgttttagtggatgtcaactttgtcatctactcgtgtttgataccaggatgcagtgcaaccatttccacatatgtattggctagcattgaactgaggctttgtacagtagtaataagaaatgagaaatgtcgaattcttttagggccctgatttggcatcaattgaaaagacattgactgtatctatctacagggttccacatgcacattcagcgagtcaatcctgggatcgtgtggcttccatactgggctgttcacctcaccacatttgatggatgttagagagcgatttcagctagatgggtgctatgaaatttatgatcgcactgacctagctcctcctttctgagggcatcggggttaatatttctgaagagaaaattttgaagtactcctggtggtgctagaacaagttgaagcctatttcaggttcctcgcgctgctcgcattcaagatattttctgctgagcaggtagatgttgctattctcgaggttggcctaggagggaagttcgatgcaactaatgtggttgttagttctcgtgaatgtcctgttgtctcgaaatacaaagcttctgttcgcacctaatcgcctaaaatggaaatgtttgactcattgtttaattcggggggaagctgaaggtggtctgatccgttctaggaagagaaaggctgaccaagtcatcatctccagggacgatgttagcgaaagtcaatttaatcaggtgttgatcattgggttgcaacaaatcatcggtggagactgagtcaccgcggccagaaaaccacggtctcaatttgaggagtttttccatctatgtttgttagaaggcataatgcctatttatctcttgtattcgaacatttggcaattaagaaatagaagattacttccccaatatcccttattcctaatctcacctttcacggcttgtggtgaacaatcacttgctattaccgactgacatgtccactcctcatatgtgcgatattggggttgatatatatgttgttcgtttccatgtaattattgtatactaacatttatcgaataatttttacaccgtcgc

SEQ ID NO: 203309 - DNA, 2857 bp, Zea Mays
cgcgcatccaggaatcatcgcgtcgtgctcaagccaccccgccgtcatcgcctcacgcaccttccttcggcaaccttctataggcgcaatcacaggaatccccgcggcctcgccccagatccctaaaccccgcctcgtctctcatggaaagtgcgtcctctgcgctcggctctctccgcgtctgcgacagcccgctatccatggaacgtgggtcctctgccctggatcgtcacgtcggccctcgattcgcgtccgcgacagcctaatcccgcacgtggattgggtacccctctgccccgaatcgtcgctcccgcccggcatcagcgtccgcgtccgcgttgtggtgtccgcagtctccatggaaggcgatcccgcgtgtggattagcattagcagatgaagaggcggaatgttcttcttgggatagcgacgatgagtaccagaaattcatccaaaatatgaaccctccaagggtcaccatcgacaacacctcatgtccaagtgctatagttattcatgtcctcactaacctcaagctcatagtcacgaaggcatacatatcctcagacggaggatggttcatggatgtgtccaccgacgaaggagaagccaaagcacaggagcatggtgctatgttcatggagaccagtgcaaaagctgggttcaacgtcaagcccctattccgcaagatcgctggatcccttctaggactagacgcactttcgtcaggaaagcaggaagacatggtcgacataaacctcagacctgccagcggttcgtcggcttcaggtgcagccgcgcagctggagcagaaatcaggcggttgctcctgttgagacttcgacagttttgtgttcagagaagctacaacagtactgcaacatcgagttaagtactttcagagagattgtgacgaagagtgttttcgcccaaacgtccagtagtgatatactgacatccatagcgagaagccaatttctgtgtacagatttgtttagcaagttatcatatgctaggatataactgtttgatacacaagggacaaaatctgtggaggtaagggcatctcacattttttttgatgaaacattagcaggagctctgccatatcatataagaagagcaagctagagtgtcacagtctttattacatgaatgatcaaatacttagagtccatagggaaaaagtgaaaactgttgactatatggctaagagacaatcatgatccatgaaaaattctaatggactcatatacacagagggggctagcgtgcttgagagaataatattagccgccaccgcatctctctatagaggtgtacgtgctcaagtcgccaccgttgtttctgtcgtggacatggaaattatatggcggattgctggacatgtagtattggcttatctggtggacgatagactgcctagaccacatgaattaccaaatacttttgagtctttgacatgcaaaaaagggtgaaaactccattagaaaactttagaagctgaaacaaatattcccttcagtattgagttatattagggtatttcatatccccttcaatattcagttttattagagtacttcattctaataaatcacatccaatttcattctgccaatcatattttctttttatgcaattttattctattgatcctattttctttgttttgtttttggcaatgaggtgtttcagcatcgacattcaatttcacagcaggaacttctccattccattccaatccaacatcgacaggcattccatttcacacagctaatcggtggagggaaaaatattcatcaggaaaccagctaatcgtggaaggaaaaaatattcatcaaagtggatgtcactggatgttttagtggatgtcaactttgtcatctactcgtgtttgataccaggatgcagtgcaaccatttccacatatgtattggctagcattgaactgaggctttgtacagtagtaataagaaatgagaaatgtcgaattcttttagggccctgatttggcatcaattgaaaagacattgactgtatctatctacagggttccacatgcacattcagcgagtcaatcctgggatcgtgtggcttccatactgggctgttcacctcaccacatttgatggatgttagagagcgatttcagctagatggagaaaattttgaagtactcctggtggtgctagaacaagttgaagcctatttcaggttcctcgcgctgctcgcattcaagatattttctgctgagcaggtagatgttgctattctcgaggttggcctaggagggaagttcgatgcaactaatgtggttgttagttctcgtgaatgtcctgttgtctcgaaatacaaagcttctgttcgcacctaatcgcctaaaatggaaatgtttgactcattgtttaattcggggggaagctgaaggtggtctgatccgttctaggaagagaaaggctgaccaagtcatcatctccagggacgatgttagcgaaagtcaatttaatcaggtgttgatcattgggttgcaacaaatcatcggtggagactgagtcaccgcggccagaaaaccacggtctcaatttgaggagtttttccatctatgtttgttagaaggcataatgcctatttatctcttgtattcgaacatttggcaattaagaaatagaagattacttccccaatatcccttattcctaatctcacctttcacggcttgtggtgaacaatcacttgctattaccgactgacatgtccactcctcatatgtgcgatattggggttgatatatatgttgttcgtttccatgtaattattgtatactaacatttatcgaataatttttacaccgtcgc

SEQ ID NO: 203310 - DNA, 2824 bp, Zea Mays
cgcgcatccaggaatcatcgcgtcgtgctcaagccaccccgccgtcatcgcctcacgcaccttccttcggcaaccttctataggcgcaatcacaggaatccccgcggcctcgccccagatccctaaaccccgcctcgtctctcatggaaagtgcgtcctctgcgctcggctctctccgcgtctgcgacagcccgctatccatggaacgtgggtcctctgccctggatcgtcacgtcggccctcgattcgcgtccgcgacagcctaatcccgcacgtggattgggtacccctctgccccgaatcgtcgctcccgcccggcatcagcgtccgcgtccgcgttgtggtgtccgcagtctccatggaaggcgatcccgcgtgtggattagcattagcagatgaagaggcggaatgttcttcttgggatagcgacgatgagtaccagaaattcatccaaaatatgaaccctccaagggtcaccatcgacaacacctcatgtccaagtgctatagttattcatgaaagtgtccaccgacgaaggagaagccaaagcacaggagcatggtgctatgttcatggagaccagtgcaaaagctgggttcaacgtcaagcccctattccgcaagatcgctggatcccttctaggactagacgcactttcgtcaggaaagcaggaagacatggtcgacataaacctcagacctgccagcggttcgtcggcttcaggtgcagccgcgcagctggagcagaaatcaggcggttgctcctgttgagacttcgacagttttgtgttcagagaagctacaacagtactgcaacatcgaatttgtttagcaagttatcatatgctaggatataactgtttgatacacaagggacaaaatctgtggaggtaagggcatctcacattttttttgatgaaacattagcaggagctctgccatatcatataagaagagcaagctagagtgtcacagtctttattacatgaatgatcaaatacttagagtccatagggaaaaagtgaaaactgttgactatatggctaagagacaatcatgatccatgaaaaattctaatggactcatatacacagagggggctagcgtgcttgagagaataatattagccgccaccgcatctctctatagaggtgtacgtgctcaagtcgccaccgttgtttctgtcgtggacatggaaattatatggcggattgctggacatgtagtattggcttatctggtggacgatagactgcctagaccacatgaattaccaaatacttttgagtctttgacatgcaaaaaagggtgaaaactccattagaaaactttagaagctgaaacaaatattcccttcagtattgagttatattagggtatttcatatccccttcaatattcagttttattagagtacttcattctaataaatcacatccaatttcattctgccaatcatattttctttttatgcaattttattctattgatcctattttctttgttttgtttttggcaatgaggtgtttcagcatcgacattcaatttcacagcaggaacttctccattccattccaatccaacatcgacaggcattccatttcacacagctaatcggtggagggaaaaatattcatcaggaaaccagctaatcgtggaaggaaaaaatattcatcaaagtggatgtcactggatgttttagtggatgtcaactttgtcatctactcgtgtttgataccaggatgcagtgcaaccatttccacatatgtattggctagcattgaactgaggctttgtacagtagtaataagaaatgagaaatgtcgaattcttttagggccctgatttggcatcaattgaaaagacattgactgtatctatctacagggttccacatgcacattcagcgagtcaatcctgggatcgtgtggcttccatactgggctgttcacctcaccacatttgatggatgttagagagcgatttcagctagatgggtgctatgaaatttatgatcgcactgacctagctcctcctttctgagggcatcggggttaatatttctgaagagaaaattttgaagtactcctggtggtgctagaacaagttgaagcctatttcaggttcctcgcgctgctcgcattcaagatattttctgctgagcaggtagatgttgctattctcgaggttggcctaggagggaagttcgatgcaactaatgtggttaaagcacctgtagtttgtggcatatcttcccttggatatgatcatatggaaattcttggttgttagttctcgtgaatgtcctgttgtctcgaaatacaaagcttctgttcgcacctaatcgcctaaaatggaaatgtttgactcattgtttaattcggggggaagctgaaggtggtctgatccgttctaggaagagaaaggctgaccaagtcatcatctccagggacgatgttagcgaaagtcaatttaatcaggtgttgatcattgggttgcaacaaatcatcggtggagactgagtcaccgcggccagaaaaccacggtctcaatttgaggagtttttccatctatgtttgttagaaggcataatgcctatttatctcttgtattcgaacatttggcaattaagaaatagaagattacttccccaatatcccttattcctaatctcacctttcacggcttgtggtgaacaatcacttgctattaccgactgacatgtccactcctcatatgtgcgatattggggttgatatatatgttgttcgtttccatgtaattattgtatactaacatttatcgaataatttttacaccgtcgc

SEQ ID NO: 203311 - DNA, 2792 bp, Zea Mays
cgcgcatccaggaatcatcgcgtcgtgctcaagccaccccgccgtcatcgcctcacgcaccttccttcggcaaccttctataggcgcaatcacaggaatccccgcggcctcgccccagatccctaaaccccgcctcgtctctcatggaaagtgcgtcctctgcgctcggctctctccgcgtctgcgacagcccgctatccatggaacgtgggtcctctgccctggatcgtcacgtcggccctcgattcgcgtccgcgacagcctaatcccgcacgtggattgggtacccctctgccccgaatcgtcgctcccgcccggcatcagcgtccgcgtccgcgttgtggtgtccgcagtctccatggaaggcgatcccgcgtgtggattagcattagcagatgaagaggcggaatgttcttcttgggatagcgacgatgagtaccagaaattcatccaaaatatgaaccctccaagggtcaccatcgacaacacctcatgtccaagtgctatagttattcatgaaagtgtccaccgacgaaggagaagccaaagcacaggagcatggtgctatgttcatggagaccagtgcaaaagctgggttcaacgtcaagcccctattccgcaagatcgctggatcccttctaggactagacgcactttcgtcaggaaagcaggaagacatggtcgacataaacctcagacctgccagcggttcgtcggcttcaggtgcagccgcgcagctggagcagaaatcaggcggttgctcctgttgagacttcgacagttttgtgttcagagaagctacaacagtactgcaacatcgagttaagtactttcagagagattgtgacgaagagtgttttcgcccaaacgtccagtagtgatatactgacatccatagcgagaagccaatttctgtgtacagatttgtttagcaagttatcatatgctaggatataactgtttgatacacaagggacaaaatctgtggaggtaagggcatctcacattttttttgatgaaacattagcaggagctctgccatatcatataagaagagcaagctagagtgtcacagtctttattacatgaatgatcaaatacttagagtccatagggaaaaagtgaaaactgttgactatatggctaagagacaatcatgatccatgaaaaattctaatggactcatatacacagagggggctagcgtgcttgagagaataatattagccgccaccgcatctctctatagaggtgtacgtgctcaagtcgccaccgttgtttctgtcgtggacatggaaattatatggcggattgctggacatgtagtattggcttatctggtggacgatagactgcctagaccacatgaattaccaaatacttttgagtctttgacatgcaaaaaagggtgaaaactccattagaaaactttagaagctgaaacaaatattcccttcagtattgagttatattagggtatttcatatccccttcaatattcagttttattagagtacttcattctaataaatcacatccaatttcattctgccaatcatattttctttttatgcaattttattctattgatcctattttctttgttttgtttttggcaatgaggtgtttcagcatcgacattcaatttcacagcaggaacttctccattccattccaatccaacatcgacaggcattccatttcacacagctaatcggtggagggaaaaatattcatcaggaaaccagctaatcgtggaaggaaaaaatattcatcaaagtggatgtcactggatgttttagtggatgtcaactttgtcatctactcgtgtttgataccaggatgcagtgcaaccatttccacatatgtattggctagcattgaactgaggctttgtacagtagtaataagaaatgagaaatgtcgaattcttttagggccctgatttggcatcaattgaaaagacattgactgtatctatctacagggttccacatgcacattcagcgagtcaatcctgggatcgtgtggcttccatactgggctgttcacctcaccacatttgatggatgttagagagcgatttcagctagatggagaaaattttgaagtactcctggtggtgctagaacaagttgaagcctatttcaggttcctcgcgctgctcgcattcaagatattttctgctgagcaggtagatgttgctattctcgaggttggcctaggagggaagttcgatgcaactaatgtggttgttagttctcgtgaatgtcctgttgtctcgaaatacaaagcttctgttcgcacctaatcgcctaaaatggaaatgtttgactcattgtttaattcggggggaagctgaaggtggtctgatccgttctaggaagagaaaggctgaccaagtcatcatctccagggacgatgttagcgaaagtcaatttaatcaggtgttgatcattgggttgcaacaaatcatcggtggagactgagtcaccgcggccagaaaaccacggtctcaatttgaggagtttttccatctatgtttgttagaaggcataatgcctatttatctcttgtattcgaacatttggcaattaagaaatagaagattacttccccaatatcccttattcctaatctcacctttcacggcttgtggtgaacaatcacttgctattaccgactgacatgtccactcctcatatgtgcgatattggggttgatatatatgttgttcgtttccatgtaattattgtatactaacatttatcgaataatttttacaccgtcgc

SEQ ID NO: 203312 - DNA, 2929 bp, Zea Mays
cgcgcatccaggaatcatcgcgtcgtgctcaagccaccccgccgtcatcgcctcacgcaccttccttcggcaaccttctataggcgcaatcacaggaatccccgcggcctcgccccagatccctaaaccccgcctcgtctctcatggaaagtgcgtcctctgcgctcggctctctccgcgtctgcgacagcccgctatccatggaacgtgggtcctctgccctggatcgtcacgtcggccctcgattcgcgtccgcgacagcctaatcccgcacgtggattgggtacccctctgccccgaatcgtcgctcccgcccggcatcagcgtccgcgtccgcgttgtggtgtccgcagtctccatggaaggcgatcccgcgtgtggattagcattagcagatgaagaggcggaatgttcttcttgggatagcgacgatgagtaccagaaattcatccaaaatatgaaccctccaagggtcaccatcgacaacacctcatgtccaagtgctatagttattcatgtcctcactaacctcaagctcatagtcacgaaggcatacatatcctcagacggaggatggttcatggatgtgtccaccgacgaaggagaagccaaagcacaggagcatggtgctatgttcatggagaccagtgcaaaagctgggttcaacgtcaagcccctattccgcaagatcgctggatcccttctaggactagacgcactttcgtcaggaaagcaggaagacatggtcgacataaacctcagacctgccagcggttcgtcggcttcaggtgcagccgcgcagctggagcagaaatcaggcggttgctcctgttgagacttcgacagttttgtgttcagagaagctacaacagtactgcaacatcgagttaagtactttcagagagattgtgacgaagagtgttttcgcccaaacgtccagtagtgatatactgacatccatagcgagaagccaatttctgtgtacagatttgtttagcaagttatcatatgctaggatataactgtttgatacacaagggacaaaatctgtggaggtaagggcatctcacattttttttgatgaaacattagcaggagctctgccatatcatataagaagagcaagctagagtgtcacagtctttattacatgaatgatcaaatacttagagtccatagggaaaaagtgaaaactgttgactatatggctaagagacaatcatgatccatgaaaaattctaatggactcatatacacagagggggctagcgtgcttgagagaataatattagccgccaccgcatctctctatagaggtgtacgtgctcaagtcgccaccgttgtttctgtcgtggacatggaaattatatggcggattgctggacatgtagtattggcttatctggtggacgatagactgcctagaccacatgaattaccaaatacttttgagtctttgacatgcaaaaaagggtgaaaactccattagaaaactttagaagctgaaacaaatattcccttcagtattgagttatattagggtatttcatatccccttcaatattcagttttattagagtacttcattctaataaatcacatccaatttcattctgccaatcatattttctttttatgcaattttattctattgatcctattttctttgttttgtttttggcaatgaggtgtttcagcatcgacattcaatttcacagcaggaacttctccattccattccaatccaacatcgacaggcattccatttcacacagctaatcggtggagggaaaaatattcatcaggaaaccagctaatcgtggaaggaaaaaatattcatcaaagtggatgtcactggatgttttagtggatgtcaactttgtcatctactcgtgtttgataccaggatgcagtgcaaccatttccacatatgtattggctagcattgaactgaggctttgtacagtagtaataagaaatgagaaatgtcgaattcttttagggccctgatttggcatcaattgaaaagacattgactgtatctatctacagggttccacatgcacattcagcgagtcaatcctgggatcgtgtggcttccatactgggctgttcacctcaccacatttgatggatgttagagagcgatttcagctagatgggtgctatgaaatttatgatcgcactgacctagctcctcctttctgagggcatcggggttaatatttctgaagagaaaattttgaagtactcctggtggtgctagaacaagttgaagcctatttcaggttcctcgcgctgctcgcattcaagatattttctgctgagcaggtagatgttgctattctcgaggttggcctaggagggaagttcgatgcaactaatgtggttgttagttctcgtgaatgtcctgttgtctcgaaatacaaagcttctgttcgcacctaatcgcctaaaatggaaatgtttgactcattgtttaattcggggggaagctgaaggtggtctgatccgttctaggaagagaaaggctgaccaagtcatcatctccagggacgatgttagcgaaagtcaatttaatcaggtgttgatcattgggttgcaacaaatcatcggtggagactgagtcaccgcggccagaaaaccacggtctcaatttgaggagtttttccatctatgtttgttagaaggcataatgcctatttatctcttgtattcgaacatttggcaattaagaaatagaagattacttccccaatatcccttattcctaatctcacctttcacggcttgtggtgaacaatcacttgctattaccgactgacatgtccactcctcatatgtgcgatattggggttgatatatatgttgttcgtttccatgtaattattgtatactaacatttatcgaataatttttacaccgtcgc

SEQ ID NO: 203313 - DNA, 2934 bp, Zea Mays
cgcgcatccaggaatcatcgcgtcgtgctcaagccaccccgccgtcatcgcctcacgcaccttccttcggcaaccttctataggcgcaatcacaggaatccccgcggcctcgccccagatccctaaaccccgcctcgtctctcatggaaagtgcgtcctctgcgctcggctctctccgcgtctgcgacagcccgctatccatggaacgtgggtcctctgccctggatcgtcacgtcggccctcgattcgcgtccgcgacagcctaatcccgcacgtggattgggtacccctctgccccgaatcgtcgctcccgcccggcatcagcgtccgcgtccgcgttgtggtgtccgcagtctccatggaaggcgatcccgcgtgtggattagcattagcagatgaagaggcggaatgttcttcttgggatagcgacgatgagtaccagaaattcatccaaaatatgaaccctccaagggtcaccatcgacaacacctcatgtccaagtgctatagttattcatgtcctcactaacctcaagctcatagtcacgaaggcatacatatcctcagacggaggatggttcatggatggaaagtgtccaccgacgaaggagaagccaaagcacaggagcatggtgctatgttcatggagaccagtgcaaaagctgggttcaacgtcaagcccctattccgcaagatcgctggatcccttctaggactagacgcactttcgtcaggaaagcaggaagacatggtcgacataaacctcagacctgccagcggttcgtcggcttcaggtgcagccgcgcagctggagcagaaatcaggcggttgctcctgttgagacttcgacagttttgtgttcagagaagctacaacagtactgcaacatcgagttaagtactttcagagagattgtgacgaagagtgttttcgcccaaacgtccagtagtgatatactgacatccatagcgagaagccaatttctgtgtacagatttgtttagcaagttatcatatgctaggatataactgtttgatacacaagggacaaaatctgtggaggtaagggcatctcacattttttttgatgaaacattagcaggagctctgccatatcatataagaagagcaagctagagtgtcacagtctttattacatgaatgatcaaatacttagagtccatagggaaaaagtgaaaactgttgactatatggctaagagacaatcatgatccatgaaaaattctaatggactcatatacacagagggggctagcgtgcttgagagaataatattagccgccaccgcatctctctatagaggtgtacgtgctcaagtcgccaccgttgtttctgtcgtggacatggaaattatatggcggattgctggacatgtagtattggcttatctggtggacgatagactgcctagaccacatgaattaccaaatacttttgagtctttgacatgcaaaaaagggtgaaaactccattagaaaactttagaagctgaaacaaatattcccttcagtattgagttatattagggtatttcatatccccttcaatattcagttttattagagtacttcattctaataaatcacatccaatttcattctgccaatcatattttctttttatgcaattttattctattgatcctattttctttgttttgtttttggcaatgaggtgtttcagcatcgacattcaatttcacagcaggaacttctccattccattccaatccaacatcgacaggcattccatttcacacagctaatcggtggagggaaaaatattcatcaggaaaccagctaatcgtggaaggaaaaaatattcatcaaagtggatgtcactggatgttttagtggatgtcaactttgtcatctactcgtgtttgataccaggatgcagtgcaaccatttccacatatgtattggctagcattgaactgaggctttgtacagtagtaataagaaatgagaaatgtcgaattcttttagggccctgatttggcatcaattgaaaagacattgactgtatctatctacagggttccacatgcacattcagcgagtcaatcctgggatcgtgtggcttccatactgggctgttcacctcaccacatttgatggatgttagagagcgatttcagctagatgggtgctatgaaatttatgatcgcactgacctagctcctcctttctgagggcatcggggttaatatttctgaagagaaaattttgaagtactcctggtggtgctagaacaagttgaagcctatttcaggttcctcgcgctgctcgcattcaagatattttctgctgagcaggtagatgttgctattctcgaggttggcctaggagggaagttcgatgcaactaatgtggttgttagttctcgtgaatgtcctgttgtctcgaaatacaaagcttctgttcgcacctaatcgcctaaaatggaaatgtttgactcattgtttaattcggggggaagctgaaggtggtctgatccgttctaggaagagaaaggctgaccaagtcatcatctccagggacgatgttagcgaaagtcaatttaatcaggtgttgatcattgggttgcaacaaatcatcggtggagactgagtcaccgcggccagaaaaccacggtctcaatttgaggagtttttccatctatgtttgttagaaggcataatgcctatttatctcttgtattcgaacatttggcaattaagaaatagaagattacttccccaatatcccttattcctaatctcacctttcacggcttgtggtgaacaatcacttgctattaccgactgacatgtccactcctcatatgtgcgatattggggttgatatatatgttgttcgtttccatgtaattattgtatactaacatttatcgaataatttttacaccgtcgc

SEQ ID NO: 203314 - DNA, 2812 bp, Zea Mays
cgcgcatccaggaatcatcgcgtcgtgctcaagccaccccgccgtcatcgcctcacgcaccttccttcggcaaccttctataggcgcaatcacaggaatccccgcggcctcgccccagatccctaaaccccgcctcgtctctcatggaaagtgcgtcctctgcgctcggctctctccgcgtctgcgacagcccgctatccatggaacgtgggtcctctgccctggatcgtcacgtcggccctcgattcgcgtccgcgacagcctaatcccgcacgtggattgggtacccctctgccccgaatcgtcgctcccgcccggcatcagcgtccgcgtccgcgttgtggtgtccgcagtctccatggaaggcgatcccgcgtgtggattagcattagcagatgaagaggcggaatgttcttcttgggatagcgacgatgagtaccagaaattcatccaaaatatgaaccctccaagggtcaccatcgacaacacctcatgtccaagtgctatagttattcatgaaagtgtccaccgacgaaggagaagccaaagcacaggagcatggtgctatgttcatggagaccagtgcaaaagctgggttcaacgtcaagcccctattccgcaagatcgctggatcccttctaggactagacgcactttcgtcaggaaagcaggaagacatggtcgacataaacctcagacctgccagcggttcgtcggcttcaggtgcagccgcgcagctggagcagaaatcaggcggttgctcctgttgagacttcgacagttttgtgttcagagaagctacaacagtactgcaacatcgagttaagtactttcagagagattgtgacgaagagtgttttcgcccaaacgtccagtagtgatatactgacatccatagcgagaagccaatttctgtgtacagatttgtttagcaagttatcatatgctaggatataactgtttgatacacaagggacaaaatctgtggaggtaagggcatctcacattttttttgatgaaacattagcaggagctctgccatatcatataagaagagcaagctagagtgtcacagtctttattacatgaatgatcaaatacttagagtccatagggaaaaagtgaaaactgttgactatatggctaagagacaatcatgatccatgaaaaattctaatggactcatatacacagagggggctagcgtgcttgagagaataatattagccgccaccgcatctctctatagaggtgtacgtgctcaagtcgccaccgttgtttctgtcgtggacatggaaattatatggcggattgctggacatgtagtattggcttatctggtggacgatagactgcctagaccacatgaattaccaaatacttttgagtctttgacatgcaaaaaagggtgaaaactccattagaaaactttagaagctgaaacaaatattcccttcagtattgagttatattagggtatttcatatccccttcaatattcagttttattagagtacttcattctaataaatcacatccaatttcattctgccaatcatattttctttttatgcaattttattctattgatcctattttctttgttttgtttttggcaatgaggtgtttcagcatcgacattcaatttcacagcaggaacttctccattccattccaatccaacatcgacaggcattccatttcacacagctaatcggtggagggaaaaatattcatcaggaaaccagctaatcgtggaaggaaaaaatattcatcaaagtggatgtcactggatgttttagtggatgtcaactttgtcatctactcgtgtttgataccaggatgcagtgcaaccatttccacatatggttccacatgcacattcagcgagtcaatcctgggatcgtgtggcttccatactgggctgttcacctcaccacatttgatggatgttagagagcgatttcagctagatggagaaaattttgaagtactcctggtggtgctagaacaagttgaagcctatttcaggttcctcgcgctgctcgcattcaagatattttctgctgagcaggtagatgttgctattctcgaggttggcctaggagggaagttcgatgcaactaatgtggttaaagcacctgtagtttgtggcatatcttcccttggatatgatcatatggaaattcttggtgaccaaatcctgttcttggtgataaacttggtgtcgataaacgggttaattctgttggcaaaattaggatgacacaggttgttagttctcgtgaatgtcctgttgtctcgaaatacaaagcttctgttcgcacctaatcgcctaaaatggaaatgtttgactcattgtttaattcggggggaagctgaaggtggtctgatccgttctaggaagagaaaggctgaccaagtcatcatctccagggacgatgttagcgaaagtcaatttaatcaggtgttgatcattgggttgcaacaaatcatcggtggagactgagtcaccgcggccagaaaaccacggtctcaatttgaggagtttttccatctatgtttgttagaaggcataatgcctatttatctcttgtattcgaacatttggcaattaagaaatagaagattacttccccaatatcccttattcctaatctcacctttcacggcttgtggtgaacaatcacttgctattaccgactgacatgtccactcctcatatgtgcgatattggggttgatatatatgttgttcgtttccatgtaattattgtatactaacatttatcgaataatttttacaccgtcgc

SEQ ID NO: 203315 - DNA, 2972 bp, Zea Mays
gcgcatccaggaatcatcgcgtcgtgctcaagccaccccgccgtcatcgcctcacgcaccttccttcggcaaccttctataggcgcaatcacaggaatccccgcggcctcgccccagatccctaaaccccgcctcgtctctcatggaaagtgcgtcctctgcgctcggctctctccgcgtctgcgacagcccgctatccatggaacgtgggtcctctgccctggatcgtcacgtcggccctcgattcgcgtccgcgacagcctaatcccgcacgtggattgggtacccctctgccccgaatcgtcgctcccgcccggcatcagcgtccgcgtccgcgttgtggtgtccgcagtctccatggaaggcgatcccgcgtgtggattagcattagcagatgaagaggcggaatgttcttcttgggatagcgacgatgagtaccagaaattcatccaaaatatgaaccctccaagggtcaccatcgacaacacctcatgtccaagtgctatagttattcatgtcctcactaacctcaagctcatagtcacgaaggcatacatatcctcagacggaggatggttcatggatggtaggagagccattggtttctttccttttcgtcaaaatggaaagtgtccaccgacgaaggagaagccaaagcacaggagcatggtgctatgttcatggagaccagtgcaaaagctgggttcaacgtcaagcccctattccgcaagatcgctggatcccttctaggactagacgcactttcgtcaggaaagcaggaagacatggtcgacataaacctcagacctgccagcggttcgtcggcttcaggtgcagccgcgcagctggagcagaaatcaggcggttgctcctgttgagacttcgacagttttgtgttcagagaagctacaacagtactgcaacatcgagttaagtactttcagagagattgtgacgaagagtgttttcgcccaaacgtccagtagtgatatactgacatccatagcgagaagccaatttctgtgtacagatttgtttagcaagttatcatatgctaggatataactgtttgatacacaagggacaaaatctgtggaggtaagggcatctcacattttttttgatgaaacattagcaggagctctgccatatcatataagaagagcaagctagagtgtcacagtctttattacatgaatgatcaaatacttagagtccatagggaaaaagtgaaaactgttgactatatggctaagagacaatcatgatccatgaaaaattctaatggactcatatacacagagggggctagcgtgcttgagagaataatattagccgccaccgcatctctctatagaggtgtacgtgctcaagtcgccaccgttgtttctgtcgtggacatggaaattatatggcggattgctggacatgtagtattggcttatctggtggacgatagactgcctagaccacatgaattaccaaatacttttgagtctttgacatgcaaaaaagggtgaaaactccattagaaaactttagaagctgaaacaaatattcccttcagtattgagttatattagggtatttcatatccccttcaatattcagttttattagagtacttcattctaataaatcacatccaatttcattctgccaatcatattttctttttatgcaattttattctattgatcctattttctttgttttgtttttggcaatgaggtgtttcagcatcgacattcaatttcacagcaggaacttctccattccattccaatccaacatcgacaggcattccatttcacacagctaatcggtggagggaaaaatattcatcaggaaaccagctaatcgtggaaggaaaaaatattcatcaaagtggatgtcactggatgttttagtggatgtcaactttgtcatctactcgtgtttgataccaggatgcagtgcaaccatttccacatatgtattggctagcattgaactgaggctttgtacagtagtaataagaaatgagaaatgtcgaattcttttagggccctgatttggcatcaattgaaaagacattgactgtatctatctacagggttccacatgcacattcagcgagtcaatcctgggatcgtgtggcttccatactgggctgttcacctcaccacatttgatggatgttagagagcgatttcagctagatgggtgctatgaaatttatgatcgcactgacctagctcctcctttctgagggcatcggggttaatatttctgaagagaaaattttgaagtactcctggtggtgctagaacaagttgaagcctatttcaggttcctcgcgctgctcgcattcaagatattttctgctgagcaggtagatgttgctattctcgaggttggcctaggagggaagttcgatgcaactaatgtggttgttagttctcgtgaatgtcctgttgtctcgaaatacaaagcttctgttcgcacctaatcgcctaaaatggaaatgtttgactcattgtttaattcggggggaagctgaaggtggtctgatccgttctaggaagagaaaggctgaccaagtcatcatctccagggacgatgttagcgaaagtcaatttaatcaggtgttgatcattgggttgcaacaaatcatcggtggagactgagtcaccgcggccagaaaaccacggtctcaatttgaggagtttttccatctatgtttgttagaaggcataatgcctatttatctcttgtattcgaacatttggcaattaagaaatagaagattacttccccaatatcccttattcctaatctcacctttcacggcttgtggtgaacaatcacttgctattaccgactgacatgtccactcctcatatgtgcgatattggggttgatatatatgttgttcgtttccatgtaattattgtatactaacatttatcgaataatttttacaccgtcgc

SEQ ID NO: 203316 - DNA, 2956 bp, Zea Mays
gcgcatccaggaatcatcgcgtcgtgctcaagccaccccgccgtcatcgcctcacgcaccttccttcggcaaccttctataggcgcaatcacaggaatccccgcggcctcgccccagatccctaaaccccgcctcgtctctcatggaaagtgcgtcctctgcgctcggctctctccgcgtctgcgacagcccgctatccatggaacgtgggtcctctgccctggatcgtcacgtcggccctcgattcgcgtccgcgacagcctaatcccgcacgtggattgggtacccctctgccccgaatcgtcgctcccgcccggcatcagcgtccgcgtccgcgttgtggtgtccgcagtctccatggaaggcgatcccgcgtgtggattagcattagcagatgaagaggcggaatgttcttcttgggatagcgacgatgagtaccagaaattcatccaaaatatgaaccctccaagggtcaccatcgacaacacctcatgtccaagtgctatagttattcatgaaagtgtccaccgacgaaggagaagccaaagcacaggagcatggtgctatgttcatggagaccagtgcaaaagctgggttcaacgtcaagcccctattccgcaagatcgctggatcccttctaggactagacgcactttcgtcaggaaagcaggaagacatggtcgacataaacctcagacctgccagcggttcgtcggcttcaggtgcagccgcgcagctggagcagaaatcaggcggttgctcctgttgagacttcgacagttttgtgttcagagaagctacaacagtactgcaacatcgagttaagtactttcagagagattgtgacgaagagtgttttcgcccaaacgtccagtagtgatatactgacatccatagcgagaagccaatttctgtgtacagatttgtttagcaagttatcatatgctaggatataactgtttgatacacaagggacaaaatctgtggaggtaagggcatctcacattttttttgatgaaacattagcaggagctctgccatatcatataagaagagcaagctagagtgtcacagtctttattacatgaatgatcaaatacttagagtccatagggaaaaagtgaaaactgttgactatatggctaagagacaatcatgatccatgaaaaattctaatggactcatatacacagagggggctagcgtgcttgagagaataatattagccgccaccgcatctctctatagaggtgtacgtgctcaagtcgccaccgttgtttctgtcgtggacatggaaattatatggcggattgctggacatgtagtattggcttatctggtggacgatagactgcctagaccacatgaattaccaaatacttttgagtctttgacatgcaaaaaagggtgaaaactccattagaaaactttagaagctgaaacaaatattcccttcagtattgagttatattagggtatttcatatccccttcaatattcagttttattagagtacttcattctaataaatcacatccaatttcattctgccaatcatattttctttttatgcaattttattctattgatcctattttctttgttttgtttttggcaatgaggtgtttcagcatcgacattcaatttcacagcaggaacttctccattccattccaatccaacatcgacaggcattccatttcacacagctaatcggtggagggaaaaatattcatcaggaaaccagctaatcgtggaaggaaaaaatattcatcaaagtggatgtcactggatgttttagtggatgtcaactttgtcatctactcgtgtttgataccaggatgcagtgcaaccatttccacatatgtattggctagcattgaactgaggctttgtacagtagtaataagaaatgagaaatgtcgaattcttttagggccctgatttggcatcaattgaaaagacattgactgtatctatctacagggttccacatgcacattcagcgagtcaatcctgggatcgtgtggcttccatactgggctgttcacctcaccacatttgatggatgttagagagcgatttcagctagatggggcatcggggttaatatttctgaagagaaaattttgaagtactcctggtggtgctagaacaagttgaagcctatttcaggttcctcgcgctgctcgcattcaagatattttctgctgagcaggtagatgttgctattctcgaggttggcctaggagggaagttcgatgcaactaatgtggttaaagcacctgtagtttgtggcatatcttcccttggatatgatcatatggaaattcttggtgaccaaatcctgttcttggtgataaacttggtgtcgataaacgggttaattctgttggcaaaattaggatgacacaggttgttagttctcgtgaatgtcctgttgtctcgaaatacaaagcttctgttcgcacctaatcgcctaaaatggaaatgtttgactcattgtttaattcggggggaagctgaaggtggtctgatccgttctaggaagagaaaggctgaccaagtcatcatctccagggacgatgttagcgaaagtcaatttaatcaggtgttgatcattgggttgcaacaaatcatcggtggagactgagtcaccgcggccagaaaaccacggtctcaatttgaggagtttttccatctatgtttgttagaaggcataatgcctatttatctcttgtattcgaacatttggcaattaagaaatagaagattacttccccaatatcccttattcctaatctcacctttcacggcttgtggtgaacaatcacttgctattaccgactgacatgtccactcctcatatgtgcgatattggggttgatatatatgttgttcgtttccatgtaattattgtatactaacatttatcgaataatttttacaccgtcgc

SEQ ID NO: 203317 - DNA, 2207 bp, Zea Mays
caggaatcatcgcgtcgtgctcaagccaccccgccgtcatcgcctcacgcaccttccttcggcaaccttctataggcgcaatcacaggaatccccgcggcctcgccccagatccctaaaccccgcctcgtctctcatggaaagtgcgtcctctgcgctcggctctctccgcgtctgcgacagcccgctatccatggaacgtgggtcctctgccctggatcgtcacgtcggccctcgattcgcgtccgcgacagcctaatcccgcacgtggattgggtacccctctgccccgaatcgtcgctcccgcccggcatcagcgtccgcgtccgcgttgtggtgtccgcagtctccatggaaggcgatcccgcgtgtggattagcattagcagatgaagaggcggaatgttcttcttgggatagcgacgatgagtaccagaaattcatccaaaatatgaaccctccaagggtcaccatcgacaacacctcatgtccaagtgctatagttattcatgtcctcactaacctcaagctcatagtcacgaaggcatacatatcctcagacggaggatggttcatggatgtgtccaccgacgaaggagaagccaaagcacaggagcatggtgctatgttcatggagaccagtgcaaaagctgggttcaacgtcaagcccctattccgcaagatcgctggatcccttctaggactagacgcactttcgtcaggaaagcaggaagacatggtcgacataaacctcagacctgccagcggttcgtcggcttcaggtgcagccgcgcagctggagcagaaatcaggcggttgctcctgttgagacttcgacagttttgtgttcagagaagctacaacagtactgcaacatcgagttaagtactttcagagagattgtgacgaagagtgttttcgcccaaacgtccagtagtgatatactgacatccatagcgagaagccaatttctgtgtacagatttgtttagcaagttatcatatgctaggatataactgtttgatacacaagggacaaaatctgtggagcatcgacattcaatttcacagcaggaacttctccattccattccaatccaacatcgacaggcattccatttcacacagctaatcggtggagggaaaaatattcatcaggaaaccagctaatcgtggaaggaaaaaatattcatcaaagtggatgtcactggatgttttagtggatgtcaactttgtcatctactcgtgtttgataccaggatgcagtgcaaccatttccacatatgtattggctagcattgaactgaggctttgtacagtagtaataagaaatgagaaatgtcgaattcttttagggccctgatttggcatcaattgaaaagacattgactgtatctatctacagggttccacatgcacattcagcgagtcaatcctgggatcgtgtggcttccatactgggctgttcacctcaccacatttgatggatgttagagagcgatttcagctagatggagaaaattttgaagtactcctggtggtgctagaacaagttgaagcctatttcaggttcctcgcgctgctcgcattcaagatattttctgctgagcaggtagatgttgctattctcgaggttggcctaggagggaagttcgatgcaactaatgtggttgttagttctcgtgaatgtcctgttgtctcgaaatacaaagcttctgttcgcacctaatcgcctaaaatggaaatgtttgactcattgtttaattcggggggaagctgaaggtggtctgatccgttctaggaagagaaaggctgaccaagtcatcatctccagggacgatgttagcgaaagtcaatttaatcaggtgttgatcattgggttgcaacaaatcatcggtggagactgagtcaccgcggccagaaaaccacggtctcaatttgaggagtttttccatctatgtttgttagaaggcataatgcctatttatctcttgtattcgaacatttggcaattaagaaatagaagattacttccccaatatcccttattcctaatctcacctttcacggcttgtggtgaacaatcacttgctattaccgactgacatgtccactcctcatatgtgcgatattggggttgatatatatgttgttcgtttccatgtaattattgtatactaacatttatcgaataatttttacaccgtcgc

SEQ ID NO: 203318 - DNA, 1897 bp, Zea Mays
caggaatcatcgcgtcgtgctcaagccaccccgccgtcatcgcctcacgcaccttccttcggcaaccttctataggcgcaatcacaggaatccccgcggcctcgccccagatccctaaaccccgcctcgtctctcatggaaagtgcgtcctctgcgctcggctctctccgcgtctgcgacagcccgctatccatggaacgtgggtcctctgccctggatcgtcacgtcggccctcgattcgcgtccgcgacagcctaatcccgcacgtggattgggtacccctctgccccgaatcgtcgctcccgcccggcatcagcgtccgcgtccgcgttgtggtgtccgcagtctccatggaaggcgatcccgcgtgtggattagcattagcagatgaagaggcggaatgttcttcttgggatagcgacgatgagtaccagaaattcatccaaaatatgaaccctccaagggtcaccatcgacaacacctcatgtccaagtgctatagttattcatgtcctcactaacctcaagctcatagtcacgaaggcatacatatcctcagacggaggatggttcatggatgtgtccaccgacgaaggagaagccaaagcacaggagcatggtgctatgttcatggagaccagtgcaaaagctgggttcaacgtcaagcatcgacattcaatttcacagcaggaacttctccattccattccaatccaacatcgacaggcattccatttcacacagctaatcggtggagggaaaaatattcatcaggaaaccagctaatcgtggaaggaaaaaatattcatcaaagtggatgtcactggatgttttagtggatgtcaactttgtcatctactcgtgtttgataccaggatgcagtgcaaccatttccacatatgtattggctagcattgaactgaggctttgtacagtagtaataagaaatgagaaatgtcgaattcttttagggccctgatttggcatcaattgaaaagacattgactgtatctatctacagggttccacatgcacattcagcgagtcaatcctgggatcgtgtggcttccatactgggctgttcacctcaccacatttgatggatgttagagagcgatttcagctagatgggtgctatgaaatttatgatcgcactgacctagctcctcctttctgagggcatcggggttaatatttctgaagagaaaattttgaagtactcctggtggtgctagaacaagttgaagcctatttcaggttcctcgcgctgctcgcattcaagatattttctgctgagcaggtagatgttgctattctcgaggttggcctaggagggaagttcgatgcaactaatgtggttgttagttctcgtgaatgtcctgttgtctcgaaatacaaagcttctgttcgcacctaatcgcctaaaatggaaatgtttgactcattgtttaattcggggggaagctgaaggtggtctgatccgttctaggaagagaaaggctgaccaagtcatcatctccagggacgatgttagcgaaagtcaatttaatcaggtgttgatcattgggttgcaacaaatcatcggtggagactgagtcaccgcggccagaaaaccacggtctcaatttgaggagtttttccatctatgtttgttagaaggcataatgcctatttatctcttgtattcgaacatttggcaattaagaaatagaagattacttccccaatatcccttattcctaatctcacctttcacggcttgtggtgaacaatcacttgctattaccgactgacatgtccactcctcatatgtgcgatattggggttgatatatatgttgttcgtttccatgtaattattgtatactaacatttatcgaataatttttacaccgtcgc

SEQ ID NO: 203319 - DNA, 2946 bp, Zea Mays
caggaatcatcgcgtcgtgctcaagccaccccgccgtcatcgcctcacgcaccttccttcggcaaccttctataggcgcaatcacaggaatccccgcggcctcgccccagatccctaaaccccgcctcgtctctcatggaaagtgcgtcctctgcgctcggctctctccgcgtctgcgacagcccgctatccatggaacgtgggtcctctgccctggatcgtcacgtcggccctcgattcgcgtccgcgacagcctaatcccgcacgtggattgggtacccctctgccccgaatcgtcgctcccgcccggcatcagcgtccgcgtccgcgttgtggtgtccgcagtctccatggaaggcgatcccgcgtgtggattagcattagcagatgaagaggcggaatgttcttcttgggatagcgacgatgagtaccagaaattcatccaaaatatgaaccctccaagggtcaccatcgacaacacctcatgtccaagtgctatagttattcatgtcctcactaacctcaagctcatagtcacgaaggcatacatatcctcagacggaggatggttcatggatggaaagtgtccaccgacgaaggagaagccaaagcacaggagcatggtgctatgttcatggagaccagtgcaaaagctgggttcaacgtcaagcccctattccgcaagatcgctggatcccttctaggactagacgcactttcgtcaggaaagcaggaagacatggtcgacataaacctcagacctgccagcggttcgtcggcttcaggtgcagccgcgcagctggagcagaaatcaggcggttgctcctgttgagacttcgacagttttgtgttcagagaagctacaacagtactgcaacatcgagttaagtactttcagagagattgtgacgaagagtgttttcgcccaaacgtccagtagtgatatactgacatccatagcgagaagccaatttctgtgtacagatttgtttagcaagttatcatatgctaggatataactgtttgatacacaagggacaaaatctgtggaggtaagggcatctcacattttttttgatgaaacattagcaggagctctgccatatcatataagaagagcaagctagagtgtcacagtctttattacatgaatgatcaaatacttagagtccatagggaaaaagtgaaaactgttgactatatggctaagagacaatcatgatccatgaaaaattctaatggactcatatacacagagggggctagcgtgcttgagagaataatattagccgccaccgcatctctctatagaggtgtacgtgctcaagtcgccaccgttgtttctgtcgtggacatggaaattatatggcggattgctggacatgtagtattggcttatctggtggacgatagactgcctagaccacatgaattaccaaatacttttgagtctttgacatgcaaaaaagggtgaaaactccattagaaaactttagaagctgaaacaaatattcccttcagtattgagttatattagggtatttcatatccccttcaatattcagttttattagagtacttcattctaataaatcacatccaatttcattctgccaatcatattttctttttatgcaattttattctattgatcctattttctttgttttgtttttggcaatgaggtgtttcagcatcgacattcaatttcacagcaggaacttctccattccattccaatccaacatcgacaggcattccatttcacacagctaatcggtggagggaaaaatattcatcaggaaaccagctaatcgtggaaggaaaaaatattcatcaaagtggatgtcactggatgttttagtggatgtcaactttgtcatctactcgtgtttgataccaggatgcagtgcaaccatttccacatatggttccacatgcacattcagcgagtcaatcctgggatcgtgtggcttccatactgggctgttcacctcaccacatttgatggatgttagagagcgatttcagctagatgggtgctatgaaatttatgatcgcactgacctagctcctcctttctgagggcatcggggttaatatttctgaagagaaaattttgaagtactcctggtggtgctagaacaagttgaagcctatttcaggttcctcgcgctgctcgcattcaagatattttctgctgagcaggtagatgttgctattctcgaggttggcctaggagggaagttcgatgcaactaatgtggttaaagcacctgtagtttgtggcatatcttcccttggatatgatcatatggaaattcttggtgaccaaatcctgttcttggtgataaacttggtgtcgataaacgggttaattctgttggcaaaattaggatgacacaggttgttagttctcgtgaatgtcctgttgtctcgaaatacaaagcttctgttcgcacctaatcgcctaaaatggaaatgtttgactcattgtttaattcggggggaagctgaaggtggtctgatccgttctaggaagagaaaggctgaccaagtcatcatctccagggacgatgttagcgaaagtcaatttaatcaggtgttgatcattgggttgcaacaaatcatcggtggagactgagtcaccgcggccagaaaaccacggtctcaatttgaggagtttttccatctatgtttgttagaaggcataatgcctatttatctcttgtattcgaacatttggcaattaagaaatagaagattacttccccaatatcccttattcctaatctcacctttcacggcttgtggtgaacaatcacttgctattaccgactgacatgtccactcctcatatgtgcgatattggggttgatatatatgttgttcgtttccatgtaattattgtatactaacatttatcgaataatttttacaccgtcgc

SEQ ID NO: 203320 - DNA, 579 bp, Zea Mays
aatgccaagtcggtgcatcgatactaattgcgacttaggttgttagttctcgtgaatgtcctgttgtctcgaaatacaaagcttctgttcgcacctaatcgcctaaaatggaaatgtttgactcattgtttaattcggggggaagctgaaggtggtctgatccgttctaggaagagaaaggctgaccaagtcatcatctccagggacgatgttagcgaaagtcaatttaatcaggtgttgatcattgggttgcaacaaatcatcggtggagactgagtcaccgcggccagaaaaccacggtctcaatttgaggagtttttccatctatgtttgttagaaggcataatgcctatttatctcttgtattcgaacatttggcaattaagaaatagaagattacttccccaatatcccttattcctaatctcacctttcacggcttgtggtgaacaatcacttgctattaccgactgacatgtccactcctcatatgtgcgatattggggttgatatatatgttgttcgtttccatgtaattattgtatactaacatttatcgaataatttttacaccgtcgc

SEQ ID NO: 203321 - DNA, 2092 bp, Zea Mays
ggctagtcaacgtacgcacggacagaccgaaccaatcatgaggattattatttatgtgacgagagcatacacggtaagatataagatgctgctccatttcacaattaattcaagcaaatgccataatcagacgatatacattcagattcagttatatgcaccacaaccggatagaaataaacaacacaacatcagaacacattcatcatctatttcctccgtgcatgtgtctggcacttttgcagattggagcaacaagaaaaacaaagtccgcgacgaggcggcggctgtagagcaacaaggtagattattattactgtatttttgtagattgtagatgtagattactatagatatagtttagaatacgtatctccggccaccaataatcccttggccaaatcggtatacccacattaattttcggggagctcgtacggcaaggacagggtgggccaagctccaaacgtacacgcgcccgattcgcatggaggaaccttttctccttttttttaggaaaaaaaaatcagtagcaacgacgcatctccctgcccatgcaaagtccgcaccaggcaggagatcgtcgaagttagttggactaagcacccatatatatacgtactactccaagaatataataacaccgtcgtcgtgcgcgcgcgtcttctccggctgctggtcatcgtaattcgttcggagacacgaagctcggcgacagagagagaaagagagaaaaaaacataatccaagcatccgcagttcggagacacgagcgagacggctctagtcgtctccgccctgaagacgacggccgccgcagcgaggcggcatacggccttcgccatgctgctcgccttcgtcacgctgctgcttgtgctggccactcgaccggcgcagtgccaccagcagagctacgacgtcgtcaggaacttccacgccgccgcggatggcaagacggacgatgccaaggcgttcctggcggcatggaaggcggcgtgcagcgacgaggccaggccagtcgtggtcgtcccgggaggacggacgttcctgctgagccaggtcacgtttcagggcccctgcaagtcacccatcaccatacagctggatggcaggatcgtagcgccgaaccgcatctggacgactcagccagccaacctcctggtcttccacggcgtcgacagcttgactctggacgggaacggcgagatcgacggccgaggggccatctggtgggactgctataaccacaagagatgcaacgcccggccaattctgctggccttctcgttctgcgaccacctacgggtcacgaggatacggctgaccaacagcgccgacaagcacatgaccctgttccggtgcagccaggcgctcgtggacggcgtctccatcgccgcgccgcccgacagccccaacacggacggcataaccgtggcgtcgtccaaccacaccgtcatctccaactgctccatccgaagcggagatgactgcgtatcgatcctgtcgcaaacgagaaacgttaccgtcactcgcagcacctgcgggcctggccatggtatcagtgtgggaagcctgggaagatccgagagcgcggtggtggaacagatcgtagtgactaactgcagctttgttgggaccatgaatggtgtcaggataaagtcatggcagggagggaagggctacgcaaaagggttcctctttgcgggcctcaacatgaccggagtgcagtatcccatcgtcatcgaccagttctactgcccgcaaggaaactgtcctgtgaagcctggtggcgtggcgataaccgacgcaaggttcatcgacatccaagggacgtcatccaggcaggaagccatcaggctgctgtgcagccagagtgtccactgccatgggatctacctcagcaacgtcaacctttcctgggtcaaccacaccgccccgtccaacgctactattctgaacgcccacgggacaaccgagggcgtcgtcgtgccaaagatacagtttttacagcctttgtagctagcatacgcccttcagtgcctatcgctcactgcactgcaaggagcatagagatagagcaaggttttttttg

SEQ ID NO: 203322 - DNA, 3033 bp, Zea Mays
gtccgctttcgtaactacaggaggtaggcaaaggagacggcgacgacgaagaacatcttatagcaacggaaaaaagttagcacattccaaaaacttcaaagactgctgtgtacgacatcctatattaccgactgcttctgtttgaattgaacggcatcttcagaatctcggcgacgctaatttctaactcatatgggagaggtctatttctagaatttttgtttttctttaatagatttgccacctacattggcattttttcccactgcaatcgattataaactacagttttgcaacctttcagtgacatgaacatctaaccatattcaagtttgccctcatctcaatatccagatatctccacctcatcgactcaatagttaaccatattcaagtttgcccctttgaaaccatctgcttggattttatcgattccattacctaaaaatatggtacaatttcagtacgccagtacatattatgcaaatgaaacacaattaaaatcagcattgtgaactttattgtttgcccatttttttgataaattacccattttatgattctactgggcccttttcgcctttgccctacaattattcctcctcttcgctcttttgtttcattgtttgttctgctttgcacttctattcattgcattcttcgtcggtgattgtgctcgtccagttcgtcggccatgtgttctatcattttcgtcagaaatcctttcttaagccctccacttttctccttttttgttaccttcgcacttcgtttttattgttcatgttctctgtcgtcgagatctactgtctcaggtttattctggctttcatagtaaataaattgctcttcttcccctcatttcttgctggacgcatattatgcttttccactttgcgacaacactgtttcccttatttgtgttcgagtaaagttcagactttatcctcagaggtaattgttacttgccttagcttgcactctatacacataaagcgctactgtgctgttgcatcaactgtttcgttccatagtttttgttttatcccacttggtttatgtcttatgtgcgcatcaaacacttcaagctaacaattacgctttctagttttgtagacattaaaacaaatgtttcactccaatgtaggccaaacatatttaagcggtatcgcaacatgtgcatggtactttaatgcagacatttctaaggcacatatgtagtataacatgtacgggaaaatagataaacaaaacactatccattcttgtaattacatttccccttaaacctgttctccttacatgtcatgttgacaatcatctacattatctagctgtctggtagtagcatttttgtaaaactaacatacaaatctagcattaacttttgccccaaatttctaaaatctattatgaactacaaacaagttccaagtattccttttcacatgaatatgagcacactttttaagccatccaataacatttaatcaacatgtatcgtctacattatctagctgtctggtagaagcatttttgtaaaattaacataccaatctagcattaacttttttccccaaatttctgaaacatattatgaactacaaataagttccaagtattcctttgcacatgaatatgagcacccttttttaagccatccaataacatttaagcaacatgtatgcttaaattccacaatactgaccaattacacaaatgtttgctactatttcaatttttgttgtcacatcatttaaaggttacaaaatattgaactttagttgctacgacctacaatacttgaagaagagatccaggtttcccagacacctactttcgaggacaaaaccatcaatgaattggttgaaattgatccagatatattccatgtagatggtggttcccatcttgcactaaatgcaacaagtcttcaattcagacctctactaaatatcgctgcatacgtgtgattggacagaaactaaatttaggcatgtcacagccttgcatattctaatgcactacatgatatagaggcataaaattacacacaaaagaaaaagaatactatctatgcaagatggactcgaaaatcctttcaacatgtggatcaatctaattattttagattttttctaaatttgcctttcaatggctgaagtcccattttgatgcaaatgaaaaagcgaacatcctgtagactgctgttgctgtgcatctcaactgttttggtcttccaatctttttggaagtattattatttttactttcacttactcttataattgcatcatgttacacgatgttgacgtcaatatggatatacacccaaacaatctaaattcaaggtcttgtcaaagcaaactaaggttctttttttaatacaaagtcgtatggattctgttagatcttgtattttttcctactaatgtcaatatcaacccgcaagcgtctcttaagtcactctttttaggatcattatttcacatactttaaaccacatatgaaattttgttaggcacactatttgacaattcttatccacttacagaatgttgactagctttcagaacaccttaacaaaaaagatcttttctaaatttgcctttcaatggccaaaatcccatttttatgcaaatgagaaatgaacagcctacaaactatttttgttgtgcatctccactgttttgggcttccaatcttttcttgagtatttttttactttcaattaccccctcttatagtttcatcattaaaaagtattgttttttactttcaattactccctcttataatttcatcgtgttacacaatgttgatgtcgatatagatatacacccagaccatctaaatgcgagttcttatcaaagcaaacttaggttcctttttttgatacaaagtcgtctggtttctcttaaacctatctagtattttgtttcctactaatgtcaataccgacctgcaagcctctcctacctcactcttttcgggatcactatttcacatactttaaaccacatatgaaattat

SEQ ID NO: 203323 - DNA, 2459 bp, Zea Mays
ccgctttcgtaactacaggaggtaggcaaaggagacggcgacgacgaagaacatcttatagcaacggaaaaaagttagcacattccaaaaacttcaaagactgctgtgtacgacatcctatattaccgactgcttctgtttgaattgaacggcatcttcagaatctcggcgacgctaatttctaactcatatgggagaggtctatttctagaatttttgtttttctttaatagatttgccacctacattggcattttttcccactgcaatcgattataaactacagttttgcaacctttcagtgacatgaacatctaaccatattcaagtttgccctcatctcaatatccagatatctccacctcatcgactcaatagttaaccatattcaagtttgcccctttgaaaccatctgcttggattttatcgattccattacctaaaaatatggtacaatttcagtacgccagtacatattatgcaaatgaaacacaattaaaatcagcattgtgaactttattgtttgcccatttttttgataaattacccattttatgattctactgggcccttttcgcctttgccctacaattattcctcctcttcgctcttttgtttcattgtttgttctgctttgcacttctattcattgcattcttcgtcggtgattgtgctcgtccagttcgtcggccatgtgttctatcattttcgtcagaaatcctttcttaagccctccacttttctccttttttgttaccttcgcacttcgtttttattgttcatgttctctgtcgtcgagatctactgtctcaggtttattctggctttcatagtaaataaattgctcttcttcccctcatttcttgctggacgcatattatgcttttccactttgcgacaacactgtttcccttatttgtgttcgagtaaagttcagactttatcctcagaggtaattgttacttgccttagcttgcactctatacacataaagcgctactgtgctgttgcatcaactgtttcgttccatagtttttgttttatcccacttggtttatgtcttatgtgcgcatcaaacacttcaagctaacaattacgctttctagttttgtagacattaaaacaaatgtttcactccaatgtaggccaaacatatttaagcggtatcgcaacatgtgcatggtactttaatgcagacatttctaaggcacatatgtagtataacatgtacgggaaaatagataaacaaaacactatccattcttgtaattacatttccccttaaacctgttctccttacatgtcatgttgacaatcatctacattatctagctgtctggtagtagcatttttgtaaaactaacatacaaatctagcattaacttttgccccaaatttctaaaatctattatgaactacaaacaagttccaagtattccttttcacatgaatatgagcacactttttaagccatccaataacatttaatcaacatgtatcgtctacattatctagctgtctggtagaagcatttttgtaaaattaacataccaatctagcattaacttttttccccaaatttctgaaacatattatgaactacaaataagttccaagtattcctttgcacatgaatatgagcacccttttttaagccatccaataacatttaagcaacatgtatgcttaaattccacaatactgaccaattacacaaatgtttgctactatttcaatttttgttgtcacatcatttaaaggttacaaaatattgaactttagttgctacgacctacaatacttgaagaagagatccaggtttcccagacacctactttcgaggacaaaaccatcaatgaattggttgaaattgatccagatatattccatgaaggtagatggtggttcccatcttgcactaaatgcaacaagtcttcaattcagacctctactaaatatcgctgcatacgtgtgattggacagaaactaaatttaggcatgtcacagccttgcatattctaatgcactacatgatatagagataattgctttgcgtatctacaacgaccatcactacttttgaagcgcaaacgcttttatgtacatataaccaaaccgatgaaacttctctagcttagtatttgtttatgcgatcctcagctctgctttctgtacctatgacgatcatcgtcacttttgcaaagcaaatgcttttgtgtacatattaccaagttgatgaaaccttgccagtttagcgtctgtttattatgatctttagctcttggaacacactgctgaaatacaatgtaatatgtatagtcctctcagtctactctagacttgctgtaaccgctataattattatcttagtacaacaatttatgtaagcactgggaccagtttaaatttgctcttaaactgatgacagcatgtgctatataacaagttctgagtgtaca

SEQ ID NO: 203324 - DNA, 3032 bp, Zea Mays
ctttcgtaactacaggaggtaggcaaaggagacggcgacgacgaagaacatcttatagcaacggaaaaaagttagcacattccaaaaacttcaaagactgctgtgtacgacatcctatattaccgactgcttctgtttgaattgaacggcatcttcagaatctcggcgacgctaatttctaactcatatgggagaggtctatttctagaatttttgtttttctttaatagatttgccacctacattggcattttttcccactgcaatcgattataaactacagttttgcaacctttcagtgacatgaacatctaaccatattcaagtttgccctcatctcaatatccagatatctccacctcatcgactcaatagttaaccatattcaagtttgcccctttgaaaccatctgcttggattttatcgattccattacctaaaaatatggtacaatttcagtacgccagtacatattatgcaaatgaaacacaattaaaatcagcattgtgaactttattgtttgcccatttttttgataaattacccattttatgattctactgggcccttttcgcctttgccctacaattattcctcctcttcgctcttttgtttcattgtttgttctgctttgcacttctattcattgcattcttcgtcggtgattgtgctcgtccagttcgtcggccatgtgttctatcattttcgtcagaaatcctttcttaagccctccacttttctccttttttgttaccttcgcacttcgtttttattgttcatgttctctgtcgtcgagatctactgtctcaggtttattctggctttcatagtaaataaattgctcttcttcccctcatttcttgctggacgcatattatgcttttccactttgcgacaacactgtttcccttatttgtgttcgagtaaagttcagactttatcctcagaggtaattgttacttgccttagcttgcactctatacacataaagcgctactgtgctgttgcatcaactgtttcgttccatagtttttgttttatcccacttggtttatgtcttatgtgcgcatcaaacacttcaagctaacaattacgctttctagttttgtagacattaaaacaaatgtttcactccaatgtaggccaaacatatttaagcggtatcgcaacatgtgcatggtactttaatgcagacatttctaaggcacatatgtagtataacatgtacgggaaaatagataaacaaaacactatccattcttgtaattacatttccccttaaacctgttctccttacatgtcatgttgacaatcatctacattatctagctgtctggtagtagcatttttgtaaaactaacatacaaatctagcattaacttttgccccaaatttctaaaatctattatgaactacaaacaagttccaagtattccttttcacatgaatatgagcacactttttaagccatccaataacatttaatcaacatgtatcgtctacattatctagctgtctggtagaagcatttttgtaaaattaacataccaatctagcattaacttttttccccaaatttctgaaacatattatgaactacaaataagttccaagtattcctttgcacatgaatatgagcacccttttttaagccatccaataacatttaagcaacatgtatgcttaaattccacaatactgaccaattacacaaatgtttgctactatttcaatttttgttgtcacatcatttaaaggttacaaaatattgaactttagttgctacgacctacaatacttgaagaagagatccaggtttcccagacacctactttcgaggacaaaaccatcaatgaattggttgaaattgatccagatatattccatgaaggtagatggtggttcccatcttgcactaaatgcaacaagtcttcaattcagacctctactaaatatcgctgcatacgtgtgattggacagaaactaaatttaggcatgtcacagccttgcatattctaatgcactacatgatatagaggcataaaattacacacaaaagaaaaagaatactatctatgcaagatggactcgaaaatcctttcaacatgtggatcaatctaattattttagattttttctaaatttgcctttcaatggctgaagtcccattttgatgcaaatgaaaaagcgaacatcctgtagactgctgttgctgtgcatctcaactgttttggtcttccaatctttttggaagtattattatttttactttcacttactcttataattgcatcatgttacacgatgttgacgtcaatatggatatacacccaaacaatctaaattcaaggtcttgtcaaagcaaactaaggttctttttttaatacaaagtcgtatggattctgttagatcttgtattttttcctactaatgtcaatatcaacccgcaagcgtctcttaagtcactctttttaggatcattatttcacatactttaaaccacatatgaaattttgttaggcacactatttgacaattcttatccacttacagaatgttgactagctttcagaacaccttaacaaaaaagatcttttctaaatttgcctttcaatggccaaaatcccatttttatgcaaatgagaaatgaacagcctacaaactatttttgttgtgcatctccactgttttgggcttccaatcttttcttgagtatttttttactttcaattaccccctcttatagtttcatcattaaaaagtattgttttttactttcaattactccctcttataatttcatcgtgttacacaatgttgatgtcgatatagatatacacccagaccatctaaatgcgagttcttatcaaagcaaacttaggttcctttttttgatacaaagtcgtctggtttctcttaaacctatctagtattttgtttcctactaatgtcaataccgacctgcaagcctctcctacctcactcttttcgggatcactatttcacatactttaaaccacatatgaaattat

SEQ ID NO: 203325 - DNA, 2944 bp, Zea Mays
ctttcgtaactacaggaggtaggcaaaggagacggcgacgacgaagaacatcttatagcaacggaaaaaagttagcacattccaaaaacttcaaagactgctgtgtacgacatcctatattaccgactgcttctgtttgaattgaacggcatcttcagaatctcggcgacgctaatttctaactcatatgggagaggtctatttctagaatttttgtttttctttaatagatttgccacctacattggcattttttcccactgcaatcgattataaactacagttttgcaacctttcagtgacatgaacatctaaccatattcaagtttgccctcatctcaatatccagatatctccacctcatcgactcaatagttaaccatattcaagtttgcccctttgaaaccatctgcttggattttatcgattccattacctaaaaatatggtacaatttcagtacgccagtacatattatgcaaatgaaacacaattaaaatcagcattgtgaactttattgtttgcccatttttttgataaattacccattttatgattctactgggcccttttcgcctttgccctacaattattcctcctcttcgctcttttgtttcattgtttgttctgctttgcacttctattcattgcattcttcgtcggtgattgtgctcgtccagttcgtcggccatgtgttctatcattttcgtcagaaatcctttcttaagccctccacttttctccttttttgttaccttcgcacttcgtttttattgttcatgttctctgtcgtcgagatctactgtctcaggtttattctggctttcatagtaaataaattgctcttcttcccctcatttcttgctggacgcatattatgcttttccactttgcgacaacactgtttcccttatttgtgttcgagtaaagttcagactttatcctcagaggtaattgttacttgccttagcttgcactctatacacataaagcgctactgtgctgttgcatcaactgtttcgttccatagtttttgttttatcccacttggtttatgtcttatgtgcgcatcaaacacttcaagctaacaattacgctttctagttttgtagacattaaaacaaatgtttcactccaatgtaggccaaacatatttaagcggtatcgcaacatgtgcatggtactttaatgcagacatttctaaggcacatatgtagtataacatgtacgggaaaatagataaacaaaacactatccattcttgtaattacatttccccttaaacctgttctccttacatgtcatgttgacaatcatctacattatctagctgtctggtagtagcatttttgtaaaactaacatacaaatctagcattaacttttgccccaaatttctaaaatctattatgaactacaaacaagttccaagtattccttttcacatgaatatgagcacactttttaagccatccaataacatttaatcaacatgtatcgtctacattatctagctgtctggtagaagcatttttgtaaaattaacataccaatctagcattaacttttttccccaaatttctgaaacatattatgaactacaaataagttccaagtattcctttgcacatgaatatgagcacccttttttaagccatccaataacatttaagcaacatgtatgcttaaattccacaatactgaccaattacacaaatgtttgctactatttcaatttttgttgtcacatcatttaaaggttacaaaatattgaactttagttgctacgacctacaatacttgaagaagagatccaggtttcccagacacctactttcgaggacaaaaccatcaatgaattggttgaaattgatccagatatattccatgaaggtagatggtggttcccatcttgcactaaatgcaacaagtcttcaattcagacctctactaaatatcgctgcatacgtgtgattggacagaaactaaatttaggtaacctttcacacaaacaattactttgtcgttattcgtctgagataaaacacttcctcttacttatcaaatcactgccacacaacattaacagttcataattcaaagatacaaactcggcttcattgctactgatggaacattcgaagcagaattcttttgttttgacaatatagctaaacaaatagtagaaaaaccttgtgaaacccttgttagtatccttctctagatttagttgccattgtctctctcagattcacctttgcagataccattaatatgttcgcgttctccgtcacaaatcgagtcttttttgttctctccgtgttaacaaatcatggaaggaaaaggtcagcaccatgtaccatacaaaactatcaacaacaagaattagtgacacaagatgacatattagcctcacaaccacataaaactctccaacaacatcgtttgcaaagctatccacttttggtgaccataaaaatgtggcatgtcacagccttgcatattctaatgcactacatgatatagagataattgctttgcgtatctacaacgaccatcactacttttgaagcgcaaacgcttttatgtacatataaccaaaccgatgaaacttctctagcttagtatttgtttatgcgatcctcagctctgctttctgtacctatgacgatcatcgtcacttttgcaaagcaaatgcttttgtgtacatattaccaagttgatgaaaccttgccagtttagcgtctgtttattatgatctttagctcttggaacacactgctgaaatacaatgtaatatgtatagtcctctcagtctactctagacttgctgtaaccgctataattattatcttagtacaacaatttatgtaagcactgggaccagtttaaatttgctcttaaactgatgacagcatgtgctatataacaagttctgagtgtaca

SEQ ID NO: 203326 - DNA, 3151 bp, Zea Mays
gtagctagctagctccgctccacgtccagatcactcgagtaggccgggcgggggtgcttcaattccgctcccaatggtgtaggggggactgggaactgcggagaggagaagtggaggtgagaggggcgacgacaaagagagagagagagatgggagcgattggaggcgacgcgccggtgcagtgggacaaggtggatggggccgaggtggccaatggcggcggtggaggtgctgcgggaaggctggagaagatactcgtctcggtgaggctgagaccgctcagcgacaaggagatttcaaggggggacccggcggagtgggagtgcatcaacgacactaccatcatctcccggagcaccttcccggaccggcccactgctccgactgcgtattcgttcgatagggtatttcgttctgactgtactaccaaagaagtatatgaggaagggaccaaagcagttgccctctctgtagttagtggcattaactcaagtgtttttgcatatggtcaaacaagtagtggaaaaacatacaccatgactggaataacggaatatacagcagcagatatctatgattacattgccaagcatgaagagagagcgtttgtattgaaattttcagcaatcgaaatatataacgaagttgtaagggatcttcttagtgcagaaaacacatcgcttagactttgggatgatgcagagaagggaacatatgtagagaaccttacagaggtgaccttgagggattcagaccacctgaaagaacttatttctacgtgtgaagctcaaaggaggaccggagagacatacttaaatgaaaacagctccagatcacaccaaatacttaaactgactattgaaagttctgctcatgagttcttgggtaaggacaagtcaacaacacttgttgctagtgtgaacttcgttgatttggctggaagtgaacgtgcatctcaggcattatcagctgggactaggctgaaggaaggttgtcatattaatagaagtctacttaccctaggaactgtgattcggaaactaagcaaggtaagaaatgggcacataccataccgagattcaaagctcacgcgcatattacaaccttctctaggaggcaatgcaagaacagcaattatttgtacaatgagcccagcccggagccatatggaacagtcaaggaataccttgttgtttgcaagttgtgcaaaggaagtggtgacaaatgcccaggttaatgtcgttatgtctgataaggcactggttaagcaattacaaaaagaacttgcaaggttggagagtgaattgcgatgcccagcttcatattctggtcttgaagcattagtgagagaaaaagataatcaaatccggaagatggataaagaaattaaggaactgaagttacatcgtgatcttgctcagtctagactgcaagatttgctcaaggttgttggagataaccacggttcgaagcaccccctggcttcttctgcaagaaattttacttttgatgttcctcagccatgtgaggatgagcaatcgacgacatcagaagctatcagcagtggccaaaattttaggcttcaaggacgcctgacaacacaaagagattataggtcacagcaatctgaaaatgatgtgcagtttgctacccctcttagctattcaatcagcagtcccccattcagtgggatgcctccaactaatggcagaaatgataactctcatatatctgatgaagattcagaggatctttgcaaagaagtacggtgcatagagaccaatgaaacagaagaaaatgaatgcttagagtcgtcagctgtgggaagcaatagtctgcaagattcaaatttagcttccagcatgcatgggaacgacaatacaaatcgatctgtgaattctggacggaatgatgcatcttctattaccctggaacaacatctggagaatgtcaaaaaaccgtttgccaatcctggcatggatctgggatcctctacacgtaactcgtcaagctcaaaagtaattggcagaagcaggagctgtaggtctctgatgggttctactctgttggaagacttggagaaagaagtttgcacccctccaagcagaagtttcatggactacccagggaggcccgaaacatgtcaaagaagggtacccgcactgaactacgatgcagagagtgaagctttatccagggcaggatcaatgctatctgaaattaccaccacgaggggtggactgaaggaaaacagctctgctgctggtgatacagaatttgttgctggcataggtgaatttgtcgcggagctaaaagaaatggcccagggtcataatggagaattggctgaagggaccataaggagcgtggggctggatcccattatggatatcttgcaatcaccttctcgctggcctttggaattcgagaagaaacagcaggagatcattgacctgtggcatggatgcaacgtttccttggtccacaggacttactttttcctgctgttcaaaggggacccagccgacgccatttacatggaagtggagcttaggaggttatcatttctcaagaacacatactccaacggaagcatggggtatgatatggtggcaggcagcttgagcacttctctggtttcaagtgcaaagaaactgcaacgcgagagggagatgctctgcaggcagatgcagaagcggctgacgatccaggaacgggagagcctgtacaccaagtggggagtctcgctgtcctccaagaggaggcggctgcaggtcgctcggcgcctttggacggagaccagggacctggagcatgtgagggagagcgcgtccctcgtggccagactgatcgggctcctggagcctgggaaggcgctgagggagatgtttggtctgagcttcgcgccgcagcagtccacccggaggtcgcacagtagttggcggtatggccgttcttctctagactgactgagctcgaaagacgcagctgacaaaaaaacaacaacagttattccgttgttttcgttttgtgtagtgcctgatttttttgctgtcctctcggaaaatagaaattcctgaacattttgtgaccagtctgcgagaaaatttggtagcattttcaagatttattgatgtttacaatttggaaa

SEQ ID NO: 203327 - DNA, 3111 bp, Zea Mays
acgacctggagatcgtggggggaggtggtggagatggtgtaggggggactgggaactgcggagaggagaagtggaggtgagaggggcgacgacaaagagagagagagagatgggagcgattggaggcgacgcgccggtgcagtgggacaaggtggatggggccgaggtggccaatggcggcggtggaggtgctgcgggaaggctggagaagatactcgtctcggtgaggctgagaccgctcagcgacaaggagatttcaaggggggacccggcggagtgggagtgcatcaacgacactaccatcatctcccggagcaccttcccggaccggcccactgctccgactgcgtattcgttcgatagggtatttcgttctgactgtactaccaaagaagtatatgaggaagggaccaaagcagttgccctctctgtagttagtggcattaactcaagtgtttttgcatatggtcaaacaagtagtggaaaaacatacaccatgactggaataacggaatatacagcagcagatatctatgattacattgccaagcatgaagagagagcgtttgtattgaaattttcagcaatcgaaatatataacgaagttgtaagggatcttcttagtgcagaaaacacatcgcttagactttgggatgatgcagagaagggaacatatgtagagaaccttacagaggtgaccttgagggattcagaccacctgaaagaacttatttctacgtgtgaagctcaaaggaggaccggagagacatacttaaatgaaaacagctccagatcacaccaaatacttaaactgactattgaaagttctgctcatgagttcttgggtaaggacaagtcaacaacacttgttgctagtgtgaacttcgttgatttggctggaagtgaacgtgcatctcaggcattatcagctgggactaggctgaaggaaggttgtcatattaatagaagtctacttaccctaggaactgtgattcggaaactaagcaaggtaagaaatgggcacataccataccgagattcaaagctcacgcgcatattacaaccttctctaggaggcaatgcaagaacagcaattatttgtacaatgagcccagcccggagccatatggaacagtcaaggaataccttgttgtttgcaagttgtgcaaaggaagtggtgacaaatgcccaggttaatgtcgttatgtctgataaggcactggttaagcaattacaaaaagaacttgcaaggttggagagtgaattgcgatgcccagcttcatattctggtcttgaagcattagtgagagaaaaagataatcaaatccggaagatggataaagaaattaaggaactgaagttacatcgtgatcttgctcagtctagactgcaagatttgctcaaggttgttggagataaccacggttcgaagcaccccctggcttcttctgcaagaaattttacttttgatgttcctcagccatgtgaggatgagcaatcgacgacatcagaagctatcagcagtggccaaaattttaggcttcaaggacgcctgacaacacaaagagattataggtcacagcaatctgaaaatgatgtgcagtttgctacccctcttagctattcaatcagcagtcccccattcagtgggatgcctccaactaatggcagaaatgataactctcatatatctgatgaagattcagaggatctttgcaaagaagtacggtgcatagagaccaatgaaacagaagaaaatgaatgcttagagtcgtcagctgtgggaagcaatagtctgcaagattcaaatttagcttccagcatgcatgggaacgacaatacaaatcgatctgtgaattctggacggaatgatgcatcttctattaccctggaacaacatctggagaatgtcaaaaaaccgtttgccaatcctggcatggatctgggatcctctacacgtaactcgtcaagctcaaaagtaattggcagaagcaggagctgtaggtctctgatgggttctactctgttggaagacttggagaaagaagtttgcacccctccaagcagaagtttcatggactacccagggaggcccgaaacatgtcaaagaagggtacccgcactgaactacgatgcagagagtgaagctttatccagggcaggatcaatgctatctgaaattaccaccacgaggggtggactgaaggaaaacagctctgctgctggtgatacagaatttgttgctggcataggtgaatttgtcgcggagctaaaagaaatggcccagggtcataatggagaattggctgaagggaccataaggagcgtggggctggatcccattatggatatcttgcaatcaccttctcgctggcctttggaattcgagaagaaacagcaggagatcattgacctgtggcatggatgcaacgtttccttggtccacaggacttactttttcctgctgttcaaaggggacccagccgacgccatttacatggaagtggagcttaggaggttatcatttctcaagaacacatactccaacggaagcatggggtatgatatggtggcaggcagcttgagcacttctctggtttcaagtgcaaagaaactgcaacgcgagagggagatgctctgcaggcagatgcagaagcggctgacgatccaggaacgggagagcctgtacaccaagtggggagtctcgctgtcctccaagaggaggcggctgcaggtcgctcggcgcctttggacggagaccagggacctggagcatgtgagggagagcgcgtccctcgtggccagactgatcgggctcctggagcctgggaaggcgctgagggagatgtttggtctgagcttcgcgccgcagcagtccacccggaggtcgcacagtagttggcggtatggccgttcttctctagactgactgagctcgaaagacgcagctgacaaaaaaacaacaacagttattccgttgttttcgttttgtgtagtgcctgatttttttgctgtcctctcggaaaatagaaattcctgaacattttgtgaccagtctgcgagaaaatttggtagcattttcaagatttattgatgtttacaatttggaaa

SEQ ID NO: 203328 - DNA, 871 bp, Zea Mays
cttctgcagagggcgctgaagctgctggaggacgcgccggggcagtggagcaccgtcgctgggatcgaggcgcagatgggcgtgctgtactacatggtggggaggtacgcggagtcgaggagctcgttcgagagcgcggtcgcgaagctgagggccagcggcgagaggaagtcggcgtttttcggcgtgctgttgaaccagatggggctggcctgcgtgcagctgttcaagatagacgaggctgcgcagctgtttgaggaggcgagggcggtgctggagcaggagtgtggcgcctctcatcctgacactcttggcgtgtacagcaaccttgctgcaatctatgacgccatgggaaggtgagggaagagaagcttggcacggcgaaccccgacgtggaggacgagaagaagaggctggcagagctgctgaaggaggcggggcggtcgcggaaccggaagcagaagtcgctggagaacctgttcggtaccaactcacagcgggcgaagaaggaggccgggaggaggtggtccaacttcgggttcaggagctgagctgaggtgccctttttgtttgtaacattaaaaaaaaaggcacgtgtaaagatgttgctgtaggtgagtagtattgttagcaaggtgggtggtgattatgctgtttgcttggcactgcattgctgttactgttttgggttattttcgagttaaaatttgttttttttattattaactgcgagctgagctgctgtacccggatggatggagaaagagtctttgtggtgttgactgatgagtgatgaaaatacctgttattgttagtacattgcttccttccattggttgagaatccaatgtgaggtggcacatggccacgc

SEQ ID NO: 203329 - DNA, 813 bp, Zea Mays
cccgcggccggcagccgccgccgccgtgcctgtgcgtgcggttgcgctcggccattgagaaagcgaagggcgaacgaaggcgcggggcagctccgcaggccgcagctgagggggaggggatccgcgacgtggacatgctgctcgggcctcggtggtcactcgaactggatcgctgtgtccacctctgatctcttcatcctcgggtcgggactcctctgtctccttgccctgtccccaaacaacctctgaataaagggtaactaccattacgccattcgcataaaaaaaactgagcctgcccgcccgcccgcgcgctccgctccgtgaactatatctatctatcacctgctgctccaaggaggcggacagaggcaggcaggaaggcactcacttctccaggagcccggagtcggcagcaagagagaatggccgccgacgccgccgccgccgccacccttcgtactgctctctcccaagcaacagggcaagagcagagagcttcactgctgtgcacaccgaagcaccgagttgctgccagcaggagaagcttgagattcaccactagggccagctcgaatgcgggcgccagtgtgagcatccctaagcaatggtataacctcatcgccgacctgccggtgaagccaccgccaccgctgcacccgcagacacaccagcctctgaatcccagcgacctctcccctctgttccccgacgagctgatcaggcaggatgttagcggcagatagtggagatagatccgagacaggaattggaggtaggaagcaggaactggggattcaggaagatagcaag

SEQ ID NO: 203330 - DNA, 2256 bp, Zea Mays
gtgtccacctctgatctcttcatcctcgggtcgggactcctctgtctccttgccctgtccccaaacaacctctgaataaagggtaactaccattacgccattcgcataaaaaaaactgagcctgcccgcccgcccgcgcgctccgctccgtgaactatatctatctatcacctgctgctccaaggaggcggacagaggcaggcaggaaggcactcacttctccaggagcccggagtcggcagcaagagagaatggccgccgacgccgccgccgccgccacccttcgtactgctctctcccaaggtctggtgctgtggcatgtttagtgcaatcttcattgcttgctgtcttgctgcatttaacacagcacgagcttcagagaatagtccaagcctatctgtgttgccaagagatctcatccaaggtttacggcaatgaaccatttctaaagcacaaagacgtgatgtctttatcaattcatcaggagagcaaatggcgtcaacaggaggtcaccgacgagcggttcgtcgacatacccgaggaggtcatcgacgtgtacaagctctggcgcccgacgcccctgatcagggccaggaggctggagaagctgctcggcacgccggcgaagatctactacaagtacgaggggaccagcccggcggggtcgcacaagcccaacaccgccgtgccgcaggcgtggtacaacgccgcggcgggggtgaagaacgtggtcaccgagaccggcgccggccagtggggcagcgcgctgtccttcgccagcagcctcttcggcctcaactgcgaggtatggcaggtgcgcgcgtcgttcgaccagaagccgtaccggaggctgatgatggagacgtggggcgccaaggtgcacccgtcgccgtcgacggcgacggaggccggcaagaggatccttgaggcggacccgtccagcccgggcagcctcgggattgccatctccgaggcggtggaggtggcggccaccagcgccgacaccaagtactgcctgggcagcgtgctcaaccacgtcctgctccaccagaccgtcatcggggaggagtgcctggagcagctggcggcgctcggcgagacgcccgacgtcgtcatcggctgcaccggcggcgggtccaacttcggcgggctcgcgttcccgttcttgcgcgagaagctgcgcggcaagatgagccccgcgttcagggccgtggagcccgccgcgtgccccacgctcaccaagggcgtctacgcgtacgacttcggcgacacggccgggctcacgccgctgatgaagatgcacaccctcggccacggcttcgtccccgacccgatccatgtgggcttcggtaccatggaatggcacctctgatctcgcacgtgtacgagctgggcttcatggatgccgttgctatacagcagactgaatgcttccaagctgccttgcaattcgccaggacggagggcatcatcccggcgccggagccgacgcacgcaatcgccgcggcgatcagggaggcgctggagtgcaagcggaccggggaggagaaggtcatcctgatggccatgtgcgggcacggacatttcgacctcgccgcgtacgagaagtacctgaggggagacatggtcgatctctcgcacccggcggacaagctggaggcctccctcgctgccgtgcccaaagtctgacggcgttggagccaacagcacatgcgactggaatgggacgaataatccattgatatcggcttcttgaatcttgtggtcatccatcgcccatcggcagtgggatacttgtgttccttatgaaatgaatgaataaaatttcaataaaagcattaattttatcatattcatggatatgtttgaatgtttgatcgttcttttttagggcattagtatttggtacagcatacactttcaagtttgaactctaaactccacttaaaaagaaacctggtagcatctcatacctaatataccaagatttacttccaaatagcacacttttaaccgctttatttgtttgaaaatacttgacgatacaacaacaacaacaacaacaacaacaacaaagcctttttgtcccaagcacgttggggtaggctagagatgaaaccccatatgaaaacctcagagctcaacccccaaagaacagaaaagggaaacaaaggcaaaggagaaccgaaaacaacgaaacagggaaacacataaaagagataaaacccacaatgaccagcaagatctaaaatggac

SEQ ID NO: 203331 - DNA, 733 bp, Zea Mays
acggcctcggccatagcatgctcggtgagcccccaagtcgaacaggttgtgggcatggcgaagttggtgttgctgtgcgcgagttgagacagcgcagcgccgccgctaccatggacggagttgtatgagccatattcgatgccggtggcgatgagctcaccggcgtggtggttgtcgagcaacgccttgtccgagtgggaggtgacgaacgcctcgtcggggtcggagtcgcgcaggttcgaagagatatcgccgtcagcatcacaaccctcgaagagcccgccccagttgtcggcgacgacagatggcgctgcatagtactccttgccgtcatcgaagcacccgccccagttgtcggcgatgacgacggccccaacagccgcagtcggggtgggcggcatgctggcggatgtgtcggaggattggtggacgctgagcagtgtgggcggaaggtcgaggtacgcagaaggcgagaagcgccggtcccagcgaacctccagctcgtcgaatcgccggttgagctcgtcgaggatgagcttgaaatcgagcgacatggcgtgggcaaattgaagtcgaggatcgaacgaatctgataccaattgttagcggcagatagtggagatagatccgagacaggaattggaggtaggaagcaggaactggggattcaggaagatagcaagagattcataggaacagaggaagcagaggttagagacgaagaagaaggagg

SEQ ID NO: 203332 - DNA, 2320 bp, Zea Mays
aaacggaaaacgacgcagcagcgaaaagaacccaatccgctggccccgccagcccgcccacagaaaagccgttctcccctctttctcgattcgacgaggggaagactcgtcgagccgccggccagcccatctcggcgcattcccggagaatccctccggaaaccggtcgatcctgggtcatccaacacacagcacttcgcttctcccgcgtccccgacccgcgcgcaagccctcatgcggttagggctgtaacgatctcgtctcgctaccggcggccggctgcggaacgggccaccccacgcgctcctctgagttcgttcgactaatctaccgctgactgtactttgggctgtcgccaccagaaagccctcacgagtcctttgcctcctcactccgtcaggctcgtcgccacagggttttgttcctaactttttagcttcaatttttgtcttgaatggcaacacctctggatgttccactggatgatttgattaagagcagagctgggaggggaacaggaagaggcaggggacaaggagggggtcgaggcagaggtgatggccaaaggttggctcgtggttcgtggcgtgggcgtggtactggcaacttccgtgaaaggggacttggggtgtcttcgcggaggccacttggtgttaatacttggtcctcatcatttgctattgccaaggcaagcacacaactataactgtttttctgttaccttcgagaatccaaattgcagtaggtacctgatgagaagtggctataaacttattaaaatggcacagcccaactgttccattcagaccatatctgtgaccatttaactgtggagcttcaaagaggatccaatggctttttcattgagacctgtctcttctctgccgagtatgtagggtggtgaggcatatgttggtttgtgctggctattgcttcaaagttcaaactgataactttgtctctactcgtgagcaagctgatggactacttaataatctgtggataaggccttttcatgtatacagaaatagcaccattatgtggaatgtcattcaataaagcaaaggattttgtgtggagacatgatctctttgaggatagcatggtagcagctgggctttctgggatagaatctggaacaaagctttacatttcaaatttgcactatggagtgacaagtgaagatctacaggagcttttttcagaaatgggtcatttgaagcactgtgctgttcattatgacagttatagacacccaactggttcggctgaggtgatattcaccaggagaagtgaagctctcgcagcactgaagcgatataataatatgcgccttgatgggaaggccatgaagattgaagtaataggagcagaattgggtctatcagctgctgccgtaccccagattagtgttgttcctggtgcaagcagaagagggcagagagaagttgttatgatgcctggtggaagtgggtttggacaaggtgcatctggcccatctagttcgcttcctgggtggaagcgtggaggctttgttcgaagaggacaagggcgtgttagttttcctcaaagagggcgagggcaagtgcgcagccgtggccgtggccgtggccgcagtagctttgttcagagccgtggacgtggctatgtgcgcaggggtaatgcagagaaatcagccaaacaattggacaatgaacttgacaactacaactctggtgcgatgaatgtcgactaagttaatccatcgtgacatcattcaatccaacctggaagttggaactatgttgaagctaagcttgttttctgtcggtattctgtcaaatgtgcacacttctgtcatgctctagtggcatcagttgaagattagatattccattattcctactgcaatagtcttgtgatatcagaatttgctgtaattgaatgatgaattatgttttcaaccgttgaaaggtttgctgtcaaaatttcaatattatcctagttattgtcagaattttcagtaggcattagccaaaaagattggtgctgactactggtatatcagaatttgctgtaattgaatgatgaattatgttttcaaccgttgaaaggtttggtgtcacaatttccatattatcctagttattgtcagaattttcagtaggcattagccaaaaagtttggtgctgactacaggttgaggtgctcttcaaaaaaatcctaatgtacctagaggtgacaatgagctttaaattttgggaacatattcggtgcacccaagccttggtgcgtatatgatacacatgaattaataaagttcataaaaaatctaaaaaaa

SEQ ID NO: 203333 - DNA, 3366 bp, Zea Mays
cgagcattgctctgtttctattatgtttttgcctacccgacatacggtgcttacagaccttatacacggctggccagcccacgccacaattctacagtaacaatcaatctagcccagctacggcccatacccttctactgttcttcataagtgccagcttcctcttctatctccgatacagcaacatagaccggatgtcacagtgaccaccgccctctagctcgtcgcctcgtcggcgtgcccagcttctggtccagcgcgtcgcctccgctgctgctgggcccgacgcccaactaccgtgccgaggtcccaggcaggaagcatcttggcgtacgtgccgccggcgacaagcacccaccacaccagtcatgaagtcgttagccaagcaagagacacagccaaaatcgcggctcattgtgcgccttggtgtattccttgcatctcaccacattctgttcagtgttatatgctgctatgcaggcattatcgcgctactactccttccttcacttgcaaaaaacacatacctctcggagaatgctcttatacctggctctgcaaatccattattttctactgaagatgccattgaagcaaacagatttatgaaagcaattgaagctgtggctagagactcaagcagtgtaataggcatggcaaatttcatagcacaacaaatagaagatctaggtgcagaagtgtgttaccaaaagtttctccctcatggcaagaattttcaccctctgaagttcttcacctccatgacaaatgatattgcaattcaacctaatggcactgccaccaattttgggataaatactatcggcattttacgagctcctcgtggcgatggaaaagaagcaatagtgctggttactccttataattctcaaagagttcagtcgaatgaattattatcgctggctcttggtttctctgtcttctctctcttaagtcgagcagcatggctgtccaaggatgttgtgtggttatctgcagactcacagtttggagagtatgctgcagtctctgcatggctaaaccagtatcataatcccgtgtttttgagtcactcagtggtgtcacataccaagatgtacggtgcaaacaatatatatgatggtaattcagaaaaaacagaagccacggctttcaaacgtgctggaacaatggctgctgctctcatatttaaagttggggaaaccagaagatacagtgacagggatagtgttacgatttatgcagaggcatctaatggacaaatgccaaacttggaccttctgaatgtggtgcactatttggctgttcacagacaagtccctgattatgtggaagggactgcaaatctagctaactctatgtacaaccaggctcttggagtgcccacagggtcccatggtgctttccgtgattatcaagttgatgcggtttctttagaattttcaccaacatttcatgtcaaaaatgagaatgctaaatctttgtttcttctgaagggtggaaggtatcctaatgtgtttcaattgtgctgtttaatgcttcatcgttattagagcatggggggggggcaccttttgattttactaatgaagtagaagagtttgcattcatgctttgaggcatggaactgtttgtactgtaacttcacaacaatggtaacataacagtaaacaaattatttcaactgtttttgatgtaaatgtaacaattgctgaggttatattatgttccagtaacaaatagctgatcagtaaatagttttgtatctgtgaccgtgcaagttattgcagaaaattatttcatcagggatatgattgcatgttaaaccacataaaaggtaaaaattaacttgagtccagtcttattttataagaattttagcatattacggttttgtcgagggcagtacatagacattgtgtgcataaaaaatatttaatataagtgggacgaatgtgattattagcatgaactggtaaaatttggagaaacaccataattagttggtcttgttttttttttttttgcatgactataacaacccaacaggaaatatgtgcatggatggaagtgttttatgcaaatgttgcactgaagtaaacacaggaacgtgatcttaggttgccacttggtgataggctgagggtgtttaacagctttactttcatttcctgcaaaatattcctcagcagaattcgtttgactcgtgagagacttttgattcaggttaattgaaggagtggcacgttctgtgaacaatctgcttgagaagttccatcagtcctttttcctgtacttccttacaggtccaagcaagttcatttcggttggtgtgtatatgattccgtttgcattgcttttggcacctctcccaatagttgctgctgcccttgctgatggcagtagaagcatggaaaaaacagcggataagttgataggcgacggtaaaacagatggcattgctgatatttcgcagaacaagggtggatcatggaaatggcttcgagctgcaaaagtattgcttgttgtccaattatgggcagtacttgtttcactacttccatattacattactcagatacctgatgccacacctacgcaaagcacactcatttgggttgtgctctccatcgtcgtactgatctccctatctgtcttgtttggctcaccatactcaactggtgttgaatggaaacttctgaaggctaccatgatcacttccatctccatcggattggggcttatgtcgataataaatttcgccactgctcagcttggtgctctgatagtgatcccaatgtgtttgttttctcggcctctgaaggcatcagggatgaatttccttcctcgggcagttttgttggcttcaaatgtagcttttgctgtgttgggttttcctccagttgcgttgctgattatgaaaggagtgtccaagggatcgaggtcgtggacaatagatgttggagatttctgggtatggatggagttcctgtgggaaaggagcagcgcgacgtatctttacctatttcttgtacatcttccctgctggcttttgtgcgtccttgtgttcctgcacccatgtcaccaatcagaatataagctgaagcaggaatagctgtttggcatccatagtcttgtctttttggatggtaaatcttgtagactagtgtagaaatttctcactttcacaaacttttggttacccataattcggaaattattcacccagttggagacgacttgtagacgatgtatcctgcctaatgtactgtctgcaacattttcgaaggcatgtttttaaagctgcttgttgcagtaattgatttctaagttttttgttgatagcagccgagaaataaatcgaag

SEQ ID NO: 203334 - DNA, 2551 bp, Zea Mays
cataagtgccagcttcctcttctatctccgatacagcaacatagaccggatgtcacagtgaccaccgccctctagctcgtcgcctcgtcggcgtgcccagcttctggtccagcgcgtcgcctccgctgctgctgggcccgacgcccaactaccgtgccgaggtcccaggcaggaagcatcttggcgtacgtgccgccggcgacaagcacccaccacaccagtcatgaagtcgttagccaagcaagagacacagccaaaatcgcggctcattgtgcgccttggtgtattccttgcatctcaccacattctgttcagtgttatatgctgctatgcaggcattatcgcgctactactccttccttcacttgcaaaaaacacatacctctcggagaatgctcttatacctggctctgcaaatccattattttctactgaagatgccattgaagcaaacagatttatgaaagcaattgaagctgtggctagagactcaagcagtgtaataggcatggcaaatttcatagcacaacaaatagaagatctaggtgcagaagtgtgttaccaaaagtttctccctcatggcaagaattttcaccctctgaagttcttcacctccatgacaaatgatattgcaattcaacctaatggcactgccaccaattttgggataaatactatcggcattttacgagctcctcgtggcgatggaaaagaagcaatagtgctggttactccttataattctcaaagagttcagtcgaatgaattattatcgctggctcttggtttctctgtcttctctctcttaagtcgagcagcatggctgtccaaggatgttgtgtggttatctgcagactcacagtttggagagtatgctgcagtctctgcatggctaaaccagtatcataatcccgtgtttttgagtcactcagtggtgtcacataccaagatgtacggtgcaaacaatatatatgatggtaattcagaaaaaacagaagccacggctttcaaacgtgctggaacaatggctgctgctctcatatttaaagttggggaaaccagaagatacagtgacagggatagtgttacgatttatgcagaggcatctaatggacaaatgccaaacttggaccttctgaatgtggtgcactatttggctgttcacagacaaggttttcgtgtgaacatcgctgcatttagttctttgttgagctctgcatggctcagggttattgctgaaattttgcatactattggtagtgtgttaagaaaaataaatcctgactggaagcttgatattgcagtccctgattatgtggaagggactgcaaatctagctaactctatgtacaaccaggctcttggagtgcccacagggtcccatggtgctttccgtgattatcaagttgatgcggtttctttagaattttcaccaacatttcatgtcaaaaatgagaatgctaaatctttgtttcttctgaagggtggaaggtccaagcaagttcatttcggttggtgtgtatatgattccgtttgcattgcttttggcacctctcccaatagttgctgctgcccttgctgatggcagtagaagcatggaaaaaacagcggataagttgataggcgacggtaaaacagatggcattgctgatatttcgcagaacaagggtggatcatggaaatggcttcgagctgcaaaagtattgcttgttgtccaattatgggcagtacttgtttcactacttccatattacattactcagatacctgatgccacacctacgcaaagcacactcatttgggttgtgctctccatcgtcgtactgatctccctatctgtcttgtttggctcaccatactcaactggtgttgaatggaaacttctgaaggctaccatgatcacttccatctccatcggattggggcttatgtcgataataaatttcgccactgctcagcttggtgctctgatagtgatcccaatgtgtttgttttctcggcctctgaaggcatcagggatgaatttccttcctcgggcagttttgttggcttcaaatgtagcttttgctgtgttgggttttcctccagttgcgttgctgattatgaaaggagtgtccaagggatcgaggtcgtggacaatagatgttggagatttctgggtatggatggagttcctgtgggaaaggagcagcgcgacgtatctttacctatttcttgtacatcttccctgctggcttttgtgcgtccttgtgttcctgcacccatgtcaccaatcagaatataagctgaagcaggaatagctgtttggcatccatagtcttgtctttttggatggtaaatcttgtagactagtgtagaaatttctcactttcacaaacttttggttacccataattcggaaattattcacccagttggagacgacttgtagacgatgtatcctgcctaatgtactgtctgcaacattttcgaaggcatgtttttaaagctgcttgttgcagtaattgatttctaagttttttgttgatagcagccgagaaataaatcgaag

SEQ ID NO: 203335 - DNA, 2574 bp, Zea Mays
atacagcaacatagaccggatgtcacagtgaccaccgccctctagctcgtcgcctcgtcggcgtgcccagcttctggtccagcgcgtcgcctccgctgctgctgggcccgacgcccaactaccgtgccgaggtcccaggcaggaagcatcttggcgtacgtgccgccggcgacaagcacccaccacaccagtcaaatgaatagttgatttcatttcaagcaattcctgaacaactatattacagtcatgaagtcgttagccaagcaagagacacagccaaaatcgcggctcattgtgcgccttggtgtattccttgcatctcaccacattctgttcagtgttatatgctgctatgcaggcattatcgcgctactactccttccttcacttgcaaaaaacacatacctctcggagaatgctcttatacctggctctgcaaatccattattttctactgaagatgccattgaagcaaacagatttatgaaagcaattgaagctgtggctagagactcaagcagtgtaataggcatggcaaatttcatagcacaacaaatagaagatctaggtgcagaagtgtgttaccaaaagtttctccctcatggcaagaattttcaccctctgaagttcttcacctccatgacaaatgatattgcaattcaacctaatggcactgccaccaattttgggataaatactatcggcattttacgagctcctcgtggcgatggaaaagaagcaatagtgctggttactccttataattctcaaagagttcagtcgaatgaattattatcgctggctcttggtttctctgtcttctctctcttaagtcgagcagcatggctgtccaaggatgttgtgtggttatctgcagactcacagtttggagagtatgctgcagtctctgcatggctaaaccagtatcataatcccgtgtttttgagtcactcagtggtgtcacataccaagatgtacggtgcaaacaatatatatgatggtaattcagaaaaaacagaagccacggctttcaaacgtgctggaacaatggctgctgctctcatatttaaagttggggaaaccagaagatacagtgacagggatagtgttacgatttatgcagaggcatctaatggacaaatgccaaacttggaccttctgaatgtggtgcactatttggctgttcacagacaaggttttcgtgtgaacatcgctgcatttagttctttgttgagctctgcatggctcagggttattgctgaaattttgcatactattggtagtgtgttaagaaaaataaatcctgactggaagcttgatattgcagtccctgattatgtggaagggactgcaaatctagctaactctatgtacaaccaggctcttggagtgcccacagggtcccatggtgctttccgtgattatcaagttgatgcggtttctttagaattttcaccaacatttcatgtcaaaaatgagaatgctaaatctttgtttcttctgaagggtggaaggtccaagcaagttcatttcggttggtgtgtatatgattccgtttgcattgcttttggcacctctcccaatagttgctgctgcccttgctgatggcagtagaagcatggaaaaaacagcggataagttgataggcgacggtaaaacagatggcattgctgatatttcgcagaacaagggtggatcatggaaatggcttcgagctgcaaaagtattgcttgttgtccaattatgggcagtacttgtttcactacttccatattacattactcagatacctgatgccacacctacgcaaagcacactcatttgggttgtgctctccatcgtcgtactgatctccctatctgtcttgtttggctcaccatactcaactggtgttgaatggaaacttctgaaggctaccatgatcacttccatctccatcggattggggcttatgtcgataataaatttcgccactgctcagcttggtgctctgatagtgatcccaatgtgtttgttttctcggcctctgaaggcatcagggatgaatttccttcctcgggcagttttgttggcttcaaatgtagcttttgctgtgttgggttttcctccagttgcgttgctgattatgaaaggagtgtccaagggatcgaggtcgtggacaatagatgttggagatttctgggtatggatggagttcctgtgggaaaggagcagcgcgacgtatctttacctatttcttgtacatcttccctgctggcttttgtgcgtccttgtgttcctgcacccatgtcaccaatcagaatataagctgaagcaggaatagctgtttggcatccatagtcttgtctttttggatggtaaatcttgtagactagtgtagaaatttctcactttcacaaacttttggttacccataattcggaaattattcacccagttggagacgacttgtagacgatgtatcctgcctaatgtactgtctgcaacattttcgaaggcatgtttttaaagctgcttgttgcagtaattgatttctaagttttttgttgatagcagccgagaaataaatcgaag

SEQ ID NO: 203336 - DNA, 2469 bp, Zea Mays
atacagcaacatagaccggatgtcacagtgaccaccgccctctagctcgtcgcctcgtcggcgtgcccagcttctggtccagcgcgtcgcctccgctgctgctgggcccgacgcccaactaccgtgccgaggtcccaggcaggaagcatcttggcgtacgtgccgccggcgacaagcacccaccacaccagtcatgaagtcgttagccaagcaagagacacagccaaaatcgcggctcattgtgcgccttggtgtattccttgcatctcaccacattctgttcagtgttatatgctgctatgcaggcattatcgcgctactactccttccttcacttgcaaaaaacacatacctctcggagaatgctcttatacctggctctgcaaatccattattttctactgaagatgccattgaagcaaacagatttatgaaagcaattgaagctgtggctagagactcaagcagtgtaataggcatggcaaatttcatagcacaacaaatagaagatctaggtgcagaagtgtgttaccaaaagtttctccctcatggcaagaattttcaccctctgaagttcttcacctccatgacaaatgatattgcaattcaacctaatggcactgccaccaattttgggataaatactatcggcattttacgagctcctcgtggcgatggaaaagaagcaatagtgctggttactccttataattctcaaagagttcagtcgaatgaattattatcgctggctcttggtttctctgtcttctctctcttaagtcgagcagcatggctgtccaaggatgttgtgtggttatctgcagactcacagtttggagagtatgctgcagtctctgcatggctaaaccagtatcataatcccgtgtttttgagtcactcagtggtgtcacataccaagatgtacggtgcaaacaatatatatgatggtaattcagaaaaaacagaagccacggctttcaaacgtgctggaacaatggctgctgctctcatatttaaagttggggaaaccagaagatacagtgacagggatagtgttacgatttatgcagaggcatctaatggacaaatgccaaacttggaccttctgaatgtggtgcactatttggctgttcacagacaagtccctgattatgtggaagggactgcaaatctagctaactctatgtacaaccaggctcttggagtgcccacagggtcccatggtgctttccgtgattatcaagttgatgcggtttctttagaattttcaccaacatttcatgtcaaaaatgagaatgctaaatctttgtttcttctgaagggtggaaggttaattgaaggagtggcacgttctgtgaacaatctgcttgagaagttccatcagtcctttttcctgtacttccttacaggtccaagcaagttcatttcggttggtgtgtatatgattccgtttgcattgcttttggcacctctcccaatagttgctgctgcccttgctgatggcagtagaagcatggaaaaaacagcggataagttgataggcgacggtaaaacagatggcattgctgatatttcgcagaacaagggtggatcatggaaatggcttcgagctgcaaaagtattgcttgttgtccaattatgggcagtacttgtttcactacttccatattacattactcagatacctgatgccacacctacgcaaagcacactcatttgggttgtgctctccatcgtcgtactgatctccctatctgtcttgtttggctcaccatactcaactggtgttgaatggaaacttctgaaggctaccatgatcacttccatctccatcggattggggcttatgtcgataataaatttcgccactgctcagcttggtgctctgatagtgatcccaatgtgtttgttttctcggcctctgaaggcatcagggatgaatttccttcctcgggcagttttgttggcttcaaatgtagcttttgctgtgttgggttttcctccagttgcgttgctgattatgaaaggagtgtccaagggatcgaggtcgtggacaatagatgttggagatttctgggtatggatggagttcctgtgggaaaggagcagcgcgacgtatctttacctatttcttgtacatcttccctgctggcttttgtgcgtccttgtgttcctgcacccatgtcaccaatcagaatataagctgaagcaggaatagctgtttggcatccatagtcttgtctttttggatggtaaatcttgtagactagtgtagaaatttctcactttcacaaacttttggttacccataattcggaaattattcacccagttggagacgacttgtagacgatgtatcctgcctaatgtactgtctgcaacattttcgaaggcatgtttttaaagctgcttgttgcagtaattgatttctaagttttttgttgatagcagccgagaaataaatcgaag

SEQ ID NO: 203337 - DNA, 1147 bp, Zea Mays
ccaccaagaggaaggggaacgcgcagcgcaggcggcggcgtcttcctccgcggatccctcctcttcgcggacgacgcgattccacaccgcaaaccctccctccctccctggattgatcgagctgctcgtccacctccgctccgcccctcgcctcgccatttcgtagcttgtttctttttcccttctccctccctttcggtttctgctcgattcatcaaattagtttattggaggggagggagacgttaggtgggctgggcgcctcagcgcctgcgtgctccgcctcgggagaagccgagaaggtcaaaagaaatccccaccaccaacgcaggcgactcccgcaatccaccatagcttcctattctccccgtcgccagacgcccagagccccccgcccccagctcggagcaagcaataaaaggcaaagggggctcaacgccgagccggaccagttcgacgccgacgccgacgccgacgagtcgggatcccccagggcgcccctgcctctgcattccaaggttggatcggctgtgaaagcagggttctggacgatggtggacatggcaagcgggcgttacctctggcgcacccttgttgcacagcctgcgaattcagaatccgagaaggtccggtgacgaatgctcggttgttcgtaaattgtctcgtcctgcggatggagtgccacatagatagacataggtgaaggctggtgcaatcctgttgtatcttcttgttacatactccctccgtttctttttatttgtcgctggatagtgcaaaattacactatccagcgacaaataaaaagaaacggagggagtattggtatgatggtgttggtgtgtaatatagatgttacacgggggtcaatatattgaagtaaatttgcaacattgttcatgtgttgagttgaaccttgtgtcgtgtaaaactggaagtgggtgtattctggccatgtgatctgggtccaagtttgcaggttttgtcgttcggctaaatcccttaaatgtgagacttgaaatatagaataaaagcgaagctgagtacatggaaatttgtgattgctggattgcaatatgctcagttgttaaagaagcttgttggatgcaaatgtgtacccttgttttgttgaaacgttgtttggaag

SEQ ID NO: 203338 - DNA, 1583 bp, Zea Mays
cactctcctcgagaggcggcgctgctgaggacactaggcccgaccgcccgaggaaggaagagaaacccgcagagggcgatagaggtcagcgcgattcggagatgggcatgggcgacgaactgtgggacgactcggcgctggtcgtcgccttcgaccgcgccatttccacgttcaatgaaatgcattgcaagagcaggcgagcaacgccaagtaaggatgcgaagaaggaacacgctgctgctcctgcagcagaagaagagcccattactgctggagcagtggatgagtgcagagaggaagatgacaactgtgacaacgcacagacagttgagcaacagcagccctctgacgacaggcagacagttgagcaagcttctcttcaggaaactgatccaggcaaagagacacatgtttcagaggctaaaacgctcacagcagatgctgatggaaatttgagttcaagccagcaaactggggagtacaatgaattgctgagacaatactatgagcttgaggagaagagtcggaacattcttgagcaacttcaacaaacaaactcttggaattatcaggcaccaggatatgcttctacaacccaacagcagcaagttcctgtctatagtgccacagcaccagaccttcactcttccaccactcaatcatcatgctgcaattggaatgttcccctggtatctgtctactgctgttcaactggccaaccaagtggaggttctgcttatatgccacctactgctggctgcagcgcaacattgacttgtgatcaatgcccagatgcaaacagtgcataccctagcgtttcaaacttcatgcaggtcccaacaaatgtatctatcaatgatgatcaagttgctaaggctgcaatgaagactgctgaaggtgccttcaattttatgagaagtacgatatctggacagcctggcgcccaaagaaatgaatctgatactgggaaggaggaaagcactgatatgggcacaaacctgaatcttgatagtgatcttgctgctctcttaaattcatggtatgctgctgggttctacacttgcagagccccaaaaccatgaagttcccaactcgtaaagtccaggtttcgaaaactgcattgcaccagtaattctatcagtttaatattcagcgtacctcacgctgcaatctacgagaaattccagaccgtagagtgctttggccgtcttgagttttagatgtctggggaaaaaaaaagcaaatcactgggtgcgcgtgtgtgccttcaagtacgaatattctgctggagtttgtctactgtctgcttgctgcttgtcactgctattttaagctacactagactttcggtattgctcgaatgtgaatctgttgatgccaggcagaaaaattgcgtataaatgtgtaaactgtcgcactgacctatcagatattcgtcgtatatagagcgctgccatgttcaacctattttagcaggctgttttcggcaggatgacatttgtgctaccacgagtagctttgccggttggcagcttccatcctcggttgtccattacagtattaaagcagtgcgaccgcgacca

SEQ ID NO: 203339 - DNA, 1840 bp, Zea Mays
gctgctgaggacactaggcccgaccgcccgaggaaggaagagaaacccgcagagggcgatagaggtcagcgcgattcggagatgggcatgggcgacgaactgtgggacgactcggcgctggtcgtcgccttcgaccgcgccatttccacgttcaatgaaatgcattgcaagagcaggcgagcaacgccaagtaaggatgcgaagaaggaacacgctgctgctcctgcagcagaagaagagcccattactgctggagcagtggatgagtgcagagaggaagatgacaactgtgacaacgcacagacagttgagcaacagcagccctctgacgacaggcagacagttgagcaagcttctcttcaggaaactgatccaggcaaagagacacatgtttcagaggctaaaacgctcacagcagatgctgatggaaatttgagttcaagccagcaaactggggagtacaatgaattgctgagacaatactatgagcttgaggagaagagtcggaacattcttgagcaacttcaacaaacaaactcttggaattatcaggcaccaggatatgcttctacaacccaacagcagcaagttcctgtctatagtgccacagcaccagaccttcactcttccaccactcaatcatcatgctgcaattggaatgttcccctggtatctgtctactgctgttcaactggccaaccaagtggaggttctgcttatatgccacctactgctggctgcagcgcaacattgacttgtgatcaatgcccagatgcaaacagtgcataccctagcgtttcaaacttcatgcaggtcccaacaaatgtatctatcaatgatgatcaagttgctaaggctgcaatgaagactgctgaaggtgccttcaattttatgagaagtacgatatctggacagcctggcgcccaaagaaatgaatctgatactgggaaggaggaaagcactgatatgggcacaaacctgaatcttgatagtgatcttgctgctctcttaaattcatggtatgctgctgggttctacacttgcaggtaatccttaaccctcgaacgttgagttttcagattgcagcgataccttgttcttgttggtctctgcattaatttctttatttctttgctaacaatcattcacacgtctcagcacttgtacttgtccctacattttgggtgggtatgcgttcacttgtctccgttatcatcgtataaggcgattcttgcttttatttcataaataaaagagaggacttatttgcacttattaattgaattgactgactgatttacctaaactggtttggaacgtcagagccccaaaaccatgaagttcccaactcgtaaagtccaggtttcgaaaactgcattgcaccagtaattctatcagtttaatattcagcgtacctcacgctgcaatctacgagaaattccagaccgtagagtgctttggccgtcttgagttttagatgtctggggaaaaaaaaagcaaatcactgggtgcgcgtgtgtgccttcaagtacgaatattctgctggagtttgtctactgtctgcttgctgcttgtcactgctattttaagctacactagactttcggtattgctcgaatgtgaatctgttgatgccaggcagaaaaattgcgtataaatgtgtaaactgtcgcactgacctatcagatattcgtcgtatatagagcgctgccatgttcaacctattttagcaggctgttttcggcaggatgacatttgtgctaccacgagtagctttgccggttggcagcttccatcctcggttgtccattacagtattaaagcagtgcgaccgcgacca

SEQ ID NO: 203340 - DNA, 1358 bp, Zea Mays
tgaggttttaccttaccggcatcgcgactagaaatttatgaaatgcattgcaagagcaggcgagcaacgccaagtaaggatgcgaagaaggaacacgctgctgctcctgcagcagaagaagagcccattactgctggagcagtggatgagtgcagagaggaagatgacaactgtgacaacgcacagacagttgagcaacagcagccctctgacgacaggcagacagttgagcaagcttctcttcaggaaactgatccaggcaaagagacacatgtttcagaggctaaaacgctcacagcagatgctgatggaaatttgagttcaagccagcaaactggggagtacaatgaattgctgagacaatactatgagcttgaggagaagagtcggaacattcttgagcaacttcaacaaacaaactcttggaattatcaggcaccaggatatgcttctacaacccaacagcagcaagttcctgtctatagtgccacagcaccagaccttcactcttccaccactcaatcatcatgctgcaattggaatgttcccctggtatctgtctactgctgttcaactggccaaccaagtggaggttctgcttatatgccacctactgctggctgcagcgcaacattgacttgtgatcaatgcccagatgcaaacagtgcataccctagcgtttcaaacttcatgcaggtcccaacaaatgtatctatcaatgatgatcaagttgctaaggctgcaatgaagactgctgaaggtgccttcaattttatgagaagtacgatatctggacagcctggcgcccaaagaaatgaatctgatactgggaaggaggaaagcactgatatgggcacaaacctgaatcttgatagtgatcttgctgctctcttaaattcatggtatgctgctgggttctacacttgcaggtacctcacgctgcaatctacgagaaattccagaccgtagagtgctttggccgtcttgagttttagatgtctggggaaaaaaaaagcaaatcactgggtgcgcgtgtgtgccttcaagtacgaatattctgctggagtttgtctactgtctgcttgctgcttgtcactgctattttaagctacactagactttcggtattgctcgaatgtgaatctgttgatgccaggcagaaaaattgcgtataaatgtgtaaactgtcgcactgacctatcagatattcgtcgtatatagagcgctgccatgttcaacctattttagcaggctgttttcggcaggatgacatttgtgctaccacgagtagctttgccggttggcagcttccatcctcggttgtccattacagtattaaagcagtgcgaccgcgacca

SEQ ID NO: 203341 - DNA, 1501 bp, Zea Mays
gggtcccggactcccggttccggcctagaggatctcgttcccggccgtctgccgctcggtcctcacccgtcgccgtcgcccccctcccggtcccggcctcccggccttccaaatcgtcagcgcagggcgcacacgcttgcccgcgccgcccagccagcggcacacgcctgcccgcgccgcccagccgctctcccatagccgtcgcgccgtcccggccctccaagattcagattggtgttttgctggcaccatgtccagtccgtggagccctatgagtttggaggaagaggaagagatccaagagctcgatgccgaggagcagcaggacggtgagcagccgcagcagggtgatgggctgcagcaggggtccacagctgaagcaagggcacaacaaaccggaaagaaacgcgcaagatcagtggccaactcgtctactaagtctgaggcaaagataaaggtcgaggaaagtgcaccaggagctgcgacaggagtgattctgtctcttcgtgaaagtttacaggactgtaaacaaagccttgcatcctgccaggtggaacttgaagctgcaaaatcagaaattgagaagtggcattcagcatttcagagcattccagctgtaccttctggtaccagtccagatcctgtttcagtggtatcttacctcagtaacctgaagtcatcagaggaatcattgaaggagcagctggagaaagcaaagaaaagggaggcagcttttatagtaacatttgcaaaacgagagcaggagattgcagaactgaagtctgcagttagagatttaaaaacacaattaaggccaccgtcaatgcagacaaggagattgttgcttgatccagcaattcatgaggaatttacacgcttaaaaaatcttgtggaggagaaagagaaaaaaataaaggagctacaggacaacgttgctgctgtcaatttcactccatccagcaaactgggaaaaatgctgatggctaaatgcagaacattgcaagaggaaaacgaagagattggggcgatggcatcggaaggaaaaatccatgagcttgggatgaaaatcgccgttctgaagtcgcagaacaacgagctccggaatcaatttgatgttttgtataagcacatggacggcgtgacgaatgacgtggagagatcaaacgaactggtggccatcctgcaagaggagctagaagccaaggagttagaggtgactagactgaaggaggagacgctttcccagaaggaaggcactcaagaagcaccggcaccggcaccagctccggtggaagagggagacggagctggaaacgatctgaagccggcttcagatccgctgcaagtgaagctggaaagttaaggggagacggaggggtggaaacgaccagacgttgaagttctccgactggtctcgttgccttcgtcatactctccctgcaccaatctctctacccctacatgccaacatcacacagtcaatcttagcccaccggacgac

SEQ ID NO: 203342 - DNA, 1078 bp, Zea Mays
ggtcccggactcccggttccggcctagaggatctcgttcccggccgtctgccgctcggtcctcacccgtcgccgtcgcccccctcccggtcccggcctcccggccttccaaatcgtcagcgcagggcgcacacgcttgcccgcgccgcccagccagcggcacacgcctgcccgcgccgcccagccgctctcccatagccgtcgcgccgtcccggccctccaagattcagattggtgttttgctggcaccatgtccagtccgtggagccctatgagtttggaggaagaggaagagatccaagagctcgatgccgaggagcagcaggacggtgagcagccgcagcagggtgatgggctgcagcaggggtccacagctgaagcaagggcacaacaaaccggaaagaaacgcgcaagatcagtggccaactcgtctactaagtctgaggcaaagataaaggtcgaggaaagtgcaccaggagctgcgacaggagtgattctgtctcttcgtgaaagtttacaggactgtaaacaaagccttgcatcctgccaggtggaacttgaagctgcaaaatcagaaattgagaagtggcattcagcatttcagagcattccagctgtaccttctggtaccagtccagatcctgtttcagtggtatcttacctcagtaacctgaagtcatcagaggaatcattgaaggagcagctggagaaagcaaagaaaagggaggcagcttttatagtaacatttgcaaaacgagagcaggagattgcagaactgaagtctgcagttagagatttaaaaacacaattaaggccaccgtcaatgcagacaaggagattgttgcttgatccagcaattcatgaggaatttacacgcttaaaaaatcttgtggaggagaaagagaaaaaaataaaggagctacaggacaacgttgctgctgtcaatttcactccatccagcaaactgggaaaaatgctgatggctaaatgcagaacattgcaagaggaaaacgaagagattggggcgatggcatcggaaggaaaagagatggacttgtaacagggcatctttgttccag

SEQ ID NO: 203343 - DNA, 949 bp, Zea Mays
ctagttcagctgtatatggtgaaggctggcaagccatttaaacagtctgggaaatcatctaaggatcagaaagagacaaaatcatcaaaggattccaaagaaccgaagccatcaaaagatgcaaagcaaccaaagccatcaaaagatacaaaggagccaaagccaccaaaggtttcaaagtcacccaaggactccaaagaacagaagaaggcaacgctgaaagatccgaagaaagcaccaaaggattctaaaggactgaagaaagcgcttaaggatccgaaagaacaggaatcattggaagacccaaaggaacatacagcaaagaaggccggcaagcgtgtgacgttcgccgaggtggagcctgagaaggagctcaaggcctcgaacagtgactggcacccatcctctgatttccacgcggcgtaccctgagcagaacccatgggctagcggcttcatgatctttgaggatgaaaacagctactggaaccgaggacccctagactgctgagatcaaatgtatcgaggtggacactttttggtccgctagcagtgcaaggtcccaccagttcatcttcagccgaggagatgggtctcactcgcattatggcgacttgcgcctggtgtctgactctcggtcctgtaacatatttgtccgacgaatacctgtaggttgtagtgtagaattatcaattatgcagtgtggatggtgaaccggtgatattgtgtttcaggcggtgaaccttgttagttaggagaattgagatagtagcagtgtggtgctaaaccttatctggtttctggttgtgttgcttgctgtgctccctggtgcgtttccagtatctgcacaagtgccacaaaagtctgaccgtgatgaaaagatccgtaaaatcgtgcgaacttgccgttaccaatgccattttggaacctgaaatcttcttgaaaataac

SEQ ID NO: 203344 - DNA, 1196 bp, Zea Mays
ctcaactttaacgagccaaacacaaatgcttcctttctggccttcaatgaaattgatctttatttgctggcttgtcttgccatacttcaatggcgcagcctatgtgtaccagaattatgtgagacctgccttcataaagaaccagatggtcaacatttggtatgtccctcagaaaaaaggccttcttgggaaatctgatgacttcctcacagcacttgataagttcattgaagaaaatgggactgacgcgctgaagaaattggcgaacaaggctggcaagccatttaaacagtctgggaaatcatctaaggatcagaaagagacaaaatcatcaaaggattccaaagaaccgaagccatcaaaagatgcaaagcaaccaaagccatcaaaagatacaaaggagccaaagccaccaaaggtttcaaagtcacccaaggactccaaagaacagaagaaggcaacgctgaaagatccgaagaaagcaccaaaggattctaaaggactgaagaaagcgcttaaggatccgaaagaacaggaatcattggaagacccaaaggaacatacagcaaagaaggccggcaagcgtgtgacgttcgccgaggtggagcctgagaaggagctcaaggcctcgaacagtgactggcacccatcctctgatttccacgcggcgtaccctgagcagaacccatgggctagcggcttcatgatctttgaggatgaaaacagctactggaaccgaggacccctagactgctgagatcaaatgtatcgaggtggacactttttggtccgctagcagtgcaaggtcccaccagttcatcttcagccgaggagatgggtctcactcgcattatggcgacttgcgcctggtgtctgactctcggtcctgtaacatatttgtccgacgaatacctgtaggttgtagtgtagaattatcaattatgcagtgtggatggtgaaccggtgatattgtgtttcaggcggtgaaccttgttagttaggagaattgagatagtagcagtgtggtgctaaaccttatctggtttctggttgtgttgcttgctgtgctccctggtgcgtttccagtatctgcacaagtgccacaaaagtctgaccgtgatgaaaagatccgtaaaatcgtgcgaacttgccgttaccaatgccattttggaacctgaaatcttcttgaaaataac

SEQ ID NO: 203345 - DNA, 1398 bp, Zea Mays
aaaaaatgggtgtacggttctgggaccaggatgtattaaaatttaaaccttaacatggatcgatgtgtgctgtaccgaggcctttggtggcattggcttatcctttgtatgcttccattaaggcaatagagaccaaatctcctgtggatgatcaacaatggctcacatattgggtcctgtactcactaataacattgtttgaactcacatttgcatcaattattcagtggcttcctttctggccttcaatgaaattgatctttatttgctggcttgtcttgccatacttcaatggcgcagcctatgtgtaccagaattatgtgagacctgccttcataaagaaccagatggtcaacatttggtatgtccctcagaaaaaaggccttcttgggaaatctgatgacttcctcacagcacttgataagttcattgaagaaaatgggactgacgcgctgaagaaattggcgaacaaggctggcaagccatttaaacagtctgggaaatcatctaaggatcagaaagagacaaaatcatcaaaggattccaaagaaccgaagccatcaaaagatgcaaagcaaccaaagccatcaaaagatacaaaggagccaaagccaccaaaggtttcaaagtcacccaaggactccaaagaacagaagaaggcaacgctgaaagatccgaagaaagcaccaaaggattctaaaggactgaagaaagcgcttaaggatccgaaagaacaggaatcattggaagacccaaaggaacatacagcaaagaaggccggcaagcgtgtgacgttcgccgaggtggagcctgagaaggagctcaaggcctcgaacagtgactggcacccatcctctgatttccacgcggcgtaccctgagcagaacccatgggctagcggcttcatgatctttgaggatgaaaacagctactggaaccgaggacccctagactgctgagatcaaatgtatcgaggtggacactttttggtccgctagcagtgcaaggtcccaccagttcatcttcagccgaggagatgggtctcactcgcattatggcgacttgcgcctggtgtctgactctcggtcctgtaacatatttgtccgacgaatacctgtaggttgtagtgtagaattatcaattatgcagtgtggatggtgaaccggtgatattgtgtttcaggcggtgaaccttgttagttaggagaattgagatagtagcagtgtggtgctaaaccttatctggtttctggttgtgttgcttgctgtgctccctggtgcgtttccagtatctgcacaagtgccacaaaagtctgaccgtgatgaaaagatccgtaaaatcgtgcgaacttgccgttaccaatgccattttggaacctgaaatcttcttgaaaataac

SEQ ID NO: 203346 - DNA, 1396 bp, Zea Mays
aatggcgtaggttatagtcggcgtcatgtttcgatttcgagaactcttgcgcggcgcctgacaagaaatccttctcggcctttggtggcattggcttatcctttgtatgcttccattaaggcaatagagaccaaatctcctgtggatgatcaacaatggctcacatattgggtcctgtactcactaataacattgtttgaactcacatttgcatcaattattcagtggcttcctttctggccttcaatgaaattgatctttatttgctggcttgtcttgccatacttcaatggcgcagcctatgtgtaccagaattatgtgagacctgccttcataaagaaccagatggtcaacatttggtatgtccctcagaaaaaaggccttcttgggaaatctgatgacttcctcacagcacttgataagttcattgaagaaaatgggactgacgcgctgaagaaattggcgaacaaggctggcaagccatttaaacagtctgggaaatcatctaaggatcagaaagagacaaaatcatcaaaggattccaaagaaccgaagccatcaaaagatgcaaagcaaccaaagccatcaaaagatacaaaggagccaaagccaccaaaggtttcaaagtcacccaaggactccaaagaacagaagaaggcaacgctgaaagatccgaagaaagcaccaaaggattctaaaggactgaagaaagcgcttaaggatccgaaagaacaggaatcattggaagacccaaaggaacatacagcaaagaaggccggcaagcgtgtgacgttcgccgaggtggagcctgagaaggagctcaaggcctcgaacagtgactggcacccatcctctgatttccacgcggcgtaccctgagcagaacccatgggctagcggcttcatgatctttgaggatgaaaacagctactggaaccgaggacccctagactgctgagatcaaatgtatcgaggtggacactttttggtccgctagcagtgcaaggtcccaccagttcatcttcagccgaggagatgggtctcactcgcattatggcgacttgcgcctggtgtctgactctcggtcctgtaacatatttgtccgacgaatacctgtaggttgtagtgtagaattatcaattatgcagtgtggatggtgaaccggtgatattgtgtttcaggcggtgaaccttgttagttaggagaattgagatagtagcagtgtggtgctaaaccttatctggtttctggttgtgttgcttgctgtgctccctggtgcgtttccagtatctgcacaagtgccacaaaagtctgaccgtgatgaaaagatccgtaaaatcgtgcgaacttgccgttaccaatgccattttggaacctgaaatcttcttgaaaataac

SEQ ID NO: 203347 - DNA, 6883 bp, Zea Mays
gttccatgtcccgtgtcactttcaggagtctacagcgttgcgttcctgatcagtgttgagctctaaacgatggtgttgcattgctgatcagtattgagttgggcgcatgttgattttgggaggacccacgggcgaacgatgtgtcactttcatgagttagtgtcgggttccaggttgagtttcggggggccatgttgattttttgaaggactcacgggccgaacctcgtgtcactttcattaggtatagtgttgggttccttctcaatgtggcgttcggaactatggtgttgcgttcctccaatctgttgggtttcagggtcccatgttgatttttgggaggacccgcggtccgaagcccgtgtaactttccggagtctacagtgttgcattctgaaaagcagtgttaggttccatgtacagtgttggagtctaccatggggctcctgctaagtgttgagtcagatgggcagatgttggttttgggaggacccacgggcgaagggcgtgtcactttcatgcggtatagtgttgcgttcctccaatctgttgggtttcagggtcccatgttgatttttgggaggacccgcggtccgtagtccgtgtcactttccggagtctacagtgttgcgttctgaatgctagtgttatgttccataacccgtgtcactttctggagtctaccgtggggcccttctaagtgttgagtcggatggggggatgttggttttcggaggacccacgggcgaagggcgtgtcactttcatgcggtatagtgttgtgttccttcatctgttgcgtttcagggttccatgttgattttttggaggacccgtggtccgtagtccgtgtcactttccggagtctacagtgttgcgttctgaatgctagtgttatgttccataacccgtgtcactttctggagtctaccgtggggctccttctaagtgttgagtcggatgggcggatgttggttttgggaggacccacgggcgaacgacgtgtcactttcatgagttcgtagtgttgagttccatatcccgtgtcactttcaggagtatatagtgttgcgttcctgatccatgttgagttctaaacgatggtgtggcgttcctaatcagtattgagttgggcgcatgttgattttgggaggacccacgggcgaacgacgtgtcactttcatgagttatagtgttgatttttgaaggacccacgagccgaaccccgtgtcactttcatgaggtatagtgttgggttcgtgctcagtgtggcgttcgacactatggtgttgcgttcctccaatctgttgggtttcagggtcccatgttgatttttggcaggacccgcagtctgaagcccgtgtcactttccggagtctacagtgttgcgttctgaatactagtgttatgttccatgtcccgtgtcactttctggagtctaccgtggcgctcctgctaagtgttgagtcagatttgcggatgttgattttgggaggacccacgggtgaagggcgtgtcactttcatgaggtatagtgttgggctccttctcagtgttgtgttcggaactatgctgttgcgttccttcaaggtgttgagtttcagggtcccatgttgatttttgggagttatagtgttgagtttcagggtcccttttagactggaaaagtcttctgccataatcgtcagatttacctaaatgatgtaaaaaatggtttggaaaactctaaaacattaaataaagatcacataacattaattaataaaaaatgatataatacacaaacattaagtaagaattatagaaagttgaggcaccagtttgtatgcaggattcttcctcctaagatgtggaaagctaattagttttaaaccataatccacctcaatatatatgaattaaagtgcatagatgtggcaacaacgttgaagataaacatctatttgtacagcaaacgcaggcttcccaaagcggcatggtcagttcgagctcgccctggggatgccgccgctctgcccatcgcagacgccgtggagcatcgacggcgacgtcgcaggacatgaggtcgcctaccagctggtgacccgaaacacccaggcggcccgccgccacgtcgagataacggccctgacggtgccgacattttggggcagcgggcattgcccggagccgctcgtcatcctaagaaagggcagcacggtggcctgctagtacgtgacgggatctggcagcgcagggaacggagggacagacggcaagagcatgcaccacatcgacgtgaacatggagtgagcgagccaacggagaaatggcgatgggaatggaggtgcagctggtgggagcagttggcacgccgatgaccggacgaagcaagtgaggcaagggatggacgtcgcacttcaatacgtgcctggcggcaccgacattccgatgcagcggctacccccggagccactcgtcgtccatgaaaagggcgacgaactggcctggcaagatctggcggcgcggggatcgaatggacggacgacaagagcgagcgaagaagtcctggcggcttggtgagaaaatggtggcgctgggggcgatgggaacggaggtgcggatggtggcagcagtggagtgagcgagcgtggcctggtttcttcttgaggaaatggcattgcagaggcgatgggaatggagatgcgaatggggggaggagttgccgtgccgacggccgaccgcgatttttttgggaagaatcgtgagaagggataacacacagagagaaaaatgagtgttaccttcgcgttacaggaatgaagcgacggcgacgtcgagactgattgtcgtcgtccgcggccatggggcggagcaccttccggagaagtcgagacttatacgattaaaaaaggtaggcgaagagtcggcgcagcatttcacacgcagtagtgactgacacctggatggttggattagtggcacggacaaacgatcttacggctacggaaatttggacgatgtgtccaccttcgtttgcgagcagcggaccctggtttgatatattaaaaaaaggcagccgaagagtcggcgcagcatttcacacgcagtagtgagtgacacctggatggttggattagtggcacggacaaacgatcttacggctacggaaatttggacgacgtgtccaccctcgtttgcgagtagcggaccctggtttaatatatagaaatagtgttgagttctcaacactgtatactcctgaaagtgacacgggcccatggaatgtgacactatcgttcagaactcatgaaagtgacacgttgttcggtgtgaaagtgttgatttagggtttagtgtaaccgcccgttcggtgtggaagtgttcaaatttctctacgcgcgttcggtagcctcaccgacggcgacggcgacctcacctcaccgacggcgacggcctcggcgacggcgacaacgatccccaattctcttcgcgacctgaccgtctccacttcggggtgaagaagaaagccaacatgccacaggggaagagtaagaagaacgtggtgaaggagaaagccaaaaagattaagaagaacgcggaatcgagagccaaagttcatgaaaatacagatcaaattgagatcaacattagagaaggtgtttcaatttggataacaaaggctgcagtgcaaaaatgttttgagtttccccctggtacagataagaagctgccaatagatccaactacaaaaacatttgattcactctacagagtattgagtgtttcagaaaaaaaaatcaatgtaaagaagaagaagatgaaggagaatatgaaggagaagcaggttgaggaggagaagattgagatgaacatggaggagaagaagcagaatctggttgaggatgaaggtagtcaacaggaggaaagtgaagaggaggacggtgaagatggggaaattggagaggaggaaggtgaagatggggcaattggagatgctaaagtggggggagatggagacaaggaaagtgctaaaaggggggggataaaggttgctgtcagaagaaatgttttgactcctttgaacatcaatttgatgttacagaacatcaacaacgatgagattctcaaacttcttgttaaaagaaatgaagacactgatggtacagaaccgaatcttgacattgacctgattgtcagatgtttctttgcggtgagcagtgttgctgagtttggcaaggataagaagaaactgatatcagggtgtacaactgtgctaatggttgttttcttggaccatctcgtggaaaaccctttggatcctttgaccatccctaggatcaacttgtatacttcagattttatcgcagacctgataatggtacccaaggatagccctggccctgaaaaaaagcgtcgtaagactcaagatgaaaaagaagactagtaatgttataaagaatctcgctactctcaattttaagaattcggaggatacatgctatcatgaagattcagaaatggtgccaagtccagggagagcatcgccggttgttgcttctgtacaatctcataagaactttgttgatcatgcagatttagaaattgtgccatctcatgagaactctgttgatctacatagtgtttacatggcacatgtattggaaagaagcagacaaagcatagtagtggacatattggactacaatatacctgaatctacttttgcagattgtttgctacctacaggtcatatgcacacagatgtattttatttacaatgccaactgttgtcaaaggattggaaggataaagtaattcttagctggaaagctactcaagaactgattcatcaagatattggagttaaggagctggacaaggaacttactgcagagatatttattcctatcattcatgccggtcactggtcccttgttattctttccactgccaaacaagagacatatatccttgactcctacccaaggcacagtggggtggccaaggatgttttaactcaactgcagaagtatttggataataaacacaactttgacatgtctaactacactgaccatgtgccacctgttcagcatcaaaaaaacaattacgattgtggctttcatgttttattgtatattgaagaattcatgaaggagaagatgtataaaatcaacaaaaaaatggtgttgaaattcagaaagcagctttgcatgaatctcttgtaccatcctttgaacagaataaatcttgtggaattcagaaagaagctgggtattacattgaaaagaaaacttcctggtatacttgatcttactattgaaggtgagaggagtgaatctgaggctgcagtgataattgaaatagagaacagagatgataagactctagaggatgaacatatttcagttgagaaagagaagttgcgaaaacacaagtttacgtctgataagatcaacgatgagatctgcaaacatatcttgaactacaatgaacgggagttgttaagtgtggggcagactaccatgactgggggtcagctggaaaagtacgtaaatgaaggtgacaatggtgataaaatactcagagcattcatcacatgcttcacttgtgatgaaaagttcaatcaagggaacatcacaaccgtcatcccgccacatgaagtatccgaagagggtgaactctccaaagttgatgctgcacaacttgtagaagaaatcaaagctgtactcaaaggcaccaatgttgcacgtgtacgcaaagacaccgaatccaccaaagatcccaaagtgaaagtctttcgaaacatgaggaggacatttatattttttcctttctacaagaatgaagaattgtttgtatttcatgtcgatacgaaaagactacccatcattgatgctctgttttgcaagatgtcatcattgtcgtttgaagatagatcctgactaggaaagtctatcatgggctgtctactcaaagccatgaaggattccggcttcatggtgaaaaaatatggtgattgtaggttcacagttactgtaactgaactcgaattcaaagatagtgcctcagcgctcataagttttattgagaacttcacttctaagttggacgacaatgccaagaaactgaaaaagggtgacaaggactggctggaaccttacaagaagtcgacagtggcataccttgtttgtcacactgaaaataaggtggtgttgcctgacgatattgtgaagtacaagcaaaacaagtgaggtggttgagtcgttaatgggtccagtggctgtgttttaagacttgtatcacactacttgtatggctttattctctgaagctgttccattgttgccgttagtaacaggtgttgcttttgtctctgctcagtgggtgattcatttcatccagagttgctgcaactttaatcagtctatagtgttgggttcctagctcagtgttgagttctaaatgatcgtgttgtgttcctaccaagtgttgagctgcacgacggcgtgcgcagccgcagccgcaccggcgaggagcgtttagaactctgttgatctacatagtgtttacaccggctcaacagagttctcatgttgatttttgaaggacccacgtgttgggttcctgctcagtgttgagttctgaacgatagtgttatgttccatgggcccttgttgatttcgagaggacccacgggccgaacggcgtgtcactttcatgcgtctatagtgttgggttcctgtctagtgttgagttctcaactatggtgttgtgttcctccaagaagttgagtttcaggggcctattatattgtctcagttaatgggtaactcagttaatcctatatattgtgtcagttaatgggaactcagttaatggtatatgttgtctcagttaatg

SEQ ID NO: 203348 - DNA, 5731 bp, Zea Mays
gtcactttcatgagttcacagtgttgagttctgaaggtagtgttacgttccatgtcccgtgtcactttcaggagtctacagcgttgcgttcctgatcagtgttgagctctaaacgatggtgttgcattgctgatcagtattgagttgggcgcatgttgattttgggaggacccacgggcgaacgatgtgtcactttcatgagttagtgtcgggttccaggttgagtttcggggggccatgttgattttttgaaggactcacgggccgaacctcgtgtcactttcattaggtatagtgttgggttccttctcaatgtggcgttcggaactatggtgttgcgttcctccaatctgttgggtttcagggtcccatgttgatttttgggaggacccgcggtccgaagcccgtgtaactttccggagtctacagtgttgcattctgaaaagcagtgttaggttccatgtacagtgttggagtctaccatggggctcctgctaagtgttgagtcagatgggcagatgttggttttgggaggacccacgggcgaagggcgtgtcactttcatgcggtatagtgttgcgttcctccaatctgttgggtttcagggtcccatgttgatttttgggaggacccgcgggttccatgttgattttttggaggacccgtggtccgtagtccgtgtcactttccggagtctacagtgttgcgttctgaatgctagtgttatgttccataacccgtgtcactttctggagtctaccgtggggctccttctaagtgttgagtcggatgggcggatgttggttttgggaggacccacgggcgaacgacggtcccatgttgatttttggcaggacccgcagtctgaagcccgtgtcactttccggagtctacagtgttgcgttctgaatactagtgttatgttccatgtcccgtgtcactttctggagtctaccgtggcgctcctgctaagtgttgagtcagatttgcggatgttgattttgggaggacccacgggtgaagggcgtgtcactttcatgaggtatagtgttgggctccttctcagtgttgtgttcggaactatgctgttgcgttccttcaaggtgttgagtttcagggtcccatgttgatttttgggagttatagtgttgagtttcagggtcccttttagactggaaaagtcttctgccataatcgtcagatttacctaaatgatgtaaaaaatggtttggaaaactctaaaacattaaataaagatcacataacattaattaataaaaaatgatataatacacaaacattaagtaagaattatagaaagttgaggcaccagtttgtatgcaggattcttcctcctaagatgtggaaagctaattagttttaaaccataatccacctcaatatatatgaattaaagtgcatagatgtggcaacaacgttgaagataaacatctatttgtacagcaaacgcaggcttcccaaagcggcatggtcagttcgagctcgccctggggatgccgccgctctgcccatcgcagacgccgtggagcatcgacggcgacgtcgcaggacatgaggtcgcctaccagctggtgacccgaaacacccaggcggcccgccgccacgtcgagataacggccctgacggtgccgacattttggggcagcgggcattgcccggagccgctcgtcatcctaagaaagggcagcacggtggcctgctacggctacccccggagccactcgtcgtccatgaaaagggcgacgaactggcctggcaagatctggcggcgcggggatcgaatggacggacgacaagagcgagcgaagaagtcctggcggcttggtgagaaaatggtggcgctgggggcgatgggaacggaggtgcggatggtggcagcagtggagaatgaagcgacggcgacgtcgagactgattgtcgtcgtccgcggccatggggcggagcaccttccggagaagtcgagacttatacgattaaaaaagggaaccgcctcaccgattctgatgtcgaaggtaacctggtgccgatccgcaggggtgaagaagaaagccaacatgccacaggggaagagtaagaagaacgtggtgaaggagaaagccaaaaagattaagaagaacgcggaatcgagagccaaagttcatgaaaatacagatcaaattgagatcaacattagagaaggtgtttcaatttggataacaaaggctgcagtgcaaaaatgttttgagtttccccctggtacagataagaagctgccaatagatccaactacaaaaacatttgattcactctacagagtattgagtgtttcagaaaaaaaaatcaatgtaaagaagaagaagatgaaggagaatatgaaggagaagcaggttgaggaggagaagattgagatgaacatggaggagaagaagcagaatctggttgaggatgaaggtagtcaacaggaggaaagtgaagaggaggacggtgaagatggggaaattggagaggaggaaggtgaagatggggcaattggagatgctaaagtggggggagatggagacaaggaaagtgctaaaaggggggggataaaggttgctgtcagaagaaatgttttgactcctttgaacatcaatttgatgttacagaacatcaacaacgatgagattctcaaacttcttgttaaaagaaatgaagacactgatggtacagaaccgaatcttgacattgacctgattgtcagatgtttctttgcggtgagcagtgttgctgagtttggcaaggataagaagaaactgatatcagggtgtacaactgtgctaatggttgttttcttggaccatctcgtggaaaaccctttggatcctttgaccatccctaggatcaacttgtatacttcagattttatcgcagacctgataatggtacccaaggatagccctggccctgaaaaaaagcgtcgtaagactcaagatgaaaaagaagactagtaatgttataaagaatctcgctactctcaattttaagaattcggaggatacatgctatcatgaagattcagaaatggtgccaagtccagggagagcatcgccggttgttgcttctgtacaatctcataagaactttgttgatcatgcagatttagaaattgtgccatctcatgagaactctgttgatctacatagtgtttacatggcacatgtattggaaagaagcagacaaagcatagtagtggacatattggactacaatatacctgaatctacttttgcagattgtttgctacctacaggtcatatgcacacagatgtattttatttacaatgccaactgttgtcaaaggattggaaggataaagtaattcttagctggaaagctactcaagaactgattcatcaagatattggagttaaggagctggacaaggaacttactgcagagatatttattcctatcattcatgccggtcactggtcccttgttattctttccactgccaaacaagagacatatatccttgactcctacccaaggcacagtggggtggccaaggatgttttaactcaactgcagaagtatttggataataaacacaactttgacatgtctaactacactgaccatgtgccacctgttcagcatcaaaaaaacaattacgattgtggctttcatgttttattgtatattgaagaattcatgaaggagaagatgtataaaatcaacaaaaaaatggtgttgaaattcagaaagcagctttgcatgaatctcttgtaccatcctttgaacagaataaatcttgtggaattcagaaagaagctgggtattacattgaaaagaaaacttcctggtatacttgatcttactattgaaggtgagaggagtgaatctgaggctgcagtgataattgaaatagagaacagagatgataagactctagaggatgaacatatttcagttgagaaagagtaaggtaaaaaagaagagcatgtactatcaactgacacaaagaatgacgaagcttcatccccatctgacgaagagcctgagcagagtgagtcatctgagcagactgtgtatgaaagatggatgattccaaaggatcattatcacctgagaaagagcaagctggagaaaaatatcctcaaacgaaaaaagaggttgggcaaagacaacatgtcctctcaggatatgatttctccagtgtttggcaagaggcttgtgcctgcaaacacacattttacctctcttaggaagttgcgaaaacacaagtttacgtctgataagatcaacgatgagatctgcaaacatatcttgaactacaatgaacgggagttgttaagtgtggggcagactaccatgactgggggtcagctggaaaagtacgtaaatgaaggtgacaatggtgataaaatactcagagcattcatcacatgcttcacttgtgatgaaaagttcaatcaagggaacatcacaaccgtcatcccgccacatgaagtatccgaagagggtgaactctccaaagttgatgctgcacaacttgtagaagaaatcaaagctgtactcaaaggcaccaatgttgcacgtgtacgcaaagacaccgaatccaccaaagatcccaaagtgaaagtctttcgaaacatgaggaggacatttatattttttcctttctacaagaatgaagaattgtttgtatttcatgtcgatacgaaaagactacccatcattgatgctctgttttgcaagatgtcatcattgtcgtttgaagatagatcctgactaggaaagtctatcatgggctgtctactcaaagccatgaaggattccggcttcatggtgaaaaaatatggtgattgtaggttcacagttactgtaactgaactcgaattcaaagatagtgcctcagcgctcataagttttattgagaacttcacttctaagttggacgacaatgccaagaaactgaaaaagggtgacaaggactggctggaaccttacaagaagtcgacagtggcataccttgtttgtcacactgaaaataaggtggtgttgcctgacgatattgtgaagtacaagcaaaacaagtgaggtggttgagtcgttaatgggtccagtggctgtgttttaagacttgtatcacactacttgtatggctttattctctgaagctgttccattgttgccgttagtaacaggtgttgcttttgtctctgctcagtgggtgattcatttcatccagagttgctgcaactttaatcagtctatagtgttgggttcctagctcagtgttgagttctaaatgatcgtgttgtgttcctaccaagtgttgagctgcacgacggcgtgcgcagccgcagccgcaccggcgaggagcgtttagaactctgttgatctacatagtgtttacaccggctcaacagagttctcatgttgatttttgaaggacccacgtgttgggttcctgctcagtgttgagttctgaacgatagtgttatgttccatgggcccttgttgatttcgagaggacccacgggccgaacggcgtgtcactttcatgcgtctatagtgttgggttcctgtctagtgttgagttctcaactatggtgttgtgttcctccaagaagttgagtttcaggggcctattatattgtctcagttaatgggtaactcagttaatcctatatattgtgtcagttaatgggaactcagttaatggtatatgttgtctcagttaatg

SEQ ID NO: 203349 - DNA, 9012 bp, Zea Mays
attgagacacagacagagcagctgagcaccgcacacacggacgccataccctagattggagcgcaccacgggcgccggcggccggcggcccgccaccggtgattgacgccccctcctcggtccccagcgcggcgagcaggctatttgaggagatgccgtcattgtcatccttactctctggctccaatactgcgagtgctgagcttcctctaatcccttgcaagctctgcaatggggtggtgattgagcgggtctccaaacaaccagaaaccacgtcgaggaagttctaccggtgcagagccaagaaaacggatgggtcttaatgtgattttttccactggcaagcgagctatgttgttttgttaatcgaggatgggtttgtcagtggtgatcgacgccttgagttgttaatgatcgcacttaatgatcatggcaaagccgttgaatctctaaccaattccatcagagagatgaagaaaaagctgtccaacctggagttagtgatggaagagctggataacgtgaaaaatttgatgaaggcagccatggttgaaattgaggaaaacaagaaatcgacagctgctgcattgaaactgatggagaatgagctgcaaaagctgaaagggtcaactaaagtgaaacctaggaatatggcacagtgttttctgcttttggcattgattgggtgtgttatgttccatgtcccgtgtcactttctggagtctaccgtggtgctcctgctaagtgttgagtcggatgttgattttgggaggacccacgggcgaagggcgtgtcactttcatgaggtatagtgttgggttccttctcagtgtagcgttccttcaaggtgttgagttttagggtcccatgttgatttttgggaggacccacggtccgaagcccgtgtcactttccggagtccacagtgttgcgctctgaatgctagtgttaggttccatgtcccgtgtcactttctggagtctactgtggggctactgctaagtgttgagtcagattggcggatgttgattttgggaggacccactggcgaaccccgtgtcactttcataagttcatagtgttgagttctggaaggtagtgttacgttccatgtcccgtgtcacttctaggagtctacagtgttgcgttcctgatcagtgttgagctctaaacgatggtgttgcgttgctgatcagtattgagttgggcgcatgttgattttgggaggacccacgggccaacgacgtgtcactttcatgagttataagtgtcgggttccaggtcagtgttgggttctgaacgatggtgttgcgttcctccaaggtgttgagtttcaggggcccatgttgatttttgaaggacccacgggccgaaccccgtgtcactttcatgaggtatagtgttgggttccttatcagagttgcgttcggatatatagagttgtgttcctccaatctgtgctgggtttcagggttccatgttgatttttgggaggacccgcggtcggaagcccgtgtcactttccggagtctacagcgttgcgttctgaatgctagtgttatgttccatgtcccgtgtcactttctggagtctaccgtggcgctcctgctaagtgttgagtcggatgggcggatgttgattttgggaggacccacgggtgaagggtgtgtccctttcatgcggtatagtgttgggttccttatcagtgttgcgttccttcaaggcgttgagtttcagggtcccatgttgatttttgggaggacccacggtccgaagcccgtgtcactttccggtgtctacagtgttgcgctctgaatgcttgtgttaggttccatgtcccatgtcactttctggagtctaccgtggggctcctgctaagtgttgattcggatgggcggatgttgattttgggataggactgggcgttcgggttacccgattagttcgggtcgggtagttcgggttttgataaattcgggtaatagaaactaatacccgatcacagctttaaaaacccgcgacccgtaatttcgggtacccgtaatttcgggttcgggtttgggtatacccaatttacccgaaatatataaagcacatgcgagggcgcgtttggctggtggcgcggcggcttgacagcgaggctgcgtacgcgtgtggccgcctggccgctaggtagtgcagcggcttgccggcgagggcgctgtccgctgtctgcgcttggtcgcctggccggtggcgcgacggcttgccggtgaggcagcctgttcgctgtacgcctgtccgctgtctgcgcgtggccgcctgtccgcctggccggtggccgcctgtccgctgtacggctgtacgcgcttcggcgcttggctgcctggcgcctggtgtgtggttgctagttaccgttgtgccttgttgtgagttgctgttgccgccatgccttgctgttgccggagaacaaagatctgaagtgctccttgctctggagtactagccttgaagttgcaggtggcgatagccgatggggattgggggacgtcgtagccaacgctggacaaggcagcggctgtggggctagcgttgtgcctggacgatgttggttatttcgggtcgaatgggtacttcgggtaccgcgggttaatacccgattaggcccgaacttagttcgggtatttagtttcgttacccgctagagctgttcgggtaacgggcttcgggctaaacgggtacgggttcgggtatttcgggtatagggcttcgggctcgggttttatgcccagatctattttgggatgacccacgggcgaacccccgtgtcactttcatgagttcacagtgttgagttctgaaggtagtgttacgttccatgtcccgtgtcactttcaggagtctacagcgttgcgttcctgatcagtgttgagctctaaacgatggtgttgcattgctgatcagtattgagttgggcgcatgttgattttgggaggacccacgggcgaacgatgtgtcactttcatgagttagtgtcgggttccaggttgagtttcggggggccatgttgattttttgaaggactcacgggccgaacctcgtgtcactttcattaggtatagtgttgggttccttctcaatgtggcgttcggaactatggtgttgcgttcctccaatctgttgggtttcagggtcccatgttgatttttgggaggacccgcggtccgaagcccgtgtaactttccggagtctacagtgttgcattctgaaaagcagtgttaggttccatgtacagtgttggagtctaccatggggctcctgctaagtgttgagtcagatgggcagatgttggttttgggaggacccacgggcgaagggcgtgtcactttcatgcggtatagtgttgcgttcctccaatctgttgggtttcagggtcccatgttgatttttgggaggacccgcgggttccatgttgattttttggaggacccgtggtccgtagtccgtgtcactttccggagtctacagtgttgcgttctgaatgctagtgttatgttccataacccgtgtcactttctggagtctaccgtggggctccttctaagtgttgagtcggatgggcggatgttggttttgggaggacccacgggcgaacgacggtcccatgttgatttttggcaggacccgcagtctgaagcccgtgtcactttccggagtctacagtgttgcgttctgaatactagtgttatgttccatgtcccgtgtcactttctggagtctaccgtggcgctcctgctaagtgttgagtcagatttgcggatgttgattttgggaggacccacgggtgaagggcgtgtcactttcatgaggtatagtgttgggctccttctcagtgttgtgttcggaactatgctgttgcgttccttcaaggtgttgagtttcagggtcccatgttgatttttgggagttatagtgttgagtttcagggtcccttttagactggaaaagtcttctgccataatcgtcagatttacctaaatgatgtaaaaaatggtttggaaaactctaaaacattaaataaagatcacataacattaattaataaaaaatgatataatacacaaacattaagtaagaattatagaaagttgaggcaccagtttgtatgcaggattcttcctcctaagatgtggaaagctaattagttttaaaccataatccacctcaatatatatgaattaaagtgcatagatgtggcaacaacgttgaagataaacatctatttgtacagcaaacgcaggcttcccaaagcggcatggtcagttcgagctcgccctggggatgccgccgctctgcccatcgcagacgccgtggagcatcgacggcgacgtcgcaggacatgaggtcgcctaccagctggtgacccgaaacacccaggcggcccgccgccacgtcgagataacggccctgacggtgccgacattttggggcagcgggcattgcccggagccgctcgtcatcctaagaaagggcagcacggtggcctgctacggctacccccggagccactcgtcgtccatgaaaagggcgacgaactggcctggcaagatctggcggcgcggggatcgaatggacggacgacaagagcgagcgaagaagtcctggcggcttggtgagaaaatggtggcgctgggggcgatgggaacggaggtgcggatggtggcagcagtggagtgagcgagcgtggcctggtttcttcttgaggaaatggcattgcagaggcgatgggaatggagatgcgaatggggggaggagttgccgtgccgacggccgaccgcgatttttttgggaagaatcgtgagaagggataacacacagagagaaaaatgagtgttaccttcgcgttacaggaatgaagcgacggcgacgtcgagactgattgtcgtcgtccgcggccatggggcggagcaccttccggagaagtcgagacttatacgattaaaaaaggtaggcgaagagtcggcgcagcatttcacacgcagtagtgactgacacctggatggttggattagtggcacggacaaacgatcttacggctacggaaatttggacgatgtgtccaccttcgtttgcgagcagcggaccctggtttgatatattaaaaaaaggcagccgaagagtcggcgcagcatttcacacgcagtagtgagtgacacctggatggttggattagtggcacggacaaacgatcttacggctacggaaatttggacgacgtgtccaccctcgtttgcgagtagcggaccctggtttaatatatagaaatagtgttgagttctcaacactgtatactcctgaaagtgacacgggcccatggaatgtgacactatcgttcagaactcatgaaagtgacacgttgttcggtgtgaaagtgttgatttagggtttagtgtaaccgcccgttcggtgtggaagtgttcaaatttctctacgcgcgttcggtagcctcaccgacggcgacggcgacctcacctcaccgacggcgacggcctcggcgacggcgacaacgatccccaattctcttcgcgacctgaccgtctccacttcggggtgaagaagaaagccaacatgccacaggggaagagtaagaagaacgtggtgaaggagaaagccaaaaagattaagaagaacgcggaatcgagagccaaagttcatgaaaatacagatcaaattgagatcaacattagagaaggtgtttcaatttggataacaaaggctgcagtgcaaaaatgttttgagtttccccctggtacagataagaagctgccaatagatccaactacaaaaacatttgattcactctacagagtattgagtgtttcagaaaaaaaaatcaatgtaaagaagaagaagatgaaggagaatatgaaggagaagcaggttgaggaggagaagattgagatgaacatggaggagaagaagcagaatctggttgaggatgaaggtagtcaacaggaggaaagtgaagaggaggacggtgaagatggggaaattggagaggaggaaggtgaagatggggcaattggagatgctaaagtggggggagatggagacaaggaaagtgctaaaaggggggggataaaggttgctgtcagaagaaatgttttgactcctttgaacatcaatttgatgttacagaacatcaacaacgatgagattctcaaacttcttgttaaaagaaatgaagacactgatggtacagaaccgaatcttgacattgacctgattgtcagatgtttctttgcggtgagcagtgttgctgagtttggcaaggataagaagaaactgatatcagggtgtacaactgtgctaatggttgttttcttggaccatctcgtggaaaaccctttggatcctttgaccatccctaggatcaacttgtatacttcagattttatcgcagacctgataatggtacccaaggatagccctggccctgaaaaaaagcgtcgtaagtttaagaattcggaggatacatgctatcatgaagattcagaaatggtgccaagtccagggagagcatcgccggttgttgcttctgtacaatctcataagaactttgttgatcatgcagatttagaaattgtgccatctcatgagaactctgttgatctacatagtgtttacatggcacatgtattggaaagaagcagacaaagcatagtagtggacatattggactacaatatacctgaatctacttttgcagattgtttgctacctacaggtcatatgcacacagatgtattttatttacaatgccaactgttgtcaaaggattggaaggataaagtaattcttagctggaaagctactcaagaactgattcatcaagatattggagttaaggagctggacaaggaacttactgcagaggttatgaacaaagtggatctggtttgtgctttgttttatattacagtagagttttttcagattgacagtagagtttgtgctttttttagatatttattcctatcattcatgccggtcactggtcccttgttattctttccactgccaaacaagagacatatatccttgactcctacccaaggcacagtggggtggccaaggatgttttaactcaactgcagaagtatttggataataaacacaactttgacatgtctaactacactgaccatgtgccacctgttcagcatcaaaaaaacaattacgattgtggctttcatgttttattgtatattgaagaattcatgaaggagaagatgtataaaatcaacaaaaaaatggtgttgaaattcagaaagcagctttgcatgaatctcttgtaccatcctttgaacagaataaatcttgtggaattcagaaagaagctgggtattacattgaaaagaaaacttcctggtatacttgatcttactattgaaggtgagaggagtgaatctgaggctgcagtgataattgaaatagagaacagagatgataagactctagaggatgaacatatttcagttgagaaagagaagttgcgaaaacacaagtttacgtctgataagatcaacgatgagatctgcaaacatatcttgaactacaatgaacgggagttgttaagtgtggggcagactaccatgactgggggtcagctggaaaagtacgtaaatgaaggtgacaatggtgataaaatactcagagcattcatcacatgcttcacttgtgatgaaaagttcaatcaagggaacatcacaaccgtcatcccgccacatgaagtatccgaagagggtgaactctccaaagttgatgctgcacaacttgtagaagaaatcaaagctgtactcaaaggcaccaatgttgcacgtgtacgcaaagacaccgaatccaccaaagatcccaaagtgaaagtctttcgaaacatgaggaggacatttatattttttcctttctacaagaatgaagaattgtttgtatttcatgtcgatacgaaaagactacccatcattgatgctctgttttgcaagatgtcatcattgtcgtttgaagatagatcctgactaggaaagtctatcatgggctgtctactcaaagccatgaaggattccggcttcatggtgaaaaaatatggtgattgtaggttcacagttactgtaactgaactcgaattcaaagatagtgcctcagcgctcataagttttattgagaacttcacttctaagttggacgacaatgccaagaaactgaaaaagggtgacaaggactggctggaaccttacaagaagtcgacagtggcataccttgtttgtcacactgaaaataaggtggtgttgcctgacgatattgtgaagtacaagcaaaacaagtgaggtggttgagtcgttaatgggtccagtggctgtgttttaagacttgtatcacactacttgtatggctttattctctgaagctgttccattgttgccgttagtaacaggtgttgcttttgtctctgctcagtgggtgattcatttcatccagagttgctgcaactttaatcagtctatagtgttgggttcctagctcagtgttgagttctaaatgatcgtgttgtgttcctaccaagtgttgagctgcacgacggcgtgcgcagccgcagccgcaccggcgaggagcgtttagaactctgttgatctacatagtgtttacaccggctcaacagagttctcatgttgatttttgaaggacccacgtgttgggttcctgctcagtgttgagttctgaacgatagtgttatgttccatgggcccttgttgatttcgagaggacccacgggccgaacggcgtgtcactttcatgcgtctatagtgttgggttcctgtctagtgttgagttctcaactatggtgttgtgttcctccaagaagttgagtttcaggggcctattatattgtctcagttaatgggtaactcagttaatcctatatattgtgtcagttaatgggaactcagttaatggtatatgttgtctcagttaatg

SEQ ID NO: 203350 - DNA, 8143 bp, Zea Mays
attgagacacagacagagcagctgagcaccgcacacacggacgccataccctagattggagcgcaccacgggcgccggcggccggcggcccgccaccggtgattgacgccccctcctcggtccccagcgcggcgagcaggctatttgaggagatgccgtcattgtcatccttactctctggctccaatactgcgagtgctgagcttcctctaatcccttgcaagctctgcaatggggtggtgattgagcgggtctccaaacaaccagaaaccacgtcgaggaagttctaccggtgcagagccaagaaaacggatgggtcttaatgtgattttttccactggcaagcgagctatgttgttttgttaatcgaggatgggtttgtcagtggtgatcgacgccttgagttgttaatgatcgcacttaatgatcatggcaaagccgttgaatctctaaccaattccatcagagagatgaagaaaaagctgtccaacctggagttagtgatggaagagctggataacgtgaaaaatttgatgaaggcagccatggttgaaattgaggaaaacaagaaatcgacagctgctgcattgaaactgatggagaatgagctgcaaaagctgaaagggtcaactaaagtgaaacctaggaatatggcacagtgttttctgcttttggcattgattgggtggtttgtggtgggacagatgaattggggggaggaagcatccagccgatttctgctgagaggctaatgaacataggatggacttttcaatagctagatgtaatcagaactggtttatattttctctgctaacatggcgtagtagccaggacactttgcttgtcgattattatttttagcaagatgttggtgtgaagttggaaaggcttcccacggtccgaagcccgtgtcactttccagagtctacagtgttgcgttctgaatgctagtgttatgttccatgtcccgtgtcactttctggagtctaccgtggtgctcctgctaagtgttgagtcggatgttgattttgggaggacccacgggcgaagggcgtgtcactttcatgaggtatagtgttgggttccttctcagtgtagcgttccttcaaggtgttgagttttagggtcccatgttgatttttgggaggacccacggtccgaagcccgtgtcactttccggagtccacagtgttgcgctctgaatgctagtgttaggttccatgtcccgtgtcactttctggagtctactgtggggctactgctaagtgttgagtcagattggcggatgttgattttgggaggacccactggcgaaccccgtgtcactttcataagttcatagtgttgagttctggaaggtagtgttacgttccatgtcccgtgtcacttctaggagtctacagtgttgcgttcctgatcagtgttgagctctaaacgatggtgttgcgttgctgatcagtattgagttgggcgcatgttgattttgggaggacccacgggccaacgacgtgtcactttcatgagttataagtgtcgggttccaggtcagtgttgggttctgaacgatggtgttgcgttcctccaaggtgttgagtttcaggggcccatgttgatttttgaaggacccacgggccgaaccccgtgtcactttcatgaggtatagtgttgggttccttatcagagttgcgttcggatatatagagttgtgttcctccaatctgtgctgggtttcagggttccatgttgatttttgggaggacccgcggtcggaagcccgtgtcactttccggagtctacagcgttgcgttctgaatgctagtgttatgttccatgtcccgtgtcactttctggagtctaccgtggcgctcctgctaagtgttgagtcggatgggcggatgttgattttgggaggacccacgggtgaagggtgtgtccctttcatgcggtatagtgttgggttccttatcagtgttgcgttccttcaaggcgttgagtttcagggtcccatgttgatttttgggaggacccacgtgttggagtctaccatggggctcctgctaagtgttgagtcagatgggcagatgttggttttgggaggacccacgggcgaagggcgtgtcactttcatgcggtatagtgttgcgttcctccaatctgttgggtttcagggtcccatgttgatttttgggaggacccgcggtccgtagtccgtgtcactttccggagtctacagtgttgcgttctgaatgctagtgttatgttccataacccgtgtcactttctggagtctaccgtggggcccttctaagtgttgagtcggatggggggatgttggttttcggaggacccacgggcgaagggcgtgtcactttcatgcggtatagtgttgtgttccttcatctgttgcgtttcagggttccatgttgattttttggaggacccgtggtccgtagtccgtgtcactttccggagtctacagtgttgcgttctgaatgctagtgttatgttccataacccgtgtcactttctggagtctaccgtggggctccttctaagtgttgagtcggatgggcggatgttggttttgggaggacccacgggcgaacgacgtgtcactttcatgagttcgtagtgttgagttccatatcccgtgtcactttcaggagtatatagtgttgcgttcctgatccatgttgagttctaaacgatggtgtggcgttcctaatcagtattgagttgggcgcatgttgattttgggaggacccacgggcgaacgacgtgtcactttcatgagttatagtgttgatttttgaaggacccacgagccgaaccccgtgtcactttcatgaggtatagtgttgggttcgtgctcagtgtggcgttcgacactatggtgttgcgttcctccaatctgttgggtttcagggtcccatgttgatttttggcaggacccgcagtctgaagcccgtgtcactttccggagtctacagtgttgcgttctgaatactagtgttatgttccatgtcccgtgtcactttctggagtctaccgtggcgctcctgctaagtgttgagtcagatttgcggatgttgattttgggaggacccacgggtgaagggcgtgtcactttcatgaggtatagtgttgggctccttctcagtgttgtgttcggaactatgctgttgcgttccttcaaggtgttgagtttcagggtcccatgttgatttttgggagttatagtgttgagtttcagggtcccttttagactggaaaagtcttctgccataatcgtcagatttacctaaatgatgtaaaaaatggtttggaaaactctaaaacattaaataaagatcacataacattaattaataaaaaatgatataatacacaaacattaagtaagaattatagaaagttgaggcaccagtttgtatgcaggattcttcctcctaagatgtggaaagctaattagttttaaaccataatccacctcaatatatatgaattaaagtgcatagatgtggcaacaacgttgaagataaacatctatttgtacagcaaacgcaggcttcccaaagcggcatggtcagttcgagctcgccctggggatgccgccgctctgcccatcgcagacgccgtggagcatcgacggcgacgtcgcaggacatgaggtcgcctaccagctggtgacccgaaacacccaggcggcccgccgccacgtcgagataacggccctgacggtgccgacattttggggcagcgggcattgcccggagccgctcgtcatcctaagaaagggcagcacggtggcctgctagtacgtgacgggatctggcagcgcagggaacggagggacagacggcaagagcatgcaccacatcgacgtgaacatggagtgagcgagccaacggagaaatggcgatgggaatggaggtgcagctggtgggagcagttggcacgccgatgaccggacgaagcaagtgaggcaagggatggacgtcgcacttcaatacgtgcctggcggcaccgacattccgatgcagcggctacccccggagccactcgtcgtccatgaaaagggcgacgaactggcctggcaagatctggcggcgcggggatcgaatggacggacgacaagagcgagcgaagaagtcctggcggcttggtgagaaaatggtggcgctgggggcgatgggaacggaggtgcggatggtggcagcagtggagaatgaagcgacggcgacgtcgagactgattgtcgtcgtccgcggccatggggcggagcaccttccggagaagtcgagacttatacgattaaaaaagggaaccgcctcaccgattctgatgtcgaaggtaacctggtgccgatccgcaggggtgaagaagaaagccaacatgccacaggggaagagtaagaagaacgtggtgaaggagaaagccaaaaagattaagaagaacgcggaatcgagagccaaagttcatgaaaatacagatcaaattgagatcaacattagagaaggtgtttcaatttggataacaaaggctgcagtgcaaaaatgttttgagtttccccctggtacagataagaagctgccaatagatccaactacaaaaacatttgattcactctacagagtattgagtgtttcagaaaaaaaaatcaatgtaaagaagaagaagatgaaggagaatatgaaggagaagcaggttgaggaggagaagattgagatgaacatggaggagaagaagcagaatctggttgaggatgaaggtagtcaacaggaggaaagtgaagaggaggacggtgaagatggggaaattggagaggaggaaggtgaagatggggcaattggagatgctaaagtggggggagatggagacaaggaaagtgctaaaaggggggggataaaggttgctgtcagaagaaatgttttgactcctttgaacatcaatttgatgttacagaacatcaacaacgatgagattctcaaacttcttgttaaaagaaatgaagacactgatggtacagaaccgaatcttgacattgacctgattgtcagatgtttctttgcggtgagcagtgttgctgagtttggcaaggataagaagaaactgatatcagggtgtacaactgtgctaatggttgttttcttggaccatctcgtggaaaaccctttggatcctttgaccatccctaggatcaacttgtatacttcagattttatcgcagacctgataatggtacccaaggatagccctggccctgaaaaaaagcgtcgtaagactcaagatgaaaaagaagactagtaatgttataaagaatctcgctactctcaattttaagaattcggaggatacatgctatcatgaagattcagaaatggtgccaagtccagggagagcatcgccggttgttgcttctgtacaatctcataagaactttgttgatcatgcagatttagaaattgtgccatctcatgagaactctgttgatctacatagtgtttacatggcacatgtattggaaagaagcagacaaagcatagtagtggacatattggactacaatatacctgaatctacttttgcagattgtttgctacctacaggtcatatgcacacagatgtattttatttacaatgccaactgttgtcaaaggattggaaggataaagtaattcttagctggaaagctactcaagaactgattcatcaagatattggagttaaggagctggacaaggaacttactgcagaggttatgaacaaagtggatctggtttgtgctttgttttatattacagtagagttttttcagattgacagtagagtttgtgctttttttagatatttattcctatcattcatgccggtcactggtcccttgttattctttccactgccaaacaagagacatatatccttgactcctacccaaggcacagtggggtggccaaggatgttttaactcaactgcagaagtatttggataataaacacaactttgacatgtctaactacactgaccatgtgccacctgttcagcatcaaaaaaacaattacgattgtggctttcatgttttattgtatattgaagaattcatgaaggagaagatgtataaaatcaacaaaaaaatggtgttgaaattcagaaagcagctttgcatgaatctcttgtaccatcctttgaacagaataaatcttgtggaattcagaaagaagctgggtattacattgaaaagaaaacttcctggtatacttgatcttactattgaaggtgagaggagtgaatctgaggctgcagtgataattgaaatagagaacagagatgataagactctagaggatgaacatatttcagttgagaaagagtaaggtaaaaaagaagagcatgtactatcaactgacacaaagaatgacgaagcttcatccccatctgacgaagagcctgagcagagtgagtcatctgagcagactgtgtatgaaagatggatgattccaaaggatcattatcacctgagaaagagcaagctggagaaaaatatcctcaaacgaaaaaagaggttgggcaaagacaacatgtcctctcaggatatgatttctccagtgtttggcaagaggcttgtgcctgcaaacacacattttacctctcttaggaagttgcgaaaacacaagtttacgtctgataagatcaacgatgagatctgcaaacatatcttgaactacaatgaacgggagttgttaagtgtggggcagactaccatgactgggggtcagctggaaaagtacgtaaatgaaggtgacaatggtgataaaatactcagagcattcatcacatgcttcacttgtgatgaaaagttcaatcaagggaacatcacaaccgtcatcccgccacatgaagtatccgaagagggtgaactctccaaagttgatgctgcacaacttgtagaagaaatcaaagctgtactcaaaggcaccaatgttgcacgtgtacgcaaagacaccgaatccaccaaagatcccaaagtgaaagtctttcgaaacatgaggaggacatttatattttttcctttctacaagaatgaagaattgtttgtatttcatgtcgatacgaaaagactacccatcattgatgctctgttttgcaagatgtcatcattgtcgtttgaagatagatcctgactaggaaagtctatcatgggctgtctactcaaagccatgaaggattccggcttcatggtgaaaaaatatggtgattgtaggttcacagttactgtaactgaactcgaattcaaagatagtgcctcagcgctcataagttttattgagaacttcacttctaagttggacgacaatgccaagaaactgaaaaagggtgacaaggactggctggaaccttacaagaagtcgacagtggcataccttgtttgtcacactgaaaataaggtggtgttgcctgacgatattgtgaagtacaagcaaaacaagtgaggtggttgagtcgttaatgggtccagtggctgtgttttaagacttgtatcacactacttgtatggctttattctctgaagctgttccattgttgccgttagtaacaggtgttgcttttgtctctgctcagtgggtgattcatttcatccagagttgctgcaactttaatcagtctatagtgttgggttcctagctcagtgttgagttctaaatgatcgtgttgtgttcctaccaagtgttgagctgcacgacggcgtgcgcagccgcagccgcaccggcgaggagcgtttagaactctgttgatctacatagtgtttacaccggctcaacagagttctcatgttgatttttgaaggacccacgtgttgggttcctgctcagtgttgagttctgaacgatagtgttatgttccatgggcccttgttgatttcgagaggacccacgggccgaacggcgtgtcactttcatgcgtctatagtgttgggttcctgtctagtgttgagttctcaactatggtgttgtgttcctccaagaagttgagtttcaggggcctattatattgtctcagttaatgggtaactcagttaatcctatatattgtgtcagttaatgggaactcagttaatggtatatgttgtctcagttaatg

SEQ ID NO: 203351 - DNA, 2687 bp, Zea Mays
attgagacacagacagagcagctgagcaccgcacacacggacgccataccctagattggagcgcaccacgggcgccggcggccggcggcccgccaccggtgattgacgccccctcctcggtccccagcgcggcgagcagattttatcgcagacctgataatggtacccaaggatagccctggccctgaaaaaaagcgtcgtaagactcaagatgaaaaagaagactagtaatgttataaagaatctcgctactctcaattttaagaattcggaggatacatgctatcatgaagattcagaaatggtgccaagtccagggagagcatcgccggttgttgcttctgtacaatctcataagaactttgttgatcatgcagatttagaaattgtgccatctcatgagaactctgttgatctacatagtgtttacatggcacatgtattggaaagaagcagacaaagcatagtagtggacatattggactacaatatacctgaatctacttttgcagattgtttgctacctacaggtcatatgcacacagatgtattttatttacaatgccaactgttgtcaaaggattggaaggataaagtaattcttagctggaaagctactcaagaactgattcatcaagatattggagttaaggagctggacaaggaacttactgcagagatatttattcctatcattcatgccggtcactggtcccttgttattctttccactgccaaacaagagacatatatccttgactcctacccaaggcacagtggggtggccaaggatgttttaactcaactgcagaagtatttggataataaacacaactttgacatgtctaactacactgaccatgtgccacctgttcagcatcaaaaaaacaattacgattgtggctttcatgttttattgtatattgaagaattcatgaaggagaagatgtataaaatcaacaaaaaaatggtgttgaaattcagaaagcagctttgcatgaatctcttgtaccatcctttgaacagaataaatcttgtggaattcagaaagaagctgggtattacattgaaaagaaaacttcctggtatacttgatcttactattgaaggtgagaggagtgaatctgaggctgcagtgataattgaaatagagaacagagatgataagactctagaggatgaacatatttcagttgagaaagagaagttgcgaaaacacaagtttacgtctgataagatcaacgatgagatctgcaaacatatcttgaactacaatgaacgggagttgttaagtgtggggcagactaccatgactgggggtcagctggaaaagtacgtaaatgaaggtgacaatggtgataaaatactcagagcattcatcacatgcttcacttgtgatgaaaagttcaatcaagggaacatcacaaccgtcatcccgccacatgaagtatccgaagagggtgaactctccaaagttgatgctgcacaacttgtagaagaaatcaaagctgtactcaaaggcaccaatgttgcacgtgtacgcaaagacaccgaatccaccaaagatcccaaagtgaaagtctttcgaaacatgaggaggacatttatattttttcctttctacaagaatgaagaattgtttgtatttcatgtcgatacgaaaagactacccatcattgatgctctgttttgcaagatgtcatcattgtcgtttgaagatagatcctgactaggaaagtctatcatgggctgtctactcaaagccatgaaggattccggcttcatggtgaaaaaatatggtgattgtaggttcacagttactgtaactgaactcgaattcaaagatagtgcctcagcgctcataagttttattgagaacttcacttctaagttggacgacaatgccaagaaactgaaaaagggtgacaaggactggctggaaccttacaagaagtcgacagtggcataccttgtttgtcacactgaaaataaggtggtgttgcctgacgatattgtgaagtacaagcaaaacaagtgaggtggttgagtcgttaatgggtccagtggctgtgttttaagacttgtatcacactacttgtatggctttattctctgaagctgttccattgttgccgttagtaacaggtgttgcttttgtctctgctcagtgggtgattcatttcatccagagttgctgcaactttaatcagtctatagtgttgggttcctagctcagtgttgagttctaaatgatcgtgttgtgttcctaccaagtgttgagctgcacgacggcgtgcgcagccgcagccgcaccggcgaggagcgtttagaactctgttgatctacatagtgtttacaccggctcaacagagttctcatgttgatttttgaaggacccacgtgttgggttcctgctcagtgttgagttctgaacgatagtgttatgttccatgggcccttgttgatttcgagaggacccacgggccgaacggcgtgtcactttcatgcgtctatagtgttgggttcctgtctagtgttgagttctcaactatggtgttgtgttcctccaagaagttgagtttcaggggcctattatattgtctcagttaatgggtaactcagttaatcctatatattgtgtcagttaatgggaactcagttaatggtatatgttgtctcagttaatg

SEQ ID NO: 203352 - DNA, 6848 bp, Zea Mays
attgagacacagacagagcagctgagcaccgcacacacggacgccataccctagattggagcgcaccacgggcgccggcggccggcggcccgccaccggtgattgacgccccctcctcggtccccagcgcggcgagcaggctatttgaggagatgccgtcattgtcatccttactctctggctccaatactgcgagtgctgagcttcctctaatcccttgcaagctctgcaatggggtggtgattgagcgggtctccaaacaaccagaaaccacgtcgaggaagttctaccggtgcagagccaagaaaacggatgggtcttaatgtgattttttccactggcaagcgagctatgttgttttgttaatcgaggatgggtttgtcagtggtgatcgacgccttgagttgttaatgatcgcacttaatgatcatggcaaagccgttgaatctctaaccaattccatcagagagatgaagaaaaagctgtccaacctggagttagtgatggaagagctggataacgtgaaaaatttgatgaaggcagccatggttgaaattgaggaaaacaagaaatcgacagctgctgcattgaaactgatggagaatgagctgcaaaagctgaaagggtcaactaaagtgaaacctaggaatatggcacagtgttttctgcttttggcattgattgggtgtgttatgttccatgtcccgtgtcactttctggagtctaccgtggtgctcctgctaagtgttgagtcggatgttgattttgggaggacccacgggcgaagggcgtgtcactttcatgaggacccacgggccgaaccccgtgtcactttcatgaggtatagtgttgggttccttatcagagttgcgttcggatatatagagttgtgttcctccaatctgtgctgggtttcagggttccatgttgatttttgggaggacccgcggtcggaagcccgtgtcactttccggagtctacagcgttgcgttctgaatgctagtgttatgttccatgtcccgtgtcactttctggagtctaccgtggcgctcctgctaagtgttgagtcggatgggcggatgttgattttgggaggacccacgggtgaagggtgtgtccctttcatgcggtatagtgttgggttccttatcagtgttgcgttccttcaaggcgttgagtttcagggtcccatgttgatttttgggaggacccacgtgttggagtctaccatggggctcctgctaagtgttgagtcagatgggcagatgttggttttgggaggacccacgggcgaagggcgtgtcactttcatgcggtatagtgttgcgttcctccaatctgttgggtttcagggtcccatgttgatttttgggaggacccgcgggttccatgttgattttttggaggacccgtggtccgtagtccgtgtcactttccggagtctacagtgttgcgttctgaatgctagtgttatgttccataacccgtgtcactttctggagtctaccgtggggctccttctaagtgttgagtcggatgggcggatgttggttttgggaggacccacgggcgaacgacggtcccatgttgatttttggcaggacccgcagtctgaagcccgtgtcactttccggagtctacagtgttgcgttctgaatactagtgttatgttccatgtcccgtgtcactttctggagtctaccgtggcgctcctgctaagtgttgagtcagatttgcggatgttgattttgggaggacccacggcaaacgcaggcttcccaaagcggcatggtcagttcgagctcgccctggggatgccgccgctctgcccatcgcagacgccgtggagcatcgacggcgacgtcgcaggacatgaggtcgcctaccagctggtgacccgaaacacccaggcggcccgccgccacgtcgagataacggccctgacggtgccgacattttggggcagcgggcattgcccggagccgctcgtcatcctaagaaagggcagcacggtggcctgctacggctacccccggagccactcgtcgtccatgaaaagggcgacgaactggcctggcaagatctggcggcgcggggatcgaatggacggacgacaagagcgagcgaagaagtcctggcggcttggtgagaaaatggtggcgctgggggcgatgggaacggaggtgcggatggtggcagcagtggagaatgaagcgacggcgacgtcgagactgattgtcgtcgtccgcggccatggggcggagcaccttccggagaagtcgagacttatacgattaaaaaaggtaggcgaagagtcggcgcagcatttcacacgcagtagtgactgacacctggatggttggattagtggcacggacaaacgatcttacggctacggaaatttggacgatgtgtccaccttcgtttgcgagcagcggaccctggtttgatatattaaaaaaaggcagccgaagagtcggcgcagcatttcacacgcagtagtgagtgacacctggatggttggattagtggcacggacaaacgatcttacggctacggaaatttggacgacgtgtccaccctcgtttgcgagtagcggaccctggtttaatatatagaaatagtgttgagttctcaacactgtatactcctgaaagtgacacgggcccatggaatgtgacactatcgttcagaactcatgaaagtgacacgttgttcggtgtgaaagtgttgatttagggtttagtgtaaccgcccgttcggtgtggaagtgttcaaatttctctacgcgcgttcggtagcctcaccgacggcgacggcgacctcacctcaccgacggcgacggcctcggcgacggcgacaacgatccccaattctcttcgcgacctgaccgtctccacttcggggtgaagaagaaagccaacatgccacaggggaagagtaagaagaacgtggtgaaggagaaagccaaaaagattaagaagaacgcggaatcgaggtattcactaggatcagtaacaaagttaatccaactccttccacctgctgcccgttagaaaattgtagaccttgatttccaaaacttactcaatctgaagttaggaaacaccaatagagtttttacccactttctcatggatagagccaaagttcatgaaaatacagatcaaattgagatcaacattagagaaggtgtttcaatttggataacaaaggctgcagtgcaaaaatgttttgagtttccccctggtacagataagaagctgccaatagatccaactacaaaaacatttgattcactctacagagtattgagtgtttcagaaaaaaaaatcaatgtaaagaagaagaagatgaaggagaatatgaaggagaagcaggttgaggaggagaagattgagatgaacatggaggagaagaagcagaatctggttgaggatgaaggtagtcaacaggaggaaagtgaagaggaggacggtgaagatggggaaattggagaggaggaaggtgaagatggggcaattggagatgctaaagtggggggagatggagacaaggaaagtgctaaaaggggggggataaaggttgctgtcagaagaaatgttttgactcctttgaacatcaatttgatgttacagaacatcaacaacgatgagattctcaaacttcttgttaaaagaaatgaagacactgatggtacagaaccgaatcttgacattgacctgattgtcagatgtttctttgcggtggtgttggacagactgttgttgccacaagccaccttttatctgagctcagctacattgaaagcagtgactgatctagacagactgaaaacagttgactggtcaattttattttcgaaaatttgaagagcagtgttgctgagtttggcaaggataagaagaaactgatatcagggtgtacaactgtgctaatggttgttttcttggaccatctcgtggaaaaccctttggatcctttgaccatccctaggatcaacttgtatacttcagattttatcgcagacctgataatggtacccaaggatagccctggccctgaaaaaaagcgtcgtaagactcaagatgaaaaagaagactagtaatgttataaagaatctcgctactctcaattttaagaattcggaggatacatgctatcatgaagattcagaaatggtgccaagtccagggagagcatcgccggttgttgcttctgtacaatctcataagaactttgttgatcatgcagatttagaaattgtgccatctcatgagaactctgttgatctacatagtgtttacatggcacatgtattggaaagaagcagacaaagcatagtagtggacatattggactacaatatacctgaatctacttttgcagattgtttgctacctacaggtcatatgcacacagatgtattttatttacaatgccaactgttgtcaaaggattggaaggataaagtaattcttagctggaaagctactcaagaactgattcatcaagatattggagttaaggagctggacaaggaacttactgcagaggttatgaacaaagtggatctggtttgtgctttgttttatattacagtagagttttttcagattgacagtagagtttgtgctttttttagatatttattcctatcattcatgccggtcactggtcccttgttattctttccactgccaaacaagagacatatatccttgactcctacccaaggcacagtggggtggccaaggatgttttaactcaactgcagaagtatttggataataaacacaactttgacatgtctaactacactgaccatgtgccacctgttcagcatcaaaaaaacaattacgattgtggctttcatgttttattgtatattgaagaattcatgaaggagaagatgtataaaatcaacaaaaaaatggtgttgaaattcagaaagcagctttgcatgaatctcttgtaccatcctttgaacagaataaatcttgtggaattcagaaagaagctgggtattacattgaaaagaaaacttcctggtatacttgatcttactattgaaggtgagaggagtgaatctgaggctgcagtgataattgaaatagagaacagagatgataagactctagaggatgaacatatttcagttgagaaagagtaaggtaaaaaagaagagcatgtactatcaactgacacaaagaatgacgaagcttcatccccatctgacgaagagcctgagcagagtgagtcatctgagcagactgtgtatgaaagatggatgattccaaaggatcattatcacctgagaaagagcaagctggagaaaaatatcctcaaacgaaaaaagaggttgggcaaagacaacatgtcctctcaggatatgatttctccagtgtttggcaagaggcttgtgcctgcaaacacacattttacctctcttaggaagttgcgaaaacacaagtttacgtctgataagatcaacgatgagatctgcaaacatatcttgaactacaatgaacgggagttgttaagtgtggggcagactaccatgactgggggtcagctggaaaagtacgtaaatgaaggtgacaatggtgataaaatactcagagcattcatcacatgcttcacttgtgatgaaaagttcaatcaagggaacatcacaaccgtcatcccgccacatgaagtatccgaagagggtgaactctccaaagttgatgctgcacaacttgtagaagaaatcaaagctgtactcaaaggcaccaatgttgcacgtgtacgcaaagacaccgaatccaccaaagatcccaaagtgaaagtctttcgaaacatgaggaggacatttatgtcatcattgtcgtttgaagatagatcctgactaggaaagtctatcatgggctgtctactcaaagccatgaaggattccggcttcatggtgaaaaaatatggtgattgtaggttcacagttactgtaactgaactcgaattcaaagatagtgcctcagcgctcataagttttattgagaacttcacttctaagttggacgacaatgccaagaaactgaaaaagggtgacaaggactggctggaaccttacaagaagtcgacagtggcataccttgtttgtcacactgaaaataaggtggtgttgcctgacgatattgtgaagtacaagcaaaacaagtgaggtggttgagtcgttaatgggtccagtggctgtgttttaagacttgtatcacactacttgtatggctttattctctgaagctgttccattgttgccgttagtaacaggtgttgcttttgtctctgctcagtgggtgattcatttcatccagagttgctgcaactttaatcagtctatagtgttgggttcctagctcagtgttgagttctaaatgatcgtgttgtgttcctaccaagtgttgagctgcacgacggcgtgcgcagccgcagccgcaccggcgaggagcgtttagaactctgttgatctacatagtgtttacaccggctcaacagagttctcatgttgatttttgaaggacccacgtgttgggttcctgctcagtgttgagttctgaacgatagtgttatgttccatgggcccttgttgatttcgagaggacccacgggccgaacggcgtgtcactttcatgcgtctatagtgttgggttcctgtctagtgttgagttctcaactatggtgttgtgttcctccaagaagttgagtttcaggggcctattatattgtctcagttaatgggtaactcagttaatcctatatattgtgtcagttaatgggaactcagttaatggtatatgttgtctcagttaatg

SEQ ID NO: 203353 - DNA, 8544 bp, Zea Mays
attgagacacagacagagcagctgagcaccgcacacacggacgccataccctagattggagcgcaccacgggcgccggcggccggcggcccgccaccggtgattgacgccccctcctcggtccccagcgcggcgagcaggctatttgaggagatgccgtcattgtcatccttactctctggctccaatactgcgagtgctgagcttcctctaatcccttgcaagctctgcaatggggtggtgattgagcgggtctccaaacaaccagaaaccacgtcgaggaagttctaccggtgcagagccaagaaaacggatgggtcttaatgtgattttttccactggcaagcgagctatgttgttttgttaatcgaggatgggtttgtcagtggtgatcgacgccttgagttgttaatgatcgcacttaatgatcatggcaaagccgttgaatctctaaccaattccatcagagagatgaagaaaaagctgtccaacctggagttagtgatggaagagctggataacgtgaaaaatttgatgaaggcagccatggttgaaattgaggaaaacaagaaatcgacagctgctgcattgaaactgatggagaatgagctgcaaaagctgaaagggtcaactaaagtgaaacctaggaatatggcacagtgttttctgcttttggcattgattgggtggtttgtggtgggacagatgaattggggggaggaagcatccagccgatttctgctgagaggctaatgaacataggatggacttttcaatagctagatgtaatcagaactggtttatattttctctgctaacatggcgtagtagccaggacactttgcttgtcgattattatttttagcaagatgttggtgtgaagttggaaaggcttcccacggtccgaagcccgtgtcactttccagagtctacagtgttgcgttctgaatgctagtgttatgttccatgtcccgtgtcactttctggagtctaccgtggtgctcctgctaagtgttgagtcggatgttgattttgggaggacccacgggcgaagggcgtgtcactttcatgaggtatagtgttgggttccttctcagtgtagcgttccttcaaggtgttgagttttagggtcccatgttgatttttgggaggacccacggtccgaagcccgtgtcactttccggagtccacagtgttgcgctctgaatgctagtgttaggttccatgtcccgtgtcactttctggagtctactgtggggctactgctaagtgttgagtcagattggcggatgttgattttgggaggacccactggcgaaccccgtgtcactttcataagttcatagtgttgagttctggaaggtagtgttacgttccatgtcccgtgtcacttctaggagtctacagtgttgcgttcctgatcagtgttgagctctaaacgatggtgttgcgttgctgatcagtattgagttgggcgcatgttgattttgggaggacccacgggccaacgacgtgtcactttcatgagttataagtgtcgggttccaggtcagtgttgggttctgaacgatggtgttgcgttcctccaaggtgttgagtttcaggggcccatgttgatttttgaaggacccacgggccgaaccccgtgtcactttcatgaggtatagtgttgggttccttatcagagttgcgttcggatatatagagttgtgttcctccaatctgtgctgggtttcagggttccatgttgatttttgggaggacccgcggtcggaagcccgtgtcactttccggagtctacagcgttgcgttctgaatgctagtgttatgttccatgtcccgtgtcactttctggagtctaccgtggcgctcctgctaagtgttgagtcggatgggcggatgttgattttgggaggacccacgggtgaagggtgtgtccctttcatgcggtatagtgttgggttccttatcagtgttgcgttccttcaaggcgttgagtttcagggtcccatgttgatttttgggaggacccacgtgttggagtctaccatggggctcctgctaagtgttgagtcagatgggcagatgttggttttgggaggacccacgggcgaagggcgtgtcactttcatgcggtatagtgttgcgttcctccaatctgttgggtttcagggtcccatgttgatttttgggaggacccgcggtccgtagtccgtgtcactttccggagtctacagtgttgcgttctgaatgctagtgttatgttccataacccgtgtcactttctggagtctaccgtggggcccttctaagtgttgagtcggatggggggatgttggttttcggaggacccacgggcgaagggcgtgtcactttcatgcggtatagtgttgtgttccttcatctgttgcgtttcagggttccatgttgattttttggaggacccgtggtccgtagtccgtgtcactttccggagtctacagtgttgcgttctgaatgctagtgttatgttccataacccgtgtcactttctggagtctaccgtggggctccttctaagtgttgagtcggatgggcggatgttggttttgggaggacccacgggcgaacgacgtgtcactttcatgagttcgtagtgttgagttccatatcccgtgtcactttcaggagtatatagtgttgcgttcctgatccatgttgagttctaaacgatggtgtggcgttcctaatcagtattgagttgggcgcatgttgattttgggaggacccacgggcgaacgacgtgtcactttcatgagttatagtgttgatttttgaaggacccacgagccgaaccccgtgtcactttcatgaggtatagtgttgggttcgtgctcagtgtggcgttcgacactatggtgttgcgttcctccaatctgttgggtttcagggtcccatgttgatttttggcaggacccgcagtctgaagcccgtgtcactttccggagtctacagtgttgcgttctgaatactagtgttatgttccatgtcccgtgtcactttctggagtctaccgtggcgctcctgctaagtgttgagtcagatttgcggatgttgattttgggaggacccacggcaaacgcaggcttcccaaagcggcatggtcagttcgagctcgccctggggatgccgccgctctgcccatcgcagacgccgtggagcatcgacggcgacgtcgcaggacatgaggtcgcctaccagctggtgacccgaaacacccaggcggcccgccgccacgtcgagataacggccctgacggtgccgacattttggggcagcgggcattgcccggagccgctcgtcatcctaagaaagggcagcacggtggcctgctagtacgtgacgggatctggcagcgcagggaacggagggacagacggcaagagcatgcaccacatcgacgtgaacatggagtgagcgagccaacggagaaatggcgatgggaatggaggtgcagctggtgggagcagttggcacgccgatgaccggacgaagcaagtgaggcaagggatggacgtcgcacttcaatacgtgcctggcggcaccgacattccgatgcagcggctacccccggagccactcgtcgtccatgaaaagggcgacgaactggcctggcaagatctggcggcgcggggatcgaatggacggacgacaagagcgagcgaagaagtcctggcggcttggtgagaaaatggtggcgctgggggcgatgggaacggaggtgcggatggtggcagcagtggagtgagcgagcgtggcctggtttcttcttgaggaaatggcattgcagaggcgatgggaatggagatgcgaatggggggaggagttgccgtgccgacggccgaccgcgatttttttgggaagaatcgtgagaagggataacacacagagagaaaaatgagtgttaccttcgcgttacaggaatgaagcgacggcgacgtcgagactgattgtcgtcgtccgcggccatggggcggagcaccttccggagaagtcgagacttatacgattaaaaaaggtaggcgaagagtcggcgcagcatttcacacgcagtagtgactgacacctggatggttggattagtggcacggacaaacgatcttacggctacggaaatttggacgatgtgtccaccttcgtttgcgagcagcggaccctggtttgatatattaaaaaaaggcagccgaagagtcggcgcagcatttcacacgcagtagtgagtgacacctggatggttggattagtggcacggacaaacgatcttacggctacggaaatttggacgacgtgtccaccctcgtttgcgagtagcggaccctggtttaatatatagaaatagtgttgagttctcaacactgtatactcctgaaagtgacacgggcccatggaatgtgacactatcgttcagaactcatgaaagtgacacgttgttcggtgtgaaagtgttgatttagggtttagtgtaaccgcccgttcggtgtggaagtgttcaaatttctctacgcgcgttcggtagcctcaccgacggcgacggcgacctcacctcaccgacggcgacggcctcggcgacggcgacaacgatccccaattctcttcgcgacctgaccgtctccacttcggtaaacccaccttcccttctctcctcgttccttgtcagggaaccgcctcaccgattctgatgtcgaaggtaacctggtgccgatccgcaggggtgaagaagaaagccaacatgccacaggggaagagtaagaagaacgtggtgaaggagaaagccaaaaagattaagaagaacgcggaatcgaggtattcactaggatcagtaacaaagttaatccaactccttccacctgctgcccgttagaaaattgtagaccttgatttccaaaacttactcaatctgaagttaggaaacaccaatagagtttttacccactttctcatggatagagccaaagttcatgaaaatacagatcaaattgagatcaacattagagaaggtgtttcaatttggataacaaaggctgcagtgcaaaaatgttttgagtttccccctggtacagataagaagctgccaatagatccaactacaaaaacatttgattcactctacagagtattgagtgtttcagaaaaaaaaatcaatgtaaagaagaagaagatgaaggagaatatgaaggagaagcaggttgaggaggagaagattgagatgaacatggaggagaagaagcagaatctggttgaggatgaaggtagtcaacaggaggaaagtgaagaggaggacggtgaagatggggaaattggagaggaggaaggtgaagatggggcaattggagatgctaaagtggggggagatggagacaaggaaagtgctaaaaggggggggataaaggttgctgtcagaagaaatgttttgactcctttgaacatcaatttgatgttacagaacatcaacaacgatgagattctcaaacttcttgttaaaagaaatgaagacactgatggtacagaaccgaatcttgacattgacctgattgtcagatgtttctttgcggtggtgttggacagactgttgttgccacaagccaccttttatctgagctcagctacattgaaagcagtgactgatctagacagactgaaaacagttgactggtcaattttattttcgaaaatttgaagagcagtgttgctgagtttggcaaggataagaagaaactgatatcagggtgtacaactgtgctaatggttgttttcttggaccatctcgtggaaaaccctttggatcctttgaccatccctaggatcaacttgtatacttcagattttatcgcagacctgataatggtacccaaggatagccctggccctgaaaaaaagcgtcgtaagactcaagatgaaaaagaagactagtaatgttataaagaatctcgctactctcaattttaagaattcggaggatacatgctatcatgaagattcagaaatggtgccaagtccagggagagcatcgccggttgttgcttctattgtttgctacctacaggtcatatgcacacagatgtattttatttacaatgccaactgttgtcaaaggattggaaggataaagtaattcttagctggaaagctactcaagaactgattcatcaagatattggagttaaggagctggacaaggaacttactgcagaggttatgaacaaagtggatctgatatttattcctatcattcatgccggtcactggtcccttgttattctttccactgccaaacaagagacatatatccttgactcctacccaaggcacagtggggtggccaaggatgttttaactcaactgcagaagtatttggataataaacacaactttgacatgtctaactacactgaccatgtgccacctgttcagcatcaaaaaaacaattacgattgtggctttcatgttttattgtatattgaagaattcatgaaggagaagatgtataaaatcaacaaaaaaatggtgttgaaattcagaaagcagctttgcatgaatctcttgtaccatcctttgaacagaataaatcttgtggaattcagaaagaagctgggtattacattgaaaagaaaacttcctggtatacttgatcttactattgaaggtgagaggagtgaatctgaggctgcagtgataattgaaatagagaacagagatgataagactctagaggatgaacatatttcagttgagaaagagtaaggtaaaaaagaagagcatgtactatcaactgacacaaagaatgacgaagcttcatccccatctgacgaagagcctgagcagagtgagtcatctgagcagactgtgtatgaaagatggatgattccaaaggatcattatcacctgagaaagagcaagctggagaaaaatatcctcaaacgaaaaaagaggttgggcaaagacaacatgtcctctcaggatatgatttctccagtgtttggcaagaggcttgtgcctgcaaacacacattttacctctcttaggaagttgcgaaaacacaagtttacgtctgataagatcaacgatgagatctgcaaacatatcttgaactacaatgaacgggagttgttaagtgtggggcagactaccatgactgggggtcagctggaaaagtacgtaaatgaaggtgacaatggtgataaaatactcagagcattcatcacatgcttcacttgtgatgaaaagttcaatcaagggaacatcacaaccgtcatcccgccacatgaagtatccgaagagggtgaactctccaaagttgatgctgcacaacttgtagaagaaatcaaagctgtactcaaaggcaccaatgttgcacgtgtacgcaaagacaccgaatccaccaaagatcccaaagtgaaagtctttcgaaacatgaggaggacatttatattttttcctttctacaagaatgaagaattgtttgtatttcatgtcgatacgaaaagactacccatcattgatgctctgttttgcaagatgtcatcattgtcgtttgaagatagatcctgactaggaaagtctatcatgggctgtctactcaaagccatgaaggattccggcttcatggtgaaaaaatatggtgattgtaggttcacagttactgtaactgaactcgaattcaaagatagtgcctcagcgctcataagttttattgagaacttcacttctaagttggacgacaatgccaagaaactgaaaaagggtgacaaggactggctggaaccttacaagaagtcgacagtggcataccttgtttgtcacactgaaaataaggtggtgttgcctgacgatattgtgaagtacaagcaaaacaagtgaggtggttgagtcgttaatgggtccagtggctgtgttttaagacttgtatcacactacttgtatggctttattctctgaagctgttccattgttgccgttagtaacaggtgttgcttttgtctctgctcagtgggtgattcatttcatccagagttgctgcaactttaatcagtctatagtgttgggttcctagctcagtgttgagttctaaatgatcgtgttgtgttcctaccaagtgttgagctgcacgacggcgtgcgcagccgcagccgcaccggcgaggagcgtttagaactctgttgatctacatagtgtttacaccggctcaacagagttctcatgttgatttttgaaggacccacgtgttgggttcctgctcagtgttgagttctgaacgatagtgttatgttccatgggcccttgttgatttcgagaggacccacgggccgaacggcgtgtcactttcatgcgtctatagtgttgggttcctgtctagtgttgagttctcaactatggtgttgtgttcctccaagaagttgagtttcaggggcctattatattgtctcagttaatgggtaactcagttaatcctatatattgtgtcagttaatgggaactcagttaatggtatatgttgtctcagttaatg

SEQ ID NO: 203354 - DNA, 8221 bp, Zea Mays
attaggtcgtggacgattagtttgtctgcgattgagaacttccgattttggcccagttcgtttcttggttcgtttcggccaagtacagcccactacaccgtccacactccacagcccacgcaagcattgaccattgagacacagacagagcagctgagcaccgcacacacggacgccataccctagattggagcgcaccacgggcgccggcggccggcggcccgccaccggtgattgacgccccctcctcggtccccagcgcggcgagcaggctatttgaggagatgccgtcattgtcatccttactctctggctccaatactgcgagtgctgagcttcctctaatcccttgcaagctctgcaatggggtggtgattgagcgggtctccaaacaaccagaaaccacgtcgaggaagttctaccggtgcagagccaagaaaacggatgggtcttaatgtgattttttccactggcaagcgagctatgttgttttgttaatcgaggatgggtttgtcagtggtgatcgacgccttgagttgttaatgatcgcacttaatgatcatggcaaagccgttgaatctctaaccaattccatcagagagatgaagaaaaagctgtccaacctggagttagtgatggaagagctggataacgtgaaaaatttgatgaaggcagccatggttgaaattgaggaaaacaagaaatcgacagctgctgcattgaaactgatggagaatgagctgcaaaagctgaaagggtcaactaaagtgaaacctaggaatatggcacagtgttttctgcttttggcattgattgggtggtttgtggtgggacagatgaattggggggaggaagcatccagccgatttctgctgagaggctaatgaacataggatggacttttcaatagctagatgtaatcagaactggtttatattttctctgctaacatggcgtagtagccaggacactttgcttgtcgattattatttttagcaagatgttggtgtgaagttggaaaggcttcccacggtccgaagcccgtgtcactttccagagtctacagtgttgcgttctgaatgctagtgttatgttccatgtcccgtgtcactttctggagtctaccgtggtgctcctgctaagtgttgagtcggatgttgattttgggaggacccacgggcgaagggcgtgtcactttcatgaggacccacgggccgaaccccgtgtcactttcatgaggtatagtgttgggttccttatcagagttgcgttcggatatatagagttgtgttcctccaatctgtgctgggtttcagggttccatgttgatttttgggaggacccgcggtcggaagcccgtgtcactttccggagtctacagcgttgcgttctgaatgctagtgttatgttccatgtcccgtgtcactttctggagtctaccgtggcgctcctgctaagtgttgagtcggatgggcggatgttgattttgggaggacccacgggtgaagggtgtgtccctttcatgcggtatagtgttgggttccttatcagtgttgcgttccttcaaggcgttgagtttcagggtcccatgttgatttttgggaggacccacgtgttggagtctaccatggggctcctgctaagtgttgagtcagatgggcagatgttggttttgggaggacccacgggcgaagggcgtgtcactttcatgcggtatagtgttgcgttcctccaatctgttgggtttcagggtcccatgttgatttttgggaggacccgcgggttccatgttgattttttggaggacccgtggtccgtagtccgtgtcactttccggagtctacagtgttgcgttctgaatgctagtgttatgttccataacccgtgtcactttctggagtctaccgtggggctccttctaagtgttgagtcggatgggcggatgttggttttgggaggacccacgggcgaacgacggtcccatgttgatttttggcaggacccgcagtctgaagcccgtgtcactttccggagtctacagtgttgcgttctgaatactagtgttatgttccatgtcccgtgtcactttctggagtctaccgtggcgctcctgctaagtgttgagtcagatttgcggatgttgattttgggaggacccacgggtgaagggcgtgtcactttcatgaggtatagtgttgggctccttctcagtgttgtgttcggaactatgctgttgcgttccttcaaggtgttgagtttcagggtcccatgttgatttttgggagttatagtgttgagtttcagggtcccttttagactggaaaagtcttctgccataatcgtcagatttacctaaatgatgtaaaaaatggtttggaaaactctaaaacattaaataaagatcacataacattaattaataaaaaatgatataatacacaaacattaagtaagaattatagaaagttgaggcaccagtttgtatgcaggattcttcctcctaagatgtggaaagctaattagttttaaaccataatccacctcaatatatatgaattaaagtgcatagatgtggcaacaacgttgaagataaacatctatttgtacagcaaacgcaggcttcccaaagcggcatggtcagttcgagctcgccctggggatgccgccgctctgcccatcgcagacgccgtggagcatcgacggcgacgtcgcaggacatgaggtcgcctaccagctggtgacccgaaacacccaggcggcccgccgccacgtcgagataacggccctgacggtgccgacattttggggcagcgggcattgcccggagccgctcgtcatcctaagaaagggcagcacggtggcctgctagtacgtgacgggatctggcagcgcagggaacggagggacagacggcaagagcatgcaccacatcgacgtgaacatggagtgagcgagccaacggagaaatggcgatgggaatggaggtgcagctggtgggagcagttggcacgccgatgaccggacgaagcaagtgaggcaagggatggacgtcgcacttcaatacgtgcctggcggcaccgacattccgatgcagcggctacccccggagccactcgtcgtccatgaaaagggcgacgaactggcctggcaagatctggcggcgcggggatcgaatggacggacgacaagagcgagcgaagaagtcctggcggcttggtgagaaaatggtggcgctgggggcgatgggaacggaggtgcggatggtggcagcagtggagtgagcgagcgtggcctggtttcttcttgaggaaatggcattgcagaggcgatgggaatggagatgcgaatggggggaggagttgccgtgccgacggccgaccgcgatttttttgggaagaatcgtgagaagggataacacacagagagaaaaatgagtgttaccttcgcgttacaggaatgaagcgacggcgacgtcgagactgattgtcgtcgtccgcggccatggggcggagcaccttccggagaagtcgagacttatacgattaaaaaaggtaggcgaagagtcggcgcagcatttcacacgcagtagtgactgacacctggatggttggattagtggcacggacaaacgatcttacggctacggaaatttggacgatgtgtccaccttcgtttgcgagcagcggaccctggtttgatatattaaaaaaaggcagccgaagagtcggcgcagcatttcacacgcagtagtgagtgacacctggatggttggattagtggcacggacaaacgatcttacggctacggaaatttggacgacgtgtccaccctcgtttgcgagtagcggaccctggtttaatatatagaaatagtgttgagttctcaacactgtatactcctgaaagtgacacgggcccatggaatgtgacactatcgttcagaactcatgaaagtgacacgttgttcggtgtgaaagtgttgatttagggtttagtgtaaccgcccgttcggtgtggaagtgttcaaatttctctacgcgcgttcggtagcctcaccgacggcgacggcgacctcacctcaccgacggcgacggcctcggcgacggcgacaacgatccccaattctcttcgcgacctgaccgtctccacttcggtaaacccaccttcccttctctcctcgttccttgtcagggaaccgcctcaccgattctgatgtcgaaggtaacctggtgccgatccgcaggggtgaagaagaaagccaacatgccacaggggaagagtaagaagaacgtggtgaaggagaaagccaaaaagattaagaagaacgcggaatcgaggtattcactaggatcagtaacaaagttaatccaactccttccacctgctgcccgttagaaaattgtagaccttgatttccaaaacttactcaatctgaagttaggaaacaccaatagagtttttacccactttctcatggatagagccaaagttcatgaaaatacagatcaaattgagatcaacattagagaaggtgtttcaatttggataacaaaggctgcagtgcaaaaatgttttgagtttccccctggtacagataagaagctgccaatagatccaactacaaaaacatttgattcactctacagagtattgagtgtttcagaaaaaaaaatcaatgtaaagaagaagaagatgaaggagaatatgaaggagaagcaggttgaggaggagaagattgagatgaacatggaggagaagaagcagaatctggttgaggatgaaggtagtcaacaggaggaaagtgaagaggaggacggtgaagatggggaaattggagaggaggaaggtgaagatggggcaattggagatgctaaagtggggggagatggagacaaggaaagtgctaaaaggggggggataaaggttgctgtcagaagaaatgttttgactcctttgaacatcaatttgatgttacagaacatcaacaacgatgagattctcaaacttcttgttaaaagaaatgaagacactgatggtacagaaccgaatcttgacattgacctgattgtcagatgtttctttgcggtggtgttggacagactgttgttgccacaagccaccttttatctgagctcagctacattgaaagcagtgactgatctagacagactgaaaacagttgactggtcaattttattttcgaaaatttgaagagcagtgttgctgagtttggcaaggataagaagaaactgatatcagggtgtacaactgtgctaatggttgttttcttggaccatctcgtggaaaaccctttggatcctttgaccatccctaggatcaacttgtatacttcagattttatcgcagacctgataatggtacccaaggatagccctggccctgaaaaaaagcgtcgtaagtttaagaattcggaggatacatgctatcatgaagattcagaaatggtgccaagtccagggagagcatcgccggttgttgcttctgtacaatctcataagaactttgttgatcatgcagatttagaaattgtgccatctcatgagaactctgttgatctacatagtgtttacatggcacatgtattggaaagaagcagacaaagcatagtagtggacatattggactacaatatacctgaatctacttttgcagattgtttgctacctacaggtcatatgcacacagatgtattttatttacaatgccaactgttgtcaaaggattggaaggataaagtaattcttagctggaaagctactcaagaactgattcatcaagatattggagttaaggagctggacaaggaacttactgcagaggttatgaacaaagtggatctggtttgtgctttgttttatattacagtagagttttttcagattgacagtagagtttgtgctttttttagatatttattcctatcattcatgccggtcactggtcccttgttattctttccactgccaaacaagagacatatatccttgactcctacccaaggcacagtggggtggccaaggatgttttaactcaactgcagaagtatttggataataaacacaactttgacatgtctaactacactgaccatgtgccacctgttcagcatcaaaaaaacaattacgattgtggctttcatgttttattgtatattgaagaattcatgaaggagaagatgtataaaatcaacaaaaaaatggtgttgaaattcagaaagcagctttgcatgaatctcttgtaccatcctttgaacagaataaatcttgtggaattcagaaagaagctgggtattacattgaaaagaaaacttcctggtatacttgatcttactattgaaggtgagaggagtgaatctgaggctgcagtgataattgaaatagagaacagagatgataagactctagaggatgaacatatttcagttgagaaagagtaaggtaaaaaagaagagcatgtactatcaactgacacaaagaatgacgaagcttcatccccatctgacgaagagcctgagcagagtgagtcatctgagcagactgtgtatgaaagatggatgattccaaaggatcattatcacctgagaaagagcaagctggagaaaaatatcctcaaacgaaaaaagaggttgggcaaagacaacatgtcctctcaggatatgatttctccagtgtttggcaagaggcttgtgcctgcaaacacacattttacctctcttaggaagttgcgaaaacacaagtttacgtctgataagatcaacgatgagatctgcaaacatatcttgaactacaatgaacgggagttgttaagtgtggggcagactaccatgactgggggtcagctggaaaagtacgtaaatgaaggtgacaatggtgataaaatactcagagcattcatcacatgcttcacttgtgatgaaaagttcaatcaagggaacatcacaaccgtcatcccgccacatgaagtatccgaagagggtgaactctccaaagttgatgctgcacaacttgtagaagaaatcaaagctgtactcaaaggcaccaatgttgcacgtgtacgcaaagacaccgaatccaccaaagatcccaaagtgaaagtctttcgaaacatgaggaggacatttatattttttcctttctacaagaatgaagaattgtttgtatttcatgtcgatacgaaaagactacccatcattgatgctctgttttgcaagatgtcatcattgtcgtttgaagatagatcctgactaggaaagtctatcatgggctgtctactcaaagccatgaaggattccggcttcatggtgaaaaaatatggtgattgtaggttcacagttactgtaactgaactcgaattcaaagatagtgcctcagcgctcataagttttattgagaacttcacttctaagttggacgacaatgccaagaaactgaaaaagggtgacaaggactggctggaaccttacaagaagtcgacagtggcataccttgtttgtcacactgaaaataaggtggtgttgcctgacgatattgtgaagtacaagcaaaacaagtgaggtggttgagtcgttaatgggtccagtggctgtgttttaagacttgtatcacactacttgtatggctttattctctgaagctgttccattgttgccgttagtaacaggtgttgcttttgtctctgctcagtgggtgattcatttcatccagagttgctgcaactttaatcagtctatagtgttgggttcctagctcagtgttgagttctaaatgatcgtgttgtgttcctaccaagtgttgagctgcacgacggcgtgcgcagccgcagccgcaccggcgaggagcgtttagaactctgttgatctacatagtgtttacaccggctcaacagagttctcatgttgatttttgaaggacccacgtgttgggttcctgctcagtgttgagttctgaacgatagtgttatgttccatgggcccttgttgatttcgagaggacccacgggccgaacggcgtgtcactttcatgcgtctatagtgttgggttcctgtctagtgttgagttctcaactatggtgttgtgttcctccaagaagttgagtttcaggggcctattatattgtctcagttaatgggtaactcagttaatcctatatattgtgtcagttaatgggaactcagttaatggtatatgttgtctcagttaatg

SEQ ID NO: 203355 - DNA, 8184 bp, Zea Mays
atggacacaccgacgcgagttcttccccctgctgggcaaatccgatccataaatgtaactccgggaaggctcaccgatggcttgttacccttaccaatgatgaacatgggcccagatttgagccgggtctggtcatggttcgtggtcccatgcagacttgatgcgtgtaggcacacaacagcaaaacagctatttgaggagatgccgtcattgtcatccttactctctggctccaatactgcgagtgctgagcttcctctaatcccttgcaagctctgcaatggggtggtgattgagcgggtctccaaacaaccagaaaccacgtcgaggaagttctaccggtgcagagccaagaaaacggatgggtttgtcagtggtgatcgacgccttgagttgttaatgatcgcacttaatgatcatggcaaagccgttgaatctctaaccaattccatcagagagatgaagaaaaagctgtccaacctggagttagtgatggaagagctggataacgtgaaaaatttgatgaaggcagccatggttgaaattgaggaaaacaagaaatcgacagctgctgcattgaaactgatggagaatgagctgcaaaagctgaaagggtcaactaaagtgaaacctaggaatatggcacagtgttttctgcttttggcattgattgggtgtgttatgttccatgtcccgtgtcactttctggagtctaccgtggtgctcctgctaagtgttgagtcggatgttgattttgggaggacccacgggcgaagggcgtgtcactttcatgaggacccacgggccgaaccccgtgtcactttcatgaggtatagtgttgggttccttatcagagttgcgttcggatatatagagttgtgttcctccaatctgtgctgggtttcagggttccatgttgatttttgggaggacccgcggtcggaagcccgtgtcactttccggagtctacagcgttgcgttctgaatgctagtgttatgttccatgtcccgtgtcactttctggagtctaccgtggcgctcctgctaagtgttgagtcggatgggcggatgttgattttgggaggacccacgggtgaagggtgtgtccctttcatgcggtatagtgttgggttccttatcagtgttgcgttccttcaaggcgttgagtttcagggtcccatgttgatttttgggaggacccacggtccgaagcccgtgtcactttccggtgtctacagtgttgcgctctgaatgcttgtgttaggttccatgtcccatgtcactttctggagtctaccgtggggctcctgctaagtgttgattcggatgggcggatgttgattttgggataggactgggcgttcgggttacccgattagttcgggtcgggtagttcgggttttgataaattcgggtaatagaaactaatacccgatcacagctttaaaaacccgcgacccgtaatttcgggtacccgtaatttcgggttcgggtttgggtatacccaatttacccgaaatatataaagcacatgcgagggcgcgtttggctggtggcgcggcggcttgacagcgaggctgcgtacgcgtgtggccgcctggccgctaggtagtgcagcggcttgccggcgagggcgctgtccgctgtctgcgcttggtcgcctggccggtggcgcgacggcttgccggtgaggcagcctgttcgctgtacgcctgtccgctgtctgcgcgtggccgcctgtccgcctggccggtggccgcctgtccgctgtacggctgtacgcgcttcggcgcttggctgcctggcgcctggtgtgtggttgctagttaccgttgtgccttgttgtgagttgctgttgccgccatgccttgctgttgccggagaacaaagatctgaagtgctccttgctctggagtactagccttgaagttgcaggtggcgatagccgatggggattgggggacgtcgtagccaacgctggacaaggcagcggctgtggggctagcgttgtgcctggacgatgttggttatttcgggtcgaatgggtacttcgggtaccgcgggttaatacccgattaggcccgaacttagttcgggtatttagtttcgttacccgctagagctgttcgggtaacgggcttcgggctaaacgggtacgggttcgggtatttcgggtatagggcttcgggctcgggttttatgcccagatctattttgggatgacccacgggcgaacccccgtgtcactttcatgagttcacagtgttgagttctgaaggtagtgttacgttccatgtcccgtgtcactttcaggagtctacagcgttgcgttcctgatcagtgttgagctctaaacgatggtgttgcattgctgatcagtattgagttgggcgcatgttgattttgggaggacccacgggcgaacgatgtgtcactttcatgagttagtgtcgggttccaggttgagtttcggggggccatgttgattttttgaaggactcacgggccgaacctcgtgtcactttcattaggtatagtgttgggttccttctcaatgtggcgttcggaactatggtgttgcgttcctccaatctgttgggtttcagggtcccatgttgatttttgggaggacccgcggtccgaagcccgtgtaactttccggagtctacagtgttgcattctgaaaagcagtgttaggttccatgtacagtgttggagtctaccatggggctcctgctaagtgttgagtcagatgggcagatgttggttttgggaggacccacgggcgaagggcgtgtcactttcatgcggtatagtgttgcgttcctccaatctgttgggtttcagggtcccatgttgatttttgggaggacccgcgggttccatgttgattttttggaggacccgtggtccgtagtccgtgtcactttccggagtctacagtgttgcgttctgaatgctagtgttatgttccataacccgtgtcactttctggagtctaccgtggggctccttctaagtgttgagtcggatgggcggatgttggttttgggaggacccacgggcgaacgacggtcccatgttgatttttggcaggacccgcagtctgaagcccgtgtcactttccggagtctacagtgttgcgttctgaatactagtgttatgttccatgtcccgtgtcactttctggagtctaccgtggcgctcctgctaagtgttgagtcagatttgcggatgttgattttgggaggacccacggcaaacgcaggcttcccaaagcggcatggtcagttcgagctcgccctggggatgccgccgctctgcccatcgcagacgccgtggagcatcgacggcgacgtcgcaggacatgaggtcgcctaccagctggtgacccgaaacacccaggcggcccgccgccacgtcgagataacggccctgacggtgccgacattttggggcagcgggcattgcccggagccgctcgtcatcctaagaaagggcagcacggtggcctgctacggctacccccggagccactcgtcgtccatgaaaagggcgacgaactggcctggcaagatctggcggcgcggggatcgaatggacggacgacaagagcgagcgaagaagtcctggcggcttggtgagaaaatggtggcgctgggggcgatgggaacggaggtgcggatggtggcagcagtggagaatgaagcgacggcgacgtcgagactgattgtcgtcgtccgcggccatggggcggagcaccttccggagaagtcgagacttatacgattaaaaaaggtaggcgaagagtcggcgcagcatttcacacgcagtagtgactgacacctggatggttggattagtggcacggacaaacgatcttacggctacggaaatttggacgatgtgtccaccttcgtttgcgagcagcggaccctggtttgatatattaaaaaaaggcagccgaagagtcggcgcagcatttcacacgcagtagtgagtgacacctggatggttggattagtggcacggacaaacgatcttacggctacggaaatttggacgacgtgtccaccctcgtttgcgagtagcggaccctggtttaatatatagaaatagtgttgagttctcaacactgtatactcctgaaagtgacacgggcccatggaatgtgacactatcgttcagaactcatgaaagtgacacgttgttcggtgtgaaagtgttgatttagggtttagtgtaaccgcccgttcggtgtggaagtgttcaaatttctctacgcgcgttcggtagcctcaccgacggcgacggcgacctcacctcaccgacggcgacggcctcggcgacggcgacaacgatccccaattctcttcgcgacctgaccgtctccacttcggggtgaagaagaaagccaacatgccacaggggaagagtaagaagaacgtggtgaaggagaaagccaaaaagattaagaagaacgcggaatcgaggtattcactaggatcagtaacaaagttaatccaactccttccacctgctgcccgttagaaaattgtagaccttgatttccaaaacttactcaatctgaagttaggaaacaccaatagagtttttacccactttctcatggatagagccaaagttcatgaaaatacagatcaaattgagatcaacattagagaaggtgtttcaatttggataacaaaggctgcagtgcaaaaatgttttgagtttccccctggtacagataagaagctgccaatagatccaactacaaaaacatttgattcactctacagagtattgagtgtttcagaaaaaaaaatcaatgtaaagaagaagaagatgaaggagaatatgaaggagaagcaggttgaggaggagaagattgagatgaacatggaggagaagaagcagaatctggttgaggatgaaggtagtcaacaggaggaaagtgaagaggaggacggtgaagatggggaaattggagaggaggaaggtgaagatggggcaattggagatgctaaagtggggggagatggagacaaggaaagtgctaaaaggggggggataaaggttgctgtcagaagaaatgttttgactcctttgaacatcaatttgatgttacagaacatcaacaacgatgagattctcaaacttcttgttaaaagaaatgaagacactgatggtacagaaccgaatcttgacattgacctgattgtcagatgtttctttgcggtggtgttggacagactgttgttgccacaagccaccttttatctgagctcagctacattgaaagcagtgactgatctagacagactgaaaacagttgactggtcaattttattttcgaaaatttgaagagcagtgttgctgagtttggcaaggataagaagaaactgatatcagggtgtacaactgtgctaatggttgttttcttggaccatctcgtggaaaaccctttggatcctttgaccatccctaggatcaacttgtatacttcagattttatcgcagacctgataatggtacccaaggatagccctggccctgaaaaaaagcgtcgtaagactcaagatgaaaaagaagactagtaatgttataaagaatctcgctactctcaattttaagaattcggaggatacatgctatcatgaagattcagaaatggtgccaagtccagggagagcatcgccgattgtttgctacctacaggtcatatgcacacagatgtattttatttacaatgccaactgttgtcaaaggattggaaggataaagtaattcttagctggaaagctactcaagaactgattcatcaagatattggagttaaggagctggacaaggaacttactgcagaggttatgaacaaagtggatctgatatttattcctatcattcatgccggtcactggtcccttgttattctttccactgccaaacaagagacatatatccttgactcctacccaaggcacagtggggtggccaaggatgttttaactcaactgcagaagtatttggataataaacacaactttgacatgtctaactacactgaccatgtgccacctgttcagcatcaaaaaaacaattacgattgtggctttcatgttttattgtatattgaagaattcatgaaggagaagatgtataaaatcaacaaaaaaatggtgttgaaattcagaaagcagctttgcatgaatctcttgtaccatcctttgaacagaataaatcttgtggaattcagaaagaagctgggtattacattgaaaagaaaacttcctggtatacttgatcttactattgaaggtgagaggagtgaatctgaggctgcagtgataattgaaatagagaacagagatgataagactctagaggatgaacatatttcagttgagaaagagtaaggtaaaaaagaagagcatgtactatcaactgacacaaagaatgacgaagcttcatccccatctgacgaagagcctgagcagagtgagtcatctgagcagactgtgtatgaaagatggatgattccaaaggatcattatcacctgagaaagagcaagctggagaaaaatatcctcaaacgaaaaaagaggttgggcaaagacaacatgtcctctcaggatatgatttctccagtgtttggcaagaggcttgtgcctgcaaacacacattttacctctcttaggaagttgcgaaaacacaagtttacgtctgataagatcaacgatgagatctgcaaacatatcttgaactacaatgaacgggagttgttaagtgtggggcagactaccatgactgggggtcagctggaaaagtacgtaaatgaaggtgacaatggtgataaaatactcagagcattcatcacatgcttcacttgtgatgaaaagttcaatcaagggaacatcacaaccgtcatcccgccacatgaagtatccgaagagggtgaactctccaaagttgatgctgcacaacttgtagaagaaatcaaagctgtactcaaaggcaccaatgttgcacgtgtacgcaaagacaccgaatccaccaaagatcccaaagtgaaagtctttcgaaacatgaggaggacatttatattttttcctttctacaagaatgaagaattgtttgtatttcatgtcgatacgaaaagactacccatcattgatgctctgttttgcaagatgtcatcattgtcgtttgaagatagatcctgactaggaaagtctatcatgggctgtctactcaaagccatgaaggattccggcttcatggtgaaaaaatatggtgattgtaggttcacagttactgtaactgaactcgaattcaaagatagtgcctcagcgctcataagttttattgagaacttcacttctaagttggacgacaatgccaagaaactgaaaaagggtgacaaggactggctggaaccttacaagaagtcgacagtggcataccttgtttgtcacactgaaaataaggtggtgttgcctgacgatattgtgaagtacaagcaaaacaagtgaggtggttgagtcgttaatgggtccagtggctgtgttttaagacttgtatcacactacttgtatggctttattctctgaagctgttccattgttgccgttagtaacaggtgttgcttttgtctctgctcagtgggtgattcatttcatccagagttgctgcaactttaatcagtctatagtgttgggttcctagctcagtgttgagttctaaatgatcgtgttgtgttcctaccaagtgttgagctgcacgacggcgtgcgcagccgcagccgcaccggcgaggagcgtttagaactctgttgatctacatagtgtttacaccggctcaacagagttctcatgttgatttttgaaggacccacgtgttgggttcctgctcagtgttgagttctgaacgatagtgttatgttccatgggcccttgttgatttcgagaggacccacgggccgaacggcgtgtcactttcatgcgtctatagtgttgggttcctgtctagtgttgagttctcaactatggtgttgtgttcctccaagaagttgagtttcaggggcctattatattgtctcagttaatgggtaactcagttaatcctatatattgtgtcagttaatgggaactcagttaatggtatatgttgtctcagttaatg

SEQ ID NO: 203356 - DNA, 8221 bp, Zea Mays
atggacacaccgacgcgagttcttccccctgctgggcaaatccgatccataaatgtaactccgggaaggctcaccgatggcttgttacccttaccaatgatgaacatgggcccagatttgagccgggtctggtcatggttcgtggtcccatgcagacttgatgcgtgtaggcacacaacagcaaaacagctatttgaggagatgccgtcattgtcatccttactctctggctccaatactgcgagtgctgagcttcctctaatcccttgcaagctctgcaatggggtggtgattgagcgggtctccaaacaaccagaaaccacgtcgaggaagttctaccggtgcagagccaagaaaacggatgggtcttaatgtgattttttccactggcaagcgagctatgttgttttgttaatcgaggatgggtttgtcagtggtgatcgacgccttgagttgttaatgatcgcacttaatgatcatggcaaagccgttgaatctctaaccaattccatcagagagatgaagaaaaagctgtccaacctggagttagtgatggaagagctggataacgtgaaaaatttgatgaaggcagccatggttgaaattgaggaaaacaagaaatcgacagctgctgcattgaaactgatggagaatgagctgcaaaagctgaaagggtcaactaaagtgaaacctaggaatatggcacagtgttttctgcttttggcattgattgggtgtgttatgttccatgtcccgtgtcactttctggagtctaccgtggtgctcctgctaagtgttgagtcggatgttgattttgggaggacccacgggcgaagggcgtgtcactttcatgaggacccacgggccgaaccccgtgtcactttcatgaggtatagtgttgggttccttatcagagttgcgttcggatatatagagttgtgttcctccaatctgtgctgggtttcagggttccatgttgatttttgggaggacccgcggtcggaagcccgtgtcactttccggagtctacagcgttgcgttctgaatgctagtgttatgttccatgtcccgtgtcactttctggagtctaccgtggcgctcctgctaagtgttgagtcggatgggcggatgttgattttgggaggacccacgggtgaagggtgtgtccctttcatgcggtatagtgttgggttccttatcagtgttgcgttccttcaaggcgttgagtttcagggtcccatgttgatttttgggaggacccacgtgttggagtctaccatggggctcctgctaagtgttgagtcagatgggcagatgttggttttgggaggacccacgggcgaagggcgtgtcactttcatgcggtatagtgttgcgttcctccaatctgttgggtttcagggtcccatgttgatttttgggaggacccgcggtccgtagtccgtgtcactttccggagtctacagtgttgcgttctgaatgctagtgttatgttccataacccgtgtcactttctggagtctaccgtggggcccttctaagtgttgagtcggatggggggatgttggttttcggaggacccacgggcgaagggcgtgtcactttcatgcggtatagtgttgtgttccttcatctgttgcgtttcagggttccatgttgattttttggaggacccgtggtccgtagtccgtgtcactttccggagtctacagtgttgcgttctgaatgctagtgttatgttccataacccgtgtcactttctggagtctaccgtggggctccttctaagtgttgagtcggatgggcggatgttggttttgggaggacccacgggcgaacgacgtgtcactttcatgagttcgtagtgttgagttccatatcccgtgtcactttcaggagtatatagtgttgcgttcctgatccatgttgagttctaaacgatggtgtggcgttcctaatcagtattgagttgggcgcatgttgattttgggaggacccacgggcgaacgacgtgtcactttcatgagttatagtgttgatttttgaaggacccacgagccgaaccccgtgtcactttcatgaggtatagtgttgggttcgtgctcagtgtggcgttcgacactatggtgttgcgttcctccaatctgttgggtttcagggtcccatgttgatttttggcaggacccgcagtctgaagcccgtgtcactttccggagtctacagtgttgcgttctgaatactagtgttatgttccatgtcccgtgtcactttctggagtctaccgtggcgctcctgctaagtgttgagtcagatttgcggatgttgattttgggaggacccacgggtgaagggcgtgtcactttcatgaggtatagtgttgggctccttctcagtgttgtgttcggaactatgctgttgcgttccttcaaggtgttgagtttcagggtcccatgttgatttttgggagttatagtgttgagtttcagggtcccttttagactggaaaagtcttctgccataatcgtcagatttacctaaatgatgtaaaaaatggtttggaaaactctaaaacattaaataaagatcacataacattaattaataaaaaatgatataatacacaaacattaagtaagaattatagaaagttgaggcaccagtttgtatgcaggattcttcctcctaagatgtggaaagctaattagttttaaaccataatccacctcaatatatatgaattaaagtgcatagatgtggcaacaacgttgaagataaacatctatttgtacagcaaacgcaggcttcccaaagcggcatggtcagttcgagctcgccctggggatgccgccgctctgcccatcgcagacgccgtggagcatcgacggcgacgtcgcaggacatgaggtcgcctaccagctggtgacccgaaacacccaggcggcccgccgccacgtcgagataacggccctgacggtgccgacattttggggcagcgggcattgcccggagccgctcgtcatcctaagaaagggcagcacggtggcctgctagtacgtgacgggatctggcagcgcagggaacggagggacagacggcaagagcatgcaccacatcgacgtgaacatggagtgagcgagccaacggagaaatggcgatgggaatggaggtgcagctggtgggagcagttggcacgccgatgaccggacgaagcaagtgaggcaagggatggacgtcgcacttcaatacgtgcctggcggcaccgacattccgatgcagcggctacccccggagccactcgtcgtccatgaaaagggcgacgaactggcctggcaagatctggcggcgcggggatcgaatggacggacgacaagagcgagcgaagaagtcctggcggcttggtgagaaaatggtggcgctgggggcgatgggaacggaggtgcggatggtggcagcagtggagtgagcgagcgtggcctggtttcttcttgaggaaatggcattgcagaggcgatgggaatggagatgcgaatggggggaggagttgccgtgccgacggccgaccgcgatttttttgggaagaatcgtgagaagggataacacacagagagaaaaatgagtgttaccttcgcgttacaggaatgaagcgacggcgacgtcgagactgattgtcgtcgtccgcggccatggggcggagcaccttccggagaagtcgagacttatacgattaaaaaaggtaggcgaagagtcggcgcagcatttcacacgcagtagtgactgacacctggatggttggattagtggcacggacaaacgatcttacggctacggaaatttggacgatgtgtccaccttcgtttgcgagcagcggaccctggtttgatatattaaaaaaaggcagccgaagagtcggcgcagcatttcacacgcagtagtgagtgacacctggatggttggattagtggcacggacaaacgatcttacggctacggaaatttggacgacgtgtccaccctcgtttgcgagtagcggaccctggtttaatatatagaaatagtgttgagttctcaacactgtatactcctgaaagtgacacgggcccatggaatgtgacactatcgttcagaactcatgaaagtgacacgttgttcggtgtgaaagtgttgatttagggtttagtgtaaccgcccgttcggtgtggaagtgttcaaatttctctacgcgcgttcggtagcctcaccgacggcgacggcgacctcacctcaccgacggcgacggcctcggcgacggcgacaacgatccccaattctcttcgcgacctgaccgtctccacttcggtaaacccaccttcccttctctcctcgttccttgtcagggaaccgcctcaccgattctgatgtcgaaggtaacctggtgccgatccgcaggggtgaagaagaaagccaacatgccacaggggaagagtaagaagaacgtggtgaaggagaaagccaaaaagattaagaagaacgcggaatcgaggtattcactaggatcagtaacaaagttaatccaactccttccacctgctgcccgttagaaaattgtagaccttgatttccaaaacttactcaatctgaagttaggaaacaccaatagagtttttacccactttctcatggatagagccaaagttcatgaaaatacagatcaaattgagatcaacattagagaaggtgtttcaatttggataacaaaggctgcagtgcaaaaatgttttgagtttccccctggtacagataagaagctgccaatagatccaactacaaaaacatttgattcactctacagagtattgagtgtttcagaaaaaaaaatcaatgtaaagaagaagaagatgaaggagaatatgaaggagaagcaggttgaggaggagaagattgagatgaacatggaggagaagaagcagaatctggttgaggatgaaggtagtcaacaggaggaaagtgaagaggaggacggtgaagatggggaaattggagaggaggaaggtgaagatggggcaattggagatgctaaagtggggggagatggagacaaggaaagtgctaaaaggggggggataaaggttgctgtcagaagaaatgttttgactcctttgaacatcaatttgatgttacagaacatcaacaacgatgagattctcaaacttcttgttaaaagaaatgaagacactgatggtacagaaccgaatcttgacattgacctgattgtcagatgtttctttgcggtggtgttggacagactgttgttgccacaagccaccttttatctgagctcagctacattgaaagcagtgactgatctagacagactgaaaacagttgactggtcaattttattttcgaaaatttgaagagcagtgttgctgagtttggcaaggataagaagaaactgatatcagggtgtacaactgtgctaatggttgttttcttggaccatctcgtggaaaaccctttggatcctttgaccatccctaggatcaacttgtatacttcagattttatcgcagacctgataatggtacccaaggatagccctggccctgaaaaaaagcgtcgtaagactcaagatgaaaaagaagactagtaatgttataaagaatctcgctactctcaattttaagaattcggaggatacatgctatcatgaagattcagaaatggtgccaagtccagggagagcatcgccggttgttgcttctattgtttgctacctacaggtcatatgcacacagatgtattttatttacaatgccaactgttgtcaaaggattggaaggataaagtaattcttagctggaaagctactcaagaactgattcatcaagatattggagttaaggagctggacaaggaacttactgcagaggttatgaacaaagtggatctgatatttattcctatcattcatgccggtcactggtcccttgttattctttccactgccaaacaagagacatatatccttgactcctacccaaggcacagtggggtggccaaggatgttttaactcaactgcagaagtatttggataataaacacaactttgacatgtctaactacactgaccatgtgccacctgttcagcatcaaaaaaacaattacgattgtggctttcatgttttattgtatattgaagaattcatgaaggagaagatgtataaaatcaacaaaaaaatggtgttgaaattcagaaagcagctttgcatgaatctcttgtaccatcctttgaacagaataaatcttgtggaattcagaaagaagctgggtattacattgaaaagaaaacttcctggtatacttgatcttactattgaaggtgagaggagtgaatctgaggctgcagtgataattgaaatagagaacagagatgataagactctagaggatgaacatatttcagttgagaaagagtaaggtaaaaaagaagagcatgtactatcaactgacacaaagaatgacgaagcttcatccccatctgacgaagagcctgagcagagtgagtcatctgagcagactgtgtatgaaagatggatgattccaaaggatcattatcacctgagaaagagcaagctggagaaaaatatcctcaaacgaaaaaagaggttgggcaaagacaacatgtcctctcaggatatgatttctccagtgtttggcaagaggcttgtgcctgcaaacacacattttacctctcttaggaagttgcgaaaacacaagtttacgtctgataagatcaacgatgagatctgcaaacatatcttgaactacaatgaacgggagttgttaagtgtggggcagactaccatgactgggggtcagctggaaaagtacgtaaatgaaggtgacaatggtgataaaatactcagagcattcatcacatgcttcacttgtgatgaaaagttcaatcaagggaacatcacaaccgtcatcccgccacatgaagtatccgaagagggtgaactctccaaagttgatgctgcacaacttgtagaagaaatcaaagctgtactcaaaggcaccaatgttgcacgtgtacgcaaagacaccgaatccaccaaagatcccaaagtgaaagtctttcgaaacatgaggaggacatttatattttttcctttctacaagaatgaagaattgtttgtatttcatgtcgatacgaaaagactacccatcattgatgctctgttttgcaagatgtcatcattgtcgtttgaagatagatcctgactaggaaagtctatcatgggctgtctactcaaagccatgaaggattccggcttcatggtgaaaaaatatggtgattgtaggttcacagttactgtaactgaactcgaattcaaagatagtgcctcagcgctcataagttttattgagaacttcacttctaagttggacgacaatgccaagaaactgaaaaagggtgacaaggactggctggaaccttacaagaagtcgacagtggcataccttgtttgtcacactgaaaataaggtggtgttgcctgacgatattgtgaagtacaagcaaaacaagtgaggtggttgagtcgttaatgggtccagtggctgtgttttaagacttgtatcacactacttgtatggctttattctctgaagctgttccattgttgccgttagtaacaggtgttgcttttgtctctgctcagtgggtgattcatttcatccagagttgctgcaactttaatcagtctatagtgttgggttcctagctcagtgttgagttctaaatgatcgtgttgtgttcctaccaagtgttgagctgcacgacggcgtgcgcagccgcagccgcaccggcgaggagcgtttagaactctgttgatctacatagtgtttacaccggctcaacagagttctcatgttgatttttgaaggacccacgtgttgggttcctgctcagtgttgagttctgaacgatagtgttatgttccatgggcccttgttgatttcgagaggacccacgggccgaacggcgtgtcactttcatgcgtctatagtgttgggttcctgtctagtgttgagttctcaactatggtgttgtgttcctccaagaagttgagtttcaggggcctattatattgtctcagttaatgggtaactcagttaatcctatatattgtgtcagttaatgggaactcagttaatggtatatgttgtctcagttaatg

SEQ ID NO: 203357 - DNA, 6378 bp, Zea Mays
atggacacaccgacgcgagttcttccccctgctgggcaaatccgatccataaatgtaactccgggaaggctcaccgatggcttgttacccttaccaatgatgaacatgggcccagatttgagccgggtctggtcatggttcgtggtcccatgcagacttgatgcgtgtaggcacacaacagcaaaacagctatttgaggagatgccgtcattgtcatccttactctctggctccaatactgcgagtgctgagcttcctctaatcccttgcaagctctgcaatggggtggtgattgagcgggtctccaaacaaccagaaaccacgtcgaggaagttctaccggtgcagagccaagaaaacggatgggtttgtcagtggtgatcgacgccttgagttgttaatgatcgcacttaatgatcatggcaaagccgttgaatctctaaccaattccatcagagagatgaagaaaaagctgtccaacctggagttagtgatggaagagctggataacgtgaaaaatttgatgaaggcagccatggttgaaattgaggaaaacaagaaatcgacagctgctgcattgaaactgatggagaatgagctgcaaaagctgaaagggtcaactaaagtgaaacctaggaatatggcacagtgttttctgcttttggcattgattgggtgtgttatgttccatgtcccgtgtcactttctggagtctaccgtggtgctcctgctaagtgttgagtcggatgttgattttgggaggacccacgggcgaagggcgtgtcactttcatgaggacccacgggccgaaccccgtgtcactttcatgaggtatagtgttgggttccttatcagagttgcgttcggatatatagagttgtgttcctccaatctgtgctgggtttcagggttccatgttgatttttgggaggacccgcggtcggaagcccgtgtcactttccggagtctacagcgttgcgttctgaatgctagtgttatgttccatgtcccgtgtcactttctggagtctaccgtggcgctcctgctaagtgttgagtcggatgggcggatgttgattttgggaggacccacgggtgaagggtgtgtccctttcatgcggtatagtgttgggttccttatcagtgttgcgttccttcaaggcgttgagtttcagggtcccatgttgatttttgggaggacccacgtgttggagtctaccatggggctcctgctaagtgttgagtcagatgggcagatgttggttttgggaggacccacgggcgaagggcgtgtcactttcatgcggtatagtgttgcgttcctccaatctgttgggtttcagggtcccatgttgatttttgggaggacccgcgggttccatgttgattttttggaggacccgtggtccgtagtccgtgtcactttccggagtctacagtgttgcgttctgaatgctagtgttatgttccataacccgtgtcactttctggagtctaccgtggggctccttctaagtgttgagtcggatgggcggatgttggttttgggaggacccacgggcgaacgacggtcccatgttgatttttggcaggacccgcagtctgaagcccgtgtcactttccggagtctacagtgttgcgttctgaatactagtgttatgttccatgtcccgtgtcactttctggagtctaccgtggcgctcctgctaagtgttgagtcagatttgcggatgttgattttgggaggacccacggcaaacgcaggcttcccaaagcggcatggtcagttcgagctcgccctggggatgccgccgctctgcccatcgcagacgccgtggagcatcgacggcgacgtcgcaggacatgaggtcgcctaccagctggtgacccgaaacacccaggcggcccgccgccacgtcgagataacggccctgacggtgccgacattttggggcagcgggcattgcccggagccgctcgtcatcctaagaaagggcagcacggtggcctgctacggctacccccggagccactcgtcgtccatgaaaagggcgacgaactggcctggcaagatctggcggcgcggggatcgaatggacggacgacaagagcgagcgaagaagtcctggcggcttggtgagaaaatggtggcgctgggggcgatgggaacggaggtgcggatggtggcagcagtggagaatgaagcgacggcgacgtcgagactgattgtcgtcgtccgcggccatggggcggagcaccttccggagaagtcgagacttatacgattaaaaaagggaaccgcctcaccgattctgatgtcgaaggtaacctggtgccgatccgcaggggtgaagaagaaagccaacatgccacaggggaagagtaagaagaacgtggtgaaggagaaagccaaaaagattaagaagaacgcggaatcgaggtattcactaggatcagtaacaaagttaatccaactccttccacctgctgcccgttagaaaattgtagaccttgatttccaaaacttactcaatctgaagttaggaaacaccaatagagtttttacccactttctcatggatagagccaaagttcatgaaaatacagatcaaattgagatcaacattagagaaggtgtttcaatttggataacaaaggctgcagtgcaaaaatgttttgagtttccccctggtacagataagaagctgccaatagatccaactacaaaaacatttgattcactctacagagtattgagtgtttcagaaaaaaaaatcaatgtaaagaagaagaagatgaaggagaatatgaaggagaagcaggttgaggaggagaagattgagatgaacatggaggagaagaagcagaatctggttgaggatgaaggtagtcaacaggaggaaagtgaagaggaggacggtgaagatggggaaattggagaggaggaaggtgaagatggggcaattggagatgctaaagtggggggagatggagacaaggaaagtgctaaaaggggggggataaaggttgctgtcagaagaaatgttttgactcctttgaacatcaatttgatgttacagaacatcaacaacgatgagattctcaaacttcttgttaaaagaaatgaagacactgatggtacagaaccgaatcttgacattgacctgattgtcagatgtttctttgcggtggtgttggacagactgttgttgccacaagccaccttttatctgagctcagctacattgaaagcagtgactgatctagacagactgaaaacagttgactggtcaattttattttcgaaaatttgaagagcagtgttgctgagtttggcaaggataagaagaaactgatatcagggtgtacaactgtgctaatggttgttttcttggaccatctcgtggaaaaccctttggatcctttgaccatccctaggatcaacttgtatacttcagattttatcgcagacctgataatggtacccaaggatagccctggccctgaaaaaaagcgtcgtaagactcaagatgaaaaagaagactagtaatgttataaagaatctcgctactctcaattttaagaattcggaggatacatgctatcatgaagattcagaaatggtgccaagtccagggagagcatcgccggttgttgcttctgtacaatctcataagaactttgttgatcatgcagatttagaaattgtgccatctcatgagaactctgttgatctacatagtgtttacatggcacatgtattggaaagaagcagacaaagcatagtagtggacatattggactacaatatacctgaatctacttttgcagattgtttgctacctacaggtcatatgcacacagatgtattttatttacaatgccaactgttgtcaaaggattggaaggataaagtaattcttagctggaaagctactcaagaactgattcatcaagatattggagttaaggagctggacaaggaacttactgcagaggttatgaacaaagtggatctggtttgtgctttgttttatattacagtagagttttttcagattgacagtagagtttgtgctttttttagatatttattcctatcattcatgccggtcactggtcccttgttattctttccactgccaaacaagagacatatatccttgactcctacccaaggcacagtggggtggccaaggatgttttaactcaactgcagaagtatttggataataaacacaactttgacatgtctaactacactgaccatgtgccacctgttcagcatcaaaaaaacaattacgattgtggctttcatgttttattgtatattgaagaattcatgaaggagaagatgtataaaatcaacaaaaaaatggtgttgaaattcagaaagcagctttgcatgaatctcttgtaccatcctttgaacagaataaatcttgtggaattcagaaagaagctgggtattacattgaaaagaaaacttcctggtatacttgatcttactattgaaggtgagaggagtgaatctgaggctgcagtgataattgaaatagagaacagagatgataagactctagaggatgaacatatttcagttgagaaagagtaaggtaaaaaagaagagcatgtactatcaactgacacaaagaatgacgaagcttcatccccatctgacgaagagcctgagcagagtgagtcatctgagcagactgtgtatgaaagatggatgattccaaaggatcattatcacctgagaaagagcaagctggagaaaaatatcctcaaacgaaaaaagaggttgggcaaagacaacatgtcctctcaggatatgatttctccagtgtttggcaagaggcttgtgcctgcaaacacacattttacctctcttaggaagttgcgaaaacacaagtttacgtctgataagatcaacgatgagatctgcaaacatatcttgaactacaatgaacgggagttgttaagtgtggggcagactaccatgactgggggtcagctggaaaagtacgtaaatgaaggtgacaatggtgataaaatactcagagcattcatcacatgcttcacttgtgatgaaaagttcaatcaagggaacatcacaaccgtcatcccgccacatgaagtatccgaagagggtgaactctccaaagttgatgctgcacaacttgtagaagaaatcaaagctgtactcaaaggcaccaatgttgcacgtgtacgcaaagacaccgaatccaccaaagatcccaaagtgaaagtctttcgaaacatgaggaggacatttatattttttcctttctacaagaatgaagaattgtttgtatttcatgtcgatacgaaaagactacccatcattgatgctctgttttgcaagatgtcatcattgtcgtttgaagatagatcctgactaggaaagtctatcatgggctgtctactcaaagccatgaaggattccggcttcatggtgaaaaaatatggtgattgtaggttcacagttactgtaactgaactcgaattcaaagatagtgcctcagcgctcataagttttattgagaacttcacttctaagttggacgacaatgccaagaaactgaaaaagggtgacaaggactggctggaaccttacaagaagtcgacagtggcataccttgtttgtcacactgaaaataaggtggtgttgcctgacgatattgtgaagtacaagcaaaacaagtgaggtggttgagtcgttaatgggtccagtggctgtgttttaagacttgtatcacactacttgtatggctttattctctgaagctgttccattgttgccgttagtaacaggtgttgcttttgtctctgctcagtgggtgattcatttcatccagagttgctgcaactttaatcagtctatagtgttgggttcctagctcagtgttgagttctaaatgatcgtgttgtgttcctaccaagtgttgagctgcacgacggcgtgcgcagccgcagccgcaccggcgaggagcgtttagaactctgttgatctacatagtgtttacaccggctcaacagagttctcatgttgatttttgaaggacccacgtgttgggttcctgctcagtgttgagttctgaacgatagtgttatgttccatgggcccttgttgatttcgagaggacccacgggccgaacggcgtgtcactttcatgcgtctatagtgttgggttcctgtctagtgttgagttctcaactatggtgttgtgttcctccaagaagttgagtttcaggggcctattatattgtctcagttaatgggtaactcagttaatcctatatattgtgtcagttaatgggaactcagttaatggtatatgttgtctcagttaatg

SEQ ID NO: 203358 - DNA, 7543 bp, Zea Mays
atggacacaccgacgcgagttcttccccctgctgggcaaatccgatccataaatgtaactccgggaaggctcaccgatggcttgttacccttaccaatgatgaacatgggcccagatttgagccgggtctggtcatggttcgtggtcccatgcagacttgatgcgtgtaggcacacaacagcaaaacagctatttgaggagatgccgtcattgtcatccttactctctggctccaatactgcgagtgctgagcttcctctaatcccttgcaagctctgcaatggggtggtgattgagcgggtctccaaacaaccagaaaccacgtcgaggaagttctaccggtgcagagccaagaaaacggttatttctcaatttttgctcaattggtaagttatatggtttgggtaattttgagggcccaagtctctcttctttacaggatgggtcttaatgtgattttttccactggcaagcgagctatgttgttttgttaatcgaggatgggtttgtcagtggtgatcgacgccttgagttgttaatgatcgcacttaatgatcatggcaaagccgttgaatctctaaccaattccatcagagagatgaagaaaaagctgtccaacctggagttagtgatggaagagctggataacgtgaaaaatttgatgaaggcagccatggttgaaattgaggaaaacaagaaatcgacagctgctgcattgaaactgatggagaatgagctgcaaaagctgaaagggtcaactaaagtgaaacctaggaatatggcacagtgttttctgcttttggcattgattgggtgtgttatgttccatgtcccgtgtcactttctggagtctaccgtggtgctcctgctaagtgttgagtcggatgttgattttgggaggacccacgggcgaagggcgtgtcactttcatgaggacccacgggccgaaccccgtgtcactttcatgaggtatagtgttgggttccttatcagagttgcgttcggatatatagagttgtgttcctccaatctgtgctgggtttcagggttccatgttgatttttgggaggacccgcggtcggaagcccgtgtcactttccggagtctacagcgttgcgttctgaatgctagtgttatgttccatgtcccgtgtcactttctggagtctaccgtggcgctcctgctaagtgttgagtcggatgggcggatgttgattttgggaggacccacgggtgaagggtgtgtccctttcatgcggtatagtgttgggttccttatcagtgttgcgttccttcaaggcgttgagtttcagggtcccatgttgatttttgggaggacccacgtgttggagtctaccatggggctcctgctaagtgttgagtcagatgggcagatgttggttttgggaggacccacgggcgaagggcgtgtcactttcatgcggtatagtgttgcgttcctccaatctgttgggtttcagggtcccatgttgatttttgggaggacccgcgggttccatgttgattttttggaggacccgtggtccgtagtccgtgtcactttccggagtctacagtgttgcgttctgaatgctagtgttatgttccataacccgtgtcactttctggagtctaccgtggggctccttctaagtgttgagtcggatgggcggatgttggttttgggaggacccacgggcgaacgacggtcccatgttgatttttggcaggacccgcagtctgaagcccgtgtcactttccggagtctacagtgttgcgttctgaatactagtgttatgttccatgtcccgtgtcactttctggagtctaccgtggcgctcctgctaagtgttgagtcagatttgcggatgttgattttgggaggacccacgggtgaagggcgtgtcactttcatgaggtatagtgttgggctccttctcagtgttgtgttcggaactatgctgttgcgttccttcaaggtgttgagtttcagggtcccatgttgatttttgggagttatagtgttgagtttcagggtcccttttagactggaaaagtcttctgccataatcgtcagatttacctaaatgatgtaaaaaatggtttggaaaactctaaaacattaaataaagatcacataacattaattaataaaaaatgatataatacacaaacattaagtaagaattatagaaagttgaggcaccagtttgtatgcaggattcttcctcctaagatgtggaaagctaattagttttaaaccataatccacctcaatatatatgaattaaagtgcatagatgtggcaacaacgttgaagataaacatctatttgtacagcaaacgcaggcttcccaaagcggcatggtcagttcgagctcgccctggggatgccgccgctctgcccatcgcagacgccgtggagcatcgacggcgacgtcgcaggacatgaggtcgcctaccagctggtgacccgaaacacccaggcggcccgccgccacgtcgagataacggccctgacggtgccgacattttggggcagcgggcattgcccggagccgctcgtcatcctaagaaagggcagcacggtggcctgctacggctacccccggagccactcgtcgtccatgaaaagggcgacgaactggcctggcaagatctggcggcgcggggatcgaatggacggacgacaagagcgagcgaagaagtcctggcggcttggtgagaaaatggtggcgctgggggcgatgggaacggaggtgcggatggtggcagcagtggagtgagcgagcgtggcctggtttcttcttgaggaaatggcattgcagaggcgatgggaatggagatgcgaatggggggaggagttgccgtgccgacggccgaccgcgatttttttgggaagaatcgtgagaagggataacacacagagagaaaaatgagtgttaccttcgcgttacaggaatgaagcgacggcgacgtcgagactgattgtcgtcgtccgcggccatggggcggagcaccttccggagaagtcgagacttatacgattaaaaaaggtaggcgaagagtcggcgcagcatttcacacgcagtagtgactgacacctggatggttggattagtggcacggacaaacgatcttacggctacggaaatttggacgatgtgtccaccttcgtttgcgagcagcggaccctggtttgatatattaaaaaaaggcagccgaagagtcggcgcagcatttcacacgcagtagtgagtgacacctggatggttggattagtggcacggacaaacgatcttacggctacggaaatttggacgacgtgtccaccctcgtttgcgagtagcggaccctggtttaatatatagaaatagtgttgagttctcaacactgtatactcctgaaagtgacacgggcccatggaatgtgacactatcgttcagaactcatgaaagtgacacgttgttcggtgtgaaagtgttgatttagggtttagtgtaaccgcccgttcggtgtggaagtgttcaaatttctctacgcgcgttcggtagcctcaccgacggcgacggcgacctcacctcaccgacggcgacggcctcggcgacggcgacaacgatccccaattctcttcgcgacctgaccgtctccacttcggtaaacccaccttcccttctctcctcgttccttgtcagggaaccgcctcaccgattctgatgtcgaaggtaacctggtgccgatccgcaggggtgaagaagaaagccaacatgccacaggggaagagtaagaagaacgtggtgaaggagaaagccaaaaagattaagaagaacgcggaatcgaggtattcactaggatcagtaacaaagttaatccaactccttccacctgctgcccgttagaaaattgtagaccttgatttccaaaacttactcaatctgaagttaggaaacaccaatagagtttttacccactttctcatggatagagccaaagttcatgaaaatacagatcaaattgagatcaacattagagaaggtgtttcaatttggataacaaaggctgcagtgcaaaaatgttttgagtttccccctggtacagataagaagctgccaatagatccaactacaaaaacatttgattcactctacagagtattgagtgtttcagaaaaaaaaatcaatgtaaagaagaagaagatgaaggagaatatgaaggagaagcaggttgaggaggagaagattgagatgaacatggaggagaagaagcagaatctggttgaggatgaaggtagtcaacaggaggaaagtgaagaggaggacggtgaagatggggaaattggagaggaggaaggtgaagatggggcaattggagatgctaaagtggggggagatggagacaaggaaagtgctaaaaggggggggataaaggttgctgtcagaagaaatgttttgactcctttgaacatcaatttgatgttacagaacatcaacaacgatgagattctcaaacttcttgttaaaagaaatgaagacactgatggtacagaaccgaatcttgacattgacctgattgtcagatgtttctttgcggtggtgttggacagactgttgttgccacaagccaccttttatctgagctcagctacattgaaagcagtgactgatctagacagactgaaaacagttgactggtcaattttattttcgaaaatttgaagagcagtgttgctgagtttggcaaggataagaagaaactgatatcagggtgtacaactgtgctaatggttgttttcttggaccatctcgtggaaaaccctttggatcctttgaccatccctaggatcaacttgtatacttcagattttatcgcagacctgataatggtacccaaggatagccctggccctgaaaaaaagcgtcgtaagactcaagatgaaaaagaagactagtaatgttataaagaatctcgctactctcaattttaagaattcggaggatacatgctatcatgaagattcagaaatggtgccaagtccagggagagcatcgccggttgttgcttctattgtttgctacctacaggtcatatgcacacagatgtattttatttacaatgccaactgttgtcaaaggattggaaggataaagtaattcttagctggaaagctactcaagaactgattcatcaagatattggagttaaggagctggacaaggaacttactgcagaggttatgaacaaagtggatctgatatttattcctatcattcatgccggtcactggtcccttgttattctttccactgccaaacaagagacatatatccttgactcctacccaaggcacagtggggtggccaaggatgttttaactcaactgcagaagtatttggataataaacacaactttgacatgtctaactacactgaccatgtgccacctgttcagcatcaaaaaaacaattacgattgtggctttcatgttttattgtatattgaagaattcatgaaggagaagatgtataaaatcaacaaaaaaatggtgttgaaattcagaaagcagctttgcatgaatctcttgtaccatcctttgaacagaataaatcttgtggaattcagaaagaagctgggtattacattgaaaagaaaacttcctggtatacttgatcttactattgaaggtgagaggagtgaatctgaggctgcagtgataattgaaatagagaacagagatgataagactctagaggatgaacatatttcagttgagaaagagtaaggtaaaaaagaagagcatgtactatcaactgacacaaagaatgacgaagcttcatccccatctgacgaagagcctgagcagagtgagtcatctgagcagactgtgtatgaaagatggatgattccaaaggatcattatcacctgagaaagagcaagctggagaaaaatatcctcaaacgaaaaaagaggttgggcaaagacaacatgtcctctcaggatatgatttctccagtgtttggcaagaggcttgtgcctgcaaacacacattttacctctcttaggaagttgcgaaaacacaagtttacgtctgataagatcaacgatgagatctgcaaacatatcttgaactacaatgaacgggagttgttaagtgtggggcagactaccatgactgggggtcagctggaaaagtacgtaaatgaaggtgacaatggtgataaaatactcagagcattcatcacatgcttcacttgtgatgaaaagttcaatcaagggaacatcacaaccgtcatcccgccacatgaagtatccgaagagggtgaactctccaaagttgatgctgcacaacttgtagaagaaatcaaagctgtactcaaaggcaccaatgttgcacgtgtacgcaaagacaccgaatccaccaaagatcccaaagtgaaagtctttcgaaacatgaggaggacatttatattttttcctttctacaagaatgaagaattgtttgtatttcatgtcgatacgaaaagactacccatcattgatgctctgttttgcaagatgtcatcattgtcgtttgaagatagatcctgactaggaaagtctatcatgggctgtctactcaaagccatgaaggattccggcttcatggtgaaaaaatatggtgattgtaggttcacagttactgtaactgaactcgaattcaaagatagtgcctcagcgctcataagttttattgagaacttcacttctaagttggacgacaatgccaagaaactgaaaaagggtgacaaggactggctggaaccttacaagaagtcgacagtggcataccttgtttgtcacactgaaaataaggtggtgttgcctgacgatattgtgaagtacaagcaaaacaagtgaggtggttgagtcgttaatgggtccagtggctgtgttttaagacttgtatcacactacttgtatggctttattctctgaagctgttccattgttgccgttagtaacaggtgttgcttttgtctctgctcagtgggtgattcatttcatccagagttgctgcaactttaatcagtctatagtgttgggttcctagctcagtgttgagttctaaatgatcgtgttgtgttcctaccaagtgttgagctgcacgacggcgtgcgcagccgcagccgcaccggcgaggagcgtttagaactctgttgatctacatagtgtttacaccggctcaacagagttctcatgttgatttttgaaggacccacgtgttgggttcctgctcagtgttgagttctgaacgatagtgttatgttccatgggcccttgttgatttcgagaggacccacgggccgaacggcgtgtcactttcatgcgtctatagtgttgggttcctgtctagtgttgagttctcaactatggtgttgtgttcctccaagaagttgagtttcaggggcctattatattgtctcagttaatgggtaactcagttaatcctatatattgtgtcagttaatgggaactcagttaatggtatatgttgtctcagttaatg

SEQ ID NO: 203359 - DNA, 1064 bp, Zea Mays
  misc_feature (1063)..(1064): n is a, c, g, or t
gtgatatagggggaaaaatttagagggaaccgctgcggatagcctaagccgtggagtgccgccagtggcagcggtggaaactggcagctctgaccacatccaatccaactgcccttgctgcacaaccgaatcccacgccttctcttccttttcccttgctctctccagcccctgctgctcctgccgggcgctgcctgccgccgctgaccgcccccgctctctctctctctctctctctctctctctctctctctctcgtcccccaatcaccccaattgccgggtgctcctcttcctgtcacccccatgttgactgctgcccgccaggccgccagagagggaggattaggaaaggggggaaagagagacggacggcttctcgggagtgggttgctggccgtggaacatttcttcagttgggcccactctctgtgccggttccatcgggttttgacgcaagagtagaggacttggaacccgtaaaacccatccggagaattttccctgcgcgtcccatgattaggagctgcggctggacagtgccctacgctctggagttttagtgcgaatcgttgccagtttcagtcaacttttgatggagcccaggtgttgagcgccaatttgggagttccagctgacgctgcagtctgcattcttctaaggccatcagtgaggaattttcgttccttggtggcagatgggttcctccagctctaaagtggacaatgaggagcccgtgaggcgctccaaggacaggaggcggctcatgaagcagctggtgcgccgccgcccagagcttgcagctgcgcacattgcatacctgcacgccctccgcaacacaggagccactctccggcaatttgtggagctggagtctgctttgtcacagcagcctccggtaggccttgcggcgccgccctcgcctactccacagtcgctgccgcagccgcagcccccgccacctcctgaaccctcactgccaccctcgccacaccccccgccgcctctgccttttagtccagtaaccaccataagaaagatggagaagagggatggtgaattcnn

SEQ ID NO: 203360 - DNA, 972 bp, Zea Mays
  misc_feature (971)..(972): n is a, c, g, or t
atccaatccaactgcccttgctgcacaaccgaatcccacgccttctcttccttttcccttgctctctccagcccctgctgctcctgccgggcgctgcctgccgccgctgaccgcccccgctctctctctctctctctctctctctctctctctctctctcgtcccccaatcaccccaattgccgggtgctcctcttcctgtcacccccatgttgactgctgcccgccaggccgccagagagggaggattaggaaaggggggaaagagagacggacggcttctcgggagtgggttgctggccgtggaacatttcttcagttgggcccactctctggtaagtgccggttccatcgggttttgacgcaagagtagaggacttggaacccgtaaaacccatccggagaattttccctgcgcgtcccatgattaggagctgcggctggacagtgccctacgctctggagttttagtgcgaatcgttgccagtttcagtcaacttttgatggagcccaggtgttgagcgccaatttgggagttccagctgacgctgcagtctgcattcttctaaggccatcagtgaggaattttcgttccttggtggcagatgggttcctccagctctaaagtggacaatgaggagcccgtgaggcgctccaaggacaggaggcggctcatgaagcagctggtgcgccgccgcccagagcttgcagctgcgcacattgcatacctgcacgccctccgcaacacaggagccactctccggcaatttgtggagctggagtctgctttgtcacagcagcctccggtaggccttgcggcgccgccctcgcctactccacagtcgctgccgcagccgcagcccccgccacctcctgaaccctcactgccaccctcgccacaccccccgccgcctctgccttttagtccagtaaccaccataagaaagatggagaagagggatggtgaattcnn

SEQ ID NO: 203361 - DNA, 1325 bp, Zea Mays
caaacggtctcaggctgttaggcgcgccactcacctcagccgctcgcaaaaccctctcctctcgagaagcagcgcggtggagaccggagagaagcagtcggcagccgggaagcccgtcacgtgcctttcttcctcgacgtgccatgattaacggaatattgagcactcgggagttgtagtcagacctggagcgacaatgaagtgtgacccaggagagttctggtgccatgtttcagagatagcattacatgatagaaaaccagcaccatctctgcccttggcttcaaatgttggcattgcaagagaaatgtcacaagtaccaaagaaggctattccattattcccaaaagcagatgatgataaaagcaaagaaagtaaatgtgatgtggagaagcctgctgctactgagtcctctaaaccgaaggttagcttggaggaaacaaaggatcctgagaagcatgaagttgatgttggtggcaccgacgatgatgaaagtgacgaagactttgttgattcagaagagggtgaatcagatgatgacgagagtactaagagcaagaataggccaagcagcctcacccttgaagacacctccagggaaaaaggcaaggatcacaacaccgtctgtgggcaaaaaaaacctgctgagaagtgttacattcgatcgcaaacttgtatagctcatagttcttttccatggcactggaacctcaatttgtgatgtgtagtttgcagttagtgatgatgctaagaaaaatatccacgtccatgtcgaagttggtgaagacggctcgctcaatcattgacaactacaagcaatccactggtcatagctgcaagtcgtgcagcaagtaattttctcgcctcgtgcggtcgaagcacagtgctcattgcaagatcaaggtgaagcaagcacagtgctcattgcaaggtgaattataaccagtgctcattgcaaggtgaagctagtgatgatgctaagaaaagtaccagaatttttctcacacatgggcgtcctttttggtcgtggactttctactcgtccgttagtctggaaactcattgcaagctgaagcacagtgctcgaaagtgaagtagcattcatggactatgttagggacgttcgttattaggcaagtgaattgtgggtttgcgtttactgctacaaacgggctctaaggcagcatcaacagaatgctattgcttattgcgggttgttggaaagttgctgttttttctgctcaacagaatgtgtaattgagattttcttgaattagaaagttgttgttttgcagcgtgtattgatatataacccctcatttcct

SEQ ID NO: 203362 - DNA, 1235 bp, Zea Mays
caaacggtctcaggctgttaggcgcgccactcacctcagccgctcgcaaaaccctctcctctcgagaagcagcgcggtggagaccggagagaagcagtcggcagccgggaagcccgtcacgtgcctttcttcctcgacgtgccatgattaacggaatattgagcactcgggagttgtagtcagacctggagcgacaatgaagtgtgacccaggagagttctggtgccatgtttcagagatagcattacatgatagaaaaccagcaccatctctgcccttggcttcaaatgttggcattgcaagagaaatgtcacaagtaccaaagaaggtaatgatcttgttctttcagtattggacatccctaatgttttttatcacttggcataagcaacatggtgattgatgtttcaaatgatgaatctgatgaggaggttccacaggctattccattattcccaaaagcagatgatgataaaagcaaagaaagtaaatgtgatgtggagaagcctgctgctactgagtcctctaaaccgaaggttagcttggaggaaacaaaggatcctgagaagcatgaagttgatgttggtggcactgacgatgatgaaagtgacgaagactttgttgattcagaagagggtgaatcggatgatgacgagaattccagtgatggggatgaatgtgagagttcaaatgaagaagatgaagactctccaaatagtgctaagggcaagaataggccagcagcaacacccttgaagacacctccagggaagaaggcaaggaccacaacatcgtctatgggcaaaagaccagtcagtgtcagtgatgatgcaaagaaaagtatccacgtcactggttatggctgcaagtcgtgcagcaagttcttgtatcagaatttttcccaactagatgcggtcgtgcattctgatacatgggcgtcaaactcattgcaaggtgaagcacagtgctcgaaagtgaagtagcattcatggactatgttagggaagttcgttattaggcaactgaattgtgggtttgcgtttacaaacgggctctaaggcagcatcacaatgtccgatgcgtatttgattattgtgggttgttggaaagttgctgttttttctgctcaacagaatgtgtaattgagattttcttgaattagaaagttgttgttttgcagcgggtattgacatataacccctcatttccttaccgtaccgtctggaagttctgaa

SEQ ID NO: 203363 - DNA, 1125 bp, Zea Mays
caaacggtctcaggctgttaggcgcgccactcacctcagccgctcgcaaaaccctctcctctcgagaagcagcgcggtggagaccggagagaagcagtcggcagccgggaagcccgtcacgtgcctttcttcctcgacgtgccatgattaacggaatattgagcactcgggagttgtagtcagacctggagcgacaatgaagtgtgacccaggagagttctggtgccatgtttcagagatagcattacatgatagaaaaccagcaccatctctgcccttggcttcaaatgttggcattgcaagagaaatgtcacaagtaccaaagaaggctattccattattcccaaaagcagatgatgataaaagcaaagaaagtaaatgtgatgtggagaagcctgctgctactgagtcctctaaaccgaaggttagcttggaggaaacaaaggatcctgagaagcatgaagttgatgttggtggcactgacgatgatgaaagtgacgaagactttgttgattcagaagagggtgaatcggatgatgacgagaattccagtgatggggatgaatgtgagagttcaaatgaagaagatgaagactctccaaatgtagtgctaagggcaagaataggccagcagcaacacccttgaagacacctccagggaagaaggcaaggaccacaacatcgtctatgggcaaaagaccagtcagtgtcagtgatgatgcaaagaaaagtatccacgtcactggttatggctgcaagtcgtgcagcaagttcttgtatcagaatttttcccaactagatgcggtcgtgcattctgatacatgggcgtcaaactcattgcaaggtgaagcacagtgctcgaaagtgaagtagcattcatggactatgttagggaagttcgttattaggcaactgaattgtgggtttgcgtttacaaacgggctctaaggcagcatcacaatgtccgatgcgtatttgattattgtgggttgttggaaagttgctgttttttctgctcaacagaatgtgtaattgagattttcttgaattagaaagttgttgttttgcagcgggtattgacatataacccctcatttccttaccgtaccgtctggaagttctgaa

SEQ ID NO: 203364 - DNA, 1646 bp, Zea Mays
caaacggtctcaggctgttaggcgcgccactcacctcagccgctcgcaaaaccctctcctctcgagaagcagcgcggtggagaccggagagaagcagtcggcagccgggaagcccgtcacgtgcctttcttcctcgacgtgccatgattaacggaatattgagcactcgggagttgtagtcagacctggagcgacaatgaagtgtgacccaggagagttctggtgccatgtttcagagatagcattacatgatagaaaaccagcaccatctctgcccttggcttcaaatgttggcattgcaagagaaatcttttatcatatatgacagtgtcacaagtaccaaagaaggtaatgatcttgttctttcagtattggacatccctaatgttttttatcacttggcataagcaacatggtgattgatgtttcaaatgatgaatctgatgaggaggttccacaggctattccattattcccaaaagcagatgatgataaaagcaaagaaagtaaatgtgatgtggagaagcctgctgctactgagtcctctaaaccgaaggttagcttggaggaaacaaaggatcctgagaagcatgaagttgatgttggtggcactgacgatgatgaaagtgacgaagactttgttgattcagaagagggtgaatcggatgatgacgaggttggtataagtgatgaatcatgactgagatatcatttcctccatgttccagtttttttttctctctcatctctagattgttttattgtgataccggtataaaatattgagtgaacaatcaaagtataagtcattttgttgtattactgaaggtaacctaggtaatcatatattgtggaccagatttcttatgtatacgattatacttttttccttatgtttattatactactattggtttgagtctgctgttcgcttcacgagccttgtacctttttcaacctgaaactaggcatttttccggtaagtgcagatgcatttctaccagcactggatatcatgtgtattctgaccatgttattcttttgcatgtcatggttgatgctcagaattccagtgatggggatgaatgtgagagttcaaatgaagaagatgaagactctccaaatgtagtgctaagggcaagaataggccagcagcaacacccttgaagacacctccagggaagaaggcaaggaccacaacatcgtctatgggcaaaagaccagtcagtgtcagtgatgatgcaaagaaaagtatccacgtcactggttatggctgcaagtcgtgcagcaagttcttgtatcagaatttttcccaactagatgcggtcgtgcattctgatacatgggcgtcaaactcattgcaaggtgaagcacagtgctcgaaagtgaagtagcattcatggactatgttagggaagttcgttattaggcaactgaattgtgggtttgcgtttacaaacgggctctaaggcagcatcacaatgtccgatgcgtatttgattattgtgggttgttggaaagttgctgttttttctgctcaacagaatgtgtaattgagattttcttgaattagaaagttgttgttttgcagcgggtattgacatataacccctcatttccttaccgtaccgtctggaagttctgaa

SEQ ID NO: 203365 - DNA, 835 bp, Zea Mays
gatcactgagatcattgctttcctgtcagacactatttatcgtgtccctgtgcaacaatcagctcttgtatcttattgaaaaggagttaatctggatatttggtcacgttcctgggttttctgccacccttccgtctgtgattgccagactccatgctgccaaggacaagtatctatcaccaccagccccagtctcaccgtcatcacaaatgggggagaaacagtggaatttctcttttacatctgtctggaactctatagtgtggcttgtgcttttgaacttcttcattaagatagtcacgtcaacagcacaggattatctcaaaaagcagcaggatacggagatggaacttatttcggattccccgatccaggaccattctaaaactaactagtggcgcagctagtggtgtttatacacagctgctagcagcaaagattctcctctgtagcttaagcccctgcagatgatttcaagttccaacaattagtattagtagttattcatctgcgcagtggacaaaaacatggacacatggtcttggttaacttgtcagttgacgaccttttgtcattgagcctgtacctgtactggcagctcctgttggagtcattctgtttattttcggacatctacacggataaacagtaggaattgtttatggagcacggttggctttttttgaagtgaagagcacggttggctttgtgagatgtatcattcatacctgttcctatgtattctgggaacttgaaatgcaatagaaacctgggaggatttaacaaggatacatcattgtgtcattactatgtgcatgtggtttgcaatttgcac

SEQ ID NO: 203366 - DNA, 947 bp, Zea Mays
cttcagtgtggatattttacacctgttccaaatccactctttgaccttgctggtattatgtgtgggcaatttggtgtgcctttctgggagttcttgtttgctactttgattgggaaagccatcatcaagactcatattcagacactatttatcgtgtccctgtgcaacaatcagctcttgtatcttattgaaaaggagttaatctggatatttggtcacgttcctgggttttctgccacccttccgtctgtgattgccagactccatgctgccaaggacaagtatctatcaccaccagccccagtctcaccgtcatcacaaatgggggagaaacagtggaatttctcttttacatctgtctggaactctatagtgtggcttgtgcttttgaacttcttcattaagatagtcacgtcaacagcacaggattatctcaaaaagcagcaggatacggagatggaacttatttcggattccccgatccaggaccattctaaaactaactagtggcgcagctagtggtgtttatacacagctgctagcagcaaagattctcctctgtagcttaagcccctgcagatgatttcaagttccaacaattagtattagtagttattcatctgcgcagtggacaaaaacatggacacatggtcttggttaacttgtcagttgacgaccttttgtcattgagcctgtacctgtactggcagctcctgttggagtcattctgtttattttcggacatctacacggataaacagtaggaattgtttatggagcacggttggctttttttgaagtgaagagcacggttggctttgtgagatgtatcattcatacctgttcctatgtattctgggaacttgaaatgcaatagaaacctgggaggatttaacaaggatacatcattgtgtcattactatgtgcatgtggtttgcaatttgcac

SEQ ID NO: 203367 - DNA, 1176 bp, Zea Mays
tcaggtttgaaccagcctcgatgcaatattggcaagggagctgtctataaaccttctccaaaccctacctttgtgtgaactttcatcagtgggtgctcgcttatcaggaagcgagtcaaaagctgttcaggagcttgatgcagctacttccaaagaagatgggccagtagcatcatcccttaatcgaaccaagcgttggcttctctctcactcccaacatctcaacttcttctctatcttgattcttgcttcggttccaaatccactctttgaccttgctggtattatgtgtgggcaatttggtgtgcctttctgggagttcttgtttgctactttgattgggaaagccatcatcaagactcatattcagacactatttatcgtgtccctgtgcaacaatcagctcttgtatcttattgaaaaggagttaatctggatatttggtcacgttcctgggttttctgccacccttccgtctgtgattgccagactccatgctgccaaggacaagtatctatcaccaccagccccagtctcaccgtcatcacaaatgggggagaaacagtggaatttctcttttacatctgtctggaactctatagtgtggcttgtgcttttgaacttcttcattaagatagtcacgtcaacagcacaggattatctcaaaaagcagcaggatacggagatggaacttatttcggattccccgatccaggaccattctaaaactaactagtggcgcagctagtggtgtttatacacagctgctagcagcaaagattctcctctgtagcttaagcccctgcagatgatttcaagttccaacaattagtattagtagttattcatctgcgcagtggacaaaaacatggacacatggtcttggttaacttgtcagttgacgaccttttgtcattgagcctgtacctgtactggcagctcctgttggagtcattctgtttattttcggacatctacacggataaacagtaggaattgtttatggagcacggttggctttttttgaagtgaagagcacggttggctttgtgagatgtatcattcatacctgttcctatgtattctgggaacttgaaatgcaatagaaacctgggaggatttaacaaggatacatcattgtgtcattactatgtgcatgtggtttgcaatttgcac

SEQ ID NO: 203368 - DNA, 1653 bp, Zea Mays
gtcaccctttggtcctgtcctacaaatatttagttatcatgtcttaattgtatagtcttgaaggctttgaaacatatgtacttcaacaaattagttaggcagaaaaggcactttattttggttttcattgctagtgtattaaaggattgatataaaccatcctattcctgcttagttcgtgtttgcaaccatatcagacttcataaagaaaacagttgaaggtgggcagggcaccaatcgcctgattacatatcaaatacagacaacaggttctggtttgcatacatttgtgctgtatctgggtcctcatattgctctgttcactattaaggctgttcaatgtggtcgaattgatctaaaaattgctccatatgataccatacagctaaaggttgggccatcatggcttgacaagaaatgttcagaatttggaccacctgtgtatccagcatcagctcattcagttaggatcccagtcttcgacctactacctcagatacagctggaggcagttctttggggaattgggactgcgcttggtgagctccctccttattttatatcacgagcagctcgcttatcaggaagcgagtcaaaagctgttcaggagcttgatgcagctacttccaaagaagatgggccagtagcatcatcccttaatcgaaccaagcgttggcttctctctcactcccaacatctcaacttcttctctatcttgattcttgcttcggttccaaatccactctttgaccttgctggtattatgtgtgggcaatttggtgtgcctttctgggagttcttgtttgctactttgattgggaaagccatcatcaagactcatattcagacactatttatcgtgtccctgtgcaacaatcagctcttgtatcttattgaaaaggagttaatctggatatttggtcacgttcctgggttttctgccacccttccgtctgtgattgccagactccatgctgccaaggacaagtatctatcaccaccagccccagtctcaccgtcatcacaaatgggggagaaacagtggaatttctcttttacatctgtctggaactctatagtgtggcttgtgcttttgaacttcttcattaagatagtcacgtcaacagcacaggattatctcaaaaagcagcaggatacggagatggaacttatttcggattccccgatccaggaccattctaaaactaactagtggcgcagctagtggtgtttatacacagctgctagcagcaaagattctcctctgtagcttaagcccctgcagatgatttcaagttccaacaattagtattagtagttattcatctgcgcagtggacaaaaacatggacacatggtcttggttaacttgtcagttgacgaccttttgtcattgagcctgtacctgtactggcagctcctgttggagtcattctgtttattttcggacatctacacggataaacagtaggaattgtttatggagcacggttggctttttttgaagtgaagagcacggttggctttgtgagatgtatcattcatacctgttcctatgtattctgggaacttgaaatgcaatagaaacctgggaggatttaacaaggatacatcattgtgtcattactatgtgcatgtggtttgcaatttgcac

SEQ ID NO: 203369 - DNA, 2450 bp, Zea Mays
tatggcggacccacttatcaatcgatttatgggccccgcgtggcagagtcaaaagactcggaagggagttggttggtttttgtttcctccccgcacccgcaacaacggaaacaacggccccgtggtagcgaggagatcaggaattcaggagagcaaaaggggagagagaatgaattgaaacgaaggcccgcgacgcgaggagcgagggaactaccaccggtgaccggtctcggcgcctccgcgacgatagcctctccgacctcgagcgcggtccggttcctccctgcgtcagcacgcgagcccttggagcttcgagtcagatcccggcgggcgcccatggtggctctggtgccgttgagccgcgcgatgtagggttttcgcgcgccgcagagtaggagcgatggggcgccggaagatgtccgcggcggcaccgccgtctcggagctggtccaacgttggcggaagcgtcatcccggaacttcgagctaaacacaaaacagacttgcagaatttgacgctgaccaaacagccactcagaacattgcattttttcctgttagccatgttacaatacttgaaaagattagcaacatatatcctgagtaagggtggtttcttctttctcctaattgttttattggtagcttctggaatcttgctcgtcgtttcggatggtctgcataagaaggtttgttgcatgttcttctcttgtctttgtcttaatcagcgggatatggatagtcattttcataactcataagaacccatgttgcagtattttgtatagcatcttggcattgtttttgagcactaatgttgtttggatgtcatgtatgcagcatgtgcaggaattccttaattatgctaaatttgtgtcgtggtgggtttcattaggtgtggcttcatcaattggactaggttctggtttgcatacatttgtgctgtatctgggtcctcatattgctctgttcactattaaggctgttcaatgtggtcgaattgatctaaaaattgctccatatgataccatacagctaaaggttgggccatcatggcttgacaagaaatgttcagaatttggaccacctgtgtatccagcatcagctcattcagttaggatcccagtcttcgacctactacctcagatacagctggaggcagttctttggggaattgggactgcgcttgctcgcttatcaggaagcgagtcaaaagctgttcaggagcttgatgcagctacttccaaagaagatgggccagtagcatcatcccttaatcgaaccaagcgttggcttctctctcactcccaacatctcaacttcttctctatcttgattcttgcttcggttggtctcctgtcttccatcctctgttaccaagttcttcagtgtggatattttacacctgtaatttatgatatttggctttgtgtcttcacaattgatcttttttgcacctttggatcatgtgcaagctttagctccacatttaaaagctgtctagataaaatgacaccaacaaataagcgttccaaatccactctttgaccttgctggtattatgtgtgggcaatttggtgtgcctttctgggagttcttgtttgctactttgattgggaaagccatcatcaagactcatattcagacactatttatcgtgtccctgtgcaacaatcagctcttgtatcttattgaaaaggagttaatctggatatttggtcacgttcctgggttttctgccacccttccgtctgtgattgccagactccatgctgccaaggacaagtatctatcaccaccagccccagtctcaccgtcatcacaaatgggggagaaacagtggaatttctcttttacatctgtctggaactctatagtgtggcttgtgcttttgaacttcttcattaagatagtcacgtcaacagcacaggattatctcaaaaagcagcaggatacggagatggaacttatttcggattccccgatccaggaccattctaaaactaactagtggcgcagctagtggtgtttatacacagctgctagcagcaaagattctcctctgtagcttaagcccctgcagatgatttcaagttccaacaattagtattagtagttattcatctgcgcagtggacaaaaacatggacacatggtcttggttaacttgtcagttgacgaccttttgtcattgagcctgtacctgtactggcagctcctgttggagtcattctgtttattttcggacatctacacggataaacagtaggaattgtttatggagcacggttggctttttttgaagtgaagagcacggttggctttgtgagatgtatcattcatacctgttcctatgtattctgggaacttgaaatgcaatagaaacctgggaggatttaacaaggatacatcattgtgtcattactatgtgcatgtggtttgcaatttgcac

SEQ ID NO: 203370 - DNA, 2689 bp, Zea Mays
tatggcggacccacttatcaatcgatttatgggccccgcgtggcagagtcaaaagactcggaagggagttggttggtttttgtttcctccccgcacccgcaacaacggaaacaacggccccgtggtagcgaggagatcaggaattcaggagagcaaaaggggagagagaatgaattgaaacgaaggcccgcgacgcgaggagcgagggaactaccaccggtgaccggtctcggcgcctccgcgacgatagcctctccgacctcgagcgcggtccggttcctccctgcgtcagcacgcgagcccttggagcttcgagtcagatcccggcgggcgcccatggtggctctggtgccgttgagccgcgcgatgtagggttttcgcgcgccgcagagtaggagcgatggggcgccggaagatgtccgcggcggcaccgccgtctcggagctggtccaacgttggcggaagcgtcatcccgggtaagatctgtggctttgttccatgtgtggcgttaaggcgctgtgaggtgttgtggatcggattgatttcatgtcgagctaatttaagggtgtttgttttaccattctaaatgaggtggtgcaatcagtccatttctcaaatttggtggagtgattctattcctggtactaatttggtggaacgacttcatttgctgtactaattattagtccgcgaggctgaattattagcttgcaaggaatgaattattaacttgtaaggattgaagcgatgatgaatagcgcattctattccacaaatcaaacaaaataagaggagtgagaagatgatggactaactcattcctcaaaccaaacagcctgttagcttttggtttaggctctagctgatgactggtgctgttggtctgttttctttttatctcatgtatctacttattttgcagaacttcgagctaaacacaaaacagacttgcagaatttgacgctgaccaaacagccactcagaacattgcattttttcctgttagccatgttacaatacttgaaaagattagcaacatatatcctgagtaagggtggtttcttctttctcctaattgttttattggtagcttctggaatcttgctcgtcgtttcggatggtctgcataagaaggtttgttgcatgttcttctcttgtctttgtcttaatcagcgggatatggatagtcattttcataactcataagaacccatgttgcagtattttgtatagcatcttggcattgtttttgagcactaatgttgtttggatgtcatgtatgcagcatgtgcaggaattccttaattatgctaaatttgtgtcgtggtgggtttcattaggtgtggcttcatcaattggactaggttctggtttgcatacatttgtgctgtatctgggtcctcatattgctctgttcactattaaggctgttcaatgtggtcgaattgatctaaaaattgctccatatgataccatacagctaaaggttgggccatcatggcttgacaagaaatgttcagaatttggaccacctgtgtatccagcatcagctcattcagttaggatcccagtcttcgacctactacctcagatacagctggaggcagttctttggggaattgggactgcgcttggtgagctccctccttattttatatcacgagcagctcgcttatcaggaagcgagtcaaaagctgttcaggagcttgatgcagctacttccaaagaagatgggccagtagcatcatcccttaatcgaaccaagcgttccaaatccactctttgaccttgctggtattatgtgtgggcaatttggtgtgcctttctgggagttcttgtttgctactttgattgggaaagccatcatcaagactcatattcagacactatttatcgtgtccctgtgcaacaatcagctcttgtatcttattgaaaaggagttaatctggatatttggtcacgttcctgggttttctgccacccttccgtctgtgattgccagactccatgctgccaaggacaagtatctatcaccaccagccccagtctcaccgtcatcacaaatgggggagaaacagtggaatttctcttttacatctgtctggaactctatagtgtggcttgtgcttttgaacttcttcattaagatagtcacgtcaacagcacaggattatctcaaaaagcagcaggatacggagatggaacttatttcggattccccgatccaggaccattctaaaactaactagtggcgcagctagtggtgtttatacacagctgctagcagcaaagattctcctctgtagcttaagcccctgcagatgatttcaagttccaacaattagtattagtagttattcatctgcgcagtggacaaaaacatggacacatggtcttggttaacttgtcagttgacgaccttttgtcattgagcctgtacctgtactggcagctcctgttggagtcattctgtttattttcggacatctacacggataaacagtaggaattgtttatggagcacggttggctttttttgaagtgaagagcacggttggctttgtgagatgtatcattcatacctgttcctatgtattctgggaacttgaaatgcaatagaaacctgggaggatttaacaaggatacatcattgtgtcattactatgtgcatgtggtttgcaatttgcac

SEQ ID NO: 203371 - DNA, 2518 bp, Zea Mays
tatggcggacccacttatcaatcgatttatgggccccgcgtggcagagtcaaaagactcggaagggagttggttggtttttgtttcctccccgcacccgcaacaacggaaacaacggccccgtggtagcgaggagatcaggaattcaggagagcaaaaggggagagagaatgaattgaaacgaaggcccgcgacgcgaggagcgagggaactaccaccggtgaccggtctcggcgcctccgcgacgatagcctctccgacctcgagcgcggtccggttcctccctgcgtcagcacgcgagcccttggagcttcgagtcagatcccggcgggcgcccatggtggctctggtgccgttgagccgcgcgatgtagggttttcgcgcgccgcagagtaggagcgatggggcgccggaagatgtccgcggcggcaccgccgtctcggagctggtccaacgttggcggaagcgtcatcccgggtaagatctgtggctttgttccatgtgtggcgttaaggcgctgtgaggtgttgtggatcggattgatttcatgtcgagctaatttaagggtgtttgttttaccattctaaatgaggtggtgcaatcagtccatttctcaaatttggtggagtgattctattcctggtactaatttggtggaacgacttcatttgctgtactaattattagtccgcgaggctgaattattagcttgcaaggaatgaattattaacttgtaaggattgaagcgatgatgaatagcgcattctattccacaaatcaaacaaaataagaggagtgagaagatgatggactaactcattcctcaaaccaaacagcctgttagcttttggtttaggctctagctgatgactggtgctgttggtctgttttctttttatctcatgtatctacttattttgcagaacttcgagctaaacacaaaacagacttgcagaatttgacgctgaccaaacagccactcagaacattgcattttttcctgttagccatgttacaatacttgaaaagattagcaacatatatcctgagtaagggtggtttcttctttctcctaattgttttattggtagcttctggaatcttgctcgtcgtttcggatggtctgcataagaaggttctggtttgcatacatttgtgctgtatctgggtcctcatattgctctgttcactattaaggctgttcaatgtggtcgaattgatctaaaaattgctccatatgataccatacagctaaaggttgggccatcatggcttgacaagaaatgttcagaatttggaccacctgtgtatccagcatcagctcattcagttaggatcccagtcttcgacctactacctcagatacagctggaggcagttctttggggaattgggactgcgcttggtgagctccctccttattttatatcacgagcagctcgcttatcaggaagcgagtcaaaagctgttcaggagcttgatgcagctacttccaaagaagatgggccagtagcatcatcccttaatcgaaccaagcgttggcttctctctcactcccaacatctcaacttcttctctatcttgattcttgcttcggttccaaatccactctttgaccttgctggtattatgtgtgggcaatttggtgtgcctttctgggagttcttgtttgctactttgattgggaaagccatcatcaagactcatattcagacactatttatcgtgtccctgtgcaacaatcagctcttgtatcttattgaaaaggagttaatctggatatttggtcacgttcctgggttttctgccacccttccgtctgtgattgccagactccatgctgccaaggacaagtatctatcaccaccagccccagtctcaccgtcatcacaaatgggggagaaacagtggaatttctcttttacatctgtctggaactctatagtgtggcttgtgcttttgaacttcttcattaagatagtcacgtcaacagcacaggattatctcaaaaagcagcaggatacggagatggaacttatttcggattccccgatccaggaccattctaaaactaactagtggcgcagctagtggtgtttatacacagctgctagcagcaaagattctcctctgtagcttaagcccctgcagatgatttcaagttccaacaattagtattagtagttattcatctgcgcagtggacaaaaacatggacacatggtcttggttaacttgtcagttgacgaccttttgtcattgagcctgtacctgtactggcagctcctgttggagtcattctgtttattttcggacatctacacggataaacagtaggaattgtttatggagcacggttggctttttttgaagtgaagagcacggttggctttgtgagatgtatcattcatacctgttcctatgtattctgggaacttgaaatgcaatagaaacctgggaggatttaacaaggatacatcattgtgtcattactatgtgcatgtggtttgcaatttgcac

SEQ ID NO: 203372 - DNA, 880 bp, Zea Mays
aggattcaggggacattggtggactgggttaaccagctcaaggcttctggtcgaatcagtgatgctattgataaaccattgcgtggaaagggccatgaggcagagattcaggagttcttgaagatagcttttgcttgcacccagccccgtgtgacggagaggcattcaatgtatcgggttttccacgctctgaagagcatcggagagggctgcgatgtcacggagcagtttgatgagttcccattggcctataacaaggatgattcagacgctatttagctgatgatgctgattgccaattcgattgtggaaatgtttggtcaggcttattgatgatatatatatttagccttgctatggacagaccggaagcataaatgagtgataagagaacaatatcgaggcaccaaatctagcgccggatgccgggtggtcaattacatcgttgcatcgacaggggatgtgataaccataagtaatattgctcgaaaatgtagagctgactcttgaagcctttgactacatgcagctgccattcacgctgaaagcgcattctaacacggcatgatacaccagcaactggaatgttgtcaacatcagcggcaacgacgacaacgccacatcgagaaacaacaactgtgggccagggagcacaatcccgtggtgcggtgacttgcccacgtttgccatgctgccttgatgcatggcacatcaacaagaagagcaccagtttggaaggctaattccgaaggaattgagatgtgcagagggagatgaagaatgtggagaaagacatcagggtagctaccaagcgcaatgacatgttatctgcaaaggtacggtcggtctgatcttgttttctatataacacagcagtagc

SEQ ID NO: 203373 - DNA, 984 bp, Zea Mays
aggattcaggggacattggtggactgggttaaccagctcaaggcttctggtcgaatcagtgatgctattgataaaccattgcgtggaaagggccatgaggcagagattcaggagttcttgaagatagcttttgcttgcacccagccccgtgtgacggagaggcattcaatgtatcgggttttccacgctctgaagagcatcggagagggctgcgatgtcacggagcagtttgatgagttcccattggcctataacaaggatgattcagacgctatttagctgatgatgctgattgccaattcgattgtggaaatgtttggtcaggcttattgatgatatatatatttagccttgctatggacagaccggaagcataaatgagtgataagagaacaatatcgaggcaccaaatctagcgccggatgccgggtggtcaattacatcgttgcatcgacaggggatgtgataaccataagtaatattgctcgaaaatgtagagctgactcttgaagcctttgactacatgcagctgccattcacgctgaaaggacaaattaggaagctaagcatctagataggagaatttgattggttcgtgtcaatatttaatttcttagctcactctgttcatgcctttgtggttcatggacaactgctgctacgtgctcccttccccgacagcgcattctaacacggcatgatacaccagcaactggaatgttgtcaacatcagcggcaacgacgacaacgccacatcgagaaacaacaactgtgggccagggagcacaatcccgtggtgcggtgacttgcccacgtttgccatgctgccttgatgcatggcacatcaacaagaagagcaccagtttggaaggctaattccgaaggaattgagatgtgcagagggagatgaagaatgtggagaaagacatcagggtagctaccaagcgcaatgacatgttatctgcaaaggtacggtcggtctga

SEQ ID NO: 203374 - DNA, 312 bp, Zea Mays
atttgattgcgcattctaacacggcatgatacaccagcaactggaatgttgtcaacatcagcggcaacgacgacaacgccacatcgagaaacaacaactgtgggccagggagcacaatcccgtggtgcggtgacttgcccacgtttgccatgctgccttgatgcatggcacatcaacaagaagagcaccagtttggaaggctaattccgaaggaattgagatgtgcagagggagatgaagaatgtggagaaagacatcagggtagctaccaagcgcaatgacatgttatctgcaaaggtacggtcggtctga

SEQ ID NO: 203375 - DNA, 1088 bp, Zea Mays
aaaagtatgctggcctcaatcagcttgctcagaaattccttgaaggggtgcaaagttcgtctggaagacagaccttcactagcttatgtagaaggggttgttgaggaaattcgccagggtgctactatggagtgccctatctgtcttgactcagcttcagatgatccagtactcacgccttgtgcacaccggatgtgtggtgaatgccttgtttctagctggagcctggaggactccagttggaagtcacaccagcaaatctgacctgatcatattgcctgctcagagtcgtttccaggtggatgccaagaataaccggaaggactcatgcaaagtgaaaaaaaaacttataatgatgctggagagccttcagaagaaaagggagaagagcattgtattcagccagtttacttccttcgtcgatcttctggagacccccttcactcagaacttcagaagggtatcaagttcttgtggtttgatggcaagctgagccagaagcataaagaaaaagttctgaaggagttcagtgaaagtcaggacaagctggtgctaatgatgtcactcaaagctggaggtgtagggctaaatctaattgctgtctccaatgttttttacgatggatccatggtggaatccagctgtggaagagcaggctttcatgagaattcaccgtattgggcagaaaagagaggtccgagtcaaaagcttcatcgtcaaggatactgtcgaggagctagcggatgcaacaggtccaaatgcgcaagcagaggatggtttctggggcgctcactgatgaggagattcgtggcgctcgcattgagcatctcaagatgttgtttaaatgattgctgccatgaactcccgatgtgtatagctgacgctatgtcgttgatgcttttgtaggagtattatctgggttcagatcattgtagatggggatggagtgggtggaaccttgccctttggattttgtgtatatctcccccatgctagtatgcatttcatgtagagttgtttctttatggtgttgaaacatcctatgaaaatcgtagtctactattgctggtccttgtggtatgttgccg

SEQ ID NO: 203376 - DNA, 2045 bp, Zea Mays
caggccttggagggacctggaccttcccattcacccgcaggaaacttctgtcaaggactaccagaatttcaatttccgacaaccttattctcaagcgtcatactatgtctctttgatattgggagataaaaaatggcctgtagctgagaaacttgaagctctttctaagcttgaatcagattattttgcaaagttcgtaccacacctactgtcaaaaacatttttggaatgttatgttcaagggaacattgaaccaagtgaagcaaaatctatcgtagaagaaatcgaaaacactatatttactacgcccaattctttgttcaaatccatgtctccatcagaatatctgattaaaagggtcatcatgcttgaaaatgacttgaaatgctactaccaaactgagggattaaaccagaagaatgagaattcatcagttatccaatatattcaggtgcatcaagatgacgccattttgaatatcaaacttgagctgttctctctaatagcaaaacagccagccttcaaccagctacgaactgttgaacaacttgggtatataacaagtctttctctgagatcttagcttgcaatgattgccacattctacagatccgactatggagtcctggcactccaggttgttatccagtccacagtaaaggatccttcatacctcgatgttagagttgatgagttctttaagatgtttgaaagcaaaatctatgaactctccgacaaggatttcaaggacttgctggatcaaaaggatgggaaactatgggttaaaaaatgagaaatacgacatgatattctaagtttatcctcattttttattttactgtaatattgaactattgagaaatgtgaaatcattaattgattctaaactggagaagtttaaaaacttatgggaggaatctcatttctactggggagagattgaggcaggaactctgaagtttgatagggtcgagtctgaggtcgctatgctaagagagctcaagaaagaagaattcatcgagtacttcaaccagtatataaaagtggacgcgcctcaaaggaggacactaagcgtgcaagtcttcggcggcaaccatttggtagagttcaagaaggcaatcaacgaagccaacccgcccaaaatgtacagaattacagacatattcggcttcaaacgatcgaggccgctgtacagctcactcaagggaggtccgggcaggatcaccatggactgacagccggcaatagcatgccttgtttttcatgtatgtagtgtaatggccagtgcatacgaatgatgaattcgattctgaatcctgctcctgcatcagattcggttgcatgattgatctatacttcactgtgggtttcacgaccagcgtgtcactttctgggcaaaatctagggagctgtataaagtcatgtatgttcacatgtttgtttgcgtttcttctcacagctatgcagtttgtacagttacatatccacagtgaactagaactagaagcgcgtcttctacacaccaatatacagcttgagcctggctgaccgtgcccgacgccggccgagaaccgtcaaggtgccgtcatgcgcacatgcaccaccggccgtccggtttcagcacgccccggcgtgttcgcaaacgcccgccggcgcccccactcgaagccgttgcggtgccaccggcacctgaacgagccccggtgcgtcgtgggcgagcacacgcagtagtagtgcggcgacgcctggcgcgcccgtggcacagatggtgggggcgacggtgccacggtcgcctgctgctcccgccgcctgactgcgcagtccggcggcagaggcggcagccctggatggcacatgcttctaggctacaaaagggtgatgcgatcggcagctccaccagctataaaacagatggcgccgaagaatggaatcgggttctggcgttttcggatggtgggagatgactagacgtggggaaagggcggggaatatgtgtgggctagggtggtaatgtatggtatggtagcccgcaggcgatggttttt

SEQ ID NO: 203377 - DNA, 2411 bp, Zea Mays
ctctcagattttgagctgcagcccgacacggaagacaaccatattttcggcttagcgtcagatgaatattctgggagtccaaaaaatttgaaggatctacgagttctgctgagccctggtataacacaccattttcagttgaaaatgtcactccttcagttatacaggaatggattgaaaaagctcctactgaaaaactccatcttccaaaacctaatattttcataccaaaggatttatctcttaaagaagtgcatgaaaaggttacttttccaacagtgttaaggaagagcccactttcacagttgtgccactcccctgaagcagttgttgctactgagctctttgttgatttgttagtagattatttgaatgcttatgcttatgatgctcaaattgctggtttattctattcaatatatgttacttcagctggattccaggtttctttaggtggttacaatgacaagatgagagttctcttaaatgccatactagtgcaaattgtgaaatttgaagttaagccaaacagattttctgcactgaaggaaacttctgtcaaggactaccagaatttcaatttccgacaaccttattctcaagcgtcatactatgtctctttgatattgggagataaaaaatggcctgtagctgagaaacttgaagctctttctaagcttgaatcagattattttgcaaagttcgtaccacacctactgtcaaaaacatttttggaatgttatgttcaagggaacattgaaccaagtgaagcaaaatctatcgtagaagaaatcgaaaacactatatttactacgcccaattctttgttcaaatccatgtctccatcagaatatctgattaaaagggtcatcatgcttgaaaatgacttgaaatgctactaccaaactgagggattaaaccagaagaatgagaattcatcagttatccaatatattcaggtgcatcaagatgacgccattttgaatatcaaacttgagctgttctctctaatagcaaaacagccagccttcaaccagctacgaactgttgaacaacttgggtatataacaagtctttctctgagatccgactatggagtcctggcactccaggttgttatccagtccacagtaaaggatccttcatacctcgatgttagagttgatgagttctttaagatgtttgaaagcaaaatctatgaactctccgacaaggatttcaagagaaatgtgaaatcattaattgattctaaactggagaagtttaaaaacttatgggaggaatctcatttctactggggagagattgaggcaggaactctgaagtttgatagggtcgagtctgaggtcgctatgctaagagagctcaagaaagaagaattcatcgagtacttcaaccagtatataaaagtggacgcgcctcaaaggaggacactaagcgtgcaagtcttcggcggcaaccatttggtagagttcaagaaggcaatcaacgaagccaacccgcccaaaatgtacagaattacagacatattcggcttcaaacgatcgaggccgctgtacagctcactcaagggaggtccgggcaggatcaccatggactgacagccggcaatagcatgccttgtttttcatgtatgtagtgtaatggccagtgcatacgaatgatgaattcgattctgaatcctgctcctgcatcagattcggttgcatgattgatctatacttcactgtgggtttcacgaccagcgtgtcactttctgggcaaaatctagggagctgtataaagtcatgtatgttcacatgtttgtttgcgtttcttctcacagctatgcagtttgtacagttacatatccacagtgaactagaactagaagcgcgtcttctacacaccaatatacagcttgagcctggctgaccgtgcccgacgccggccgagaaccgtcaaggtgccgtcatgcgcacatgcaccaccggccgtccggtttcagcacgccccggcgtgttcgcaaacgcccgccggcgcccccactcgaagccgttgcggtgccaccggcacctgaacgagccccggtgcgtcgtgggcgagcacacgcagtagtagtgcggcgacgcctggcgcgcccgtggcacagatggtgggggcgacggtgccacggtcgcctgctgctcccgccgcctgactgcgcagtccggcggcagaggcggcagccctggatggcacatgcttctaggctacaaaagggtgatgcgatcggcagctccaccagctataaaacagatggcgccgaagaatggaatcgggttctggcgttttcggatggtgggagatgactagacgtggggaaagggcggggaatatgtgtgggctagggtggtaatgtatggtatggtagcccgcaggcgatggttttt

SEQ ID NO: 203378 - DNA, 2472 bp, Zea Mays
agttcgttggtgcctgagaatccatggtcgatcgtctccagtcgaagcgaaaagcgaaaaggagaaggggcgggggattgcgagcctgtgctgatggcggcggcggcggtggccgcggcggggagcagcaatgtcgagttcatccgcgcgcgcagcgacaagcgggagtaccgccgcgtggtgctcgccaacgcgctcgagatcctactaatcagcgaccccgacaccgacaaggcggcggcgtgcatggaggtcgaggtgggctcgttcagcgatccggagggacttgagggcctcgcgcacttcctcgagcacatgctattttatgccagcgagaagtatcctggagaacatgaatatacgaaatatatcatagagcttcaaaagcattttgcttcaaaggatcacccttaccacaaattcagtacaggaagttgggaaacactagaaactaaaccaaaagcgaggggcctggatatcagacttgaacttctgaagttttacaagaattattcagcaaacgttatgcaccttgttgtttatggaaaggagaacctcgattgcattcagggcttggttgagcgtatgtttagtgacataaaaaacactgatcagagaagcttgaaatgtccaagtcatcctctttcagaggaacatttacagcttcttgtcaaagcactgccaatagtagaaggggactatctaagaattatatggccaataacacctagcatccagttttacaaagaagctccttgccattatctgagtcacctcattggacatgaaggcgaggggtccatcttccatattataaaggaactaggatgggccatgaacttaatggctggagagtgcagtgacagtaatgagtattcctttttctcagtaagcatgaggctcactgatgctggccatgaacgcatggaggatattgttgggttgatcttcaaatatcttcatctattaaaagaagacggagtccatgagtggatatttaatgagcttgcggcgataaatgaaatggagttccattatcaagacaaagtccgcccaatcaactatgtgatgcgcactgtctcaactatgcggttgttcccaccagaagaatggttggttggagcagcattaccatcaaagtatgcatcacagagaataaatatgatactcaatcaactaatacctgaaacagtaagaatattctgggagtccaaaaaatttgaaggatctacgagttctgctgagccctggtataacacaccattttcagttgaaaatgtcactccttcagttatacaggaatggattgaaaaagctcctactgaaaaactccatcttccaaaacctaatattttcataccaaaggatttatctcttaaagaagtgcatgaaaaggttacttttccaacagtgttaaggaagagcccactttcacagttgtggtataagcctgatatgctgttctccacaccaaaggttcacattatcattgatttccactgtccattatccagccactcccctgaagcagttgttgctactgagctctttgttgatttgttagtagattatttgaatgcttatgcttatgatgctcaaattgctggtttattctattcaatatatgttacttcagctggattccaggtttctttaggtggttacaatgacaagatgagagttctcttaaatgccatactagtgcaaattgtgaaatttgaagttaagccaaacagattttctgcactgaaggaaacttctgtcaaggactaccagaatttcaatttccgacaaccttattctcaagcgtcatactatgtctctttgatattgggagataaaaaatggcctgtagctgagaaacttgaagctctttctaagcttgaatcagattattttgcaaagttcgtaccacacctactgtcaaaaacatttttggaatgttatgttcaagggaacattgaaccaagtgaagcaaaatctatcgtagaagaaatcgaaaacactatatttactacgcccaattctttgttcaaatccatgtctccatcagaatatctgattaaaagggtcatcatgcttgaaaatgacttgaaatgctactaccaaactgagggattaaaccagaagaatgagaattcatcagttatccaatatattcaggtgcatcaagatgacgccattttgaatatcaaacttgagctgttctctctaatagcaaaacagccagccttcaaccagctacgaactgttgaacaacttgggtatataacaagtctttctctgagatccgactatggagtcctggcactccaggttgttatccagtccacagtaaaggatccttcatacctcgatgttagagttgatgagttctttaagatgtttgaaagcaaaatctatgaactctccgacaaggatttcaaggacttgctggatcaaaaggatgggaaactatgggttaaaaaatga

SEQ ID NO: 203379 - DNA, 2475 bp, Zea Mays
agttcgttggtgcctgagaatccatggtcgatcgtctccagtcgaagcgaaaagcgaaaaggagaaggggcgggggattgcgagcctgtgctgatggcggcggcggcggtggccgcggcggggagcagcaatgtcgagttcatccgcgcgcgcagcgacaagcgggagtaccgccgcgtggtgctcgccaacgcgctcgagatcctactaatcagcgaccccgacaccgacaaggcggcggcgtgcatggaggtcgaggtgggctcgttcagcgatccggagggacttgagggcctcgcgcacttcctcgagcacatgctattttatgccagcgagaagtatcctggagaacatgaatatacgaaatatatcatagagcatggtggctcttacaatgcatatacaagctccgagacaacgaatttctttttcgatgtcaatgtggacaattttgaagaagccttagatagatttgctcagttcttcattaagccattgatgtcacaggatgctgttcttagagagataaaagctgtggattctgagaacacaagaaaaatttgttgtctgatggctggaggatgtatcaggaagttgggaaacactagaaactaaaccaaaagcgaggggcctggatatcagacttgaacttctgaagttttacaagaattattcagcaaacgttatgcaccttgttgtttatggaaaggagaacctcgattgcattcagggcttggttgagcgtatgtttagtgacataaaaaacactgatcagagaagcttgaaatgtccaagtcatcctctttcagaggaacatttacagcttcttgtcaaagcactgccaatagtagaaggggactatctaagaattatatggccaataacacctagcatccagttttacaaagaagctccttgccattatctgagtcacctcattggacatgaaggcgaggggtccatcttccatattataaaggaactaggatgggccatgaacttaatggctggagagtgcagtgacagtaatgagtattcctttttctcagtaagcatgaggctcactgatgctggccatgaacgcatggaggatattgttgggttgatcttcaaatatcttcatctattaaaagaagacggagtccatgagtggatatttaatgagcttgcggcgataaatgaaatggagttccattatcaagacaaagtccgcccaatcaactatgtgatgcgcactgtctcaactatgcggttgttcccaccagaagaatggttggttggagcagcattaccatcaaagtatgcatcacagagaataaatatgatactcaatcaactaatacctgaaacagtaagaatattctgggagtccaaaaaatttgaaggatctacgagttctgctgagccctggtataacacaccattttcagttgaaaatgtcactccttcagttatacaggaatggattgaaaaagctcctactgaaaaactccatcttccaaaacctaatattttcataccaaaggatttatctcttaaagaagtgcatgaaaaggttacttttccaacagtgttaaggaagagcccactttcacagttgtggtataagcctgatatgctgttctccacaccaaaggttcacattatcattgatttccactgtccattatccagccactcccctgaagcagttgttgctactgagctctttgttgatttgttagtagattatttgaatgcttatgcttatgatgctcaaattgctggtttattctattcaatatatgttacttcagctggattccaggtttctttaggtggttacaatgacaagatgagagttctcttaaatgccatactagtgcaaattgtgaaatttgaagttaagccaaacagattttctgcactgaaggaaacttctgtcaaggactaccagaatttcaatttccgacaaccttattctcaagcgtcatactatgtctctttgatattgggagataaaaaatggcctgtagctgagaaacttgaagctctttctaagcttgaatcagattattttgcaaagttcgtaccacacctactgtcaaaaacatttttggaatgttatgttcaagggaacattgaaccaagtgaagcaaaatctatcgtagaagaaatcgaaaacactatatttactacgcccaattctttgttcaaatccatgtctccatcagaatatctgattaaaagggtcatcatgcttgaaaatgacttgaaatgctactaccaaactgagggattaaaccagaagaatgagaattcatcagttatccaatatattcaggtgcatcaagatgacgccattttgaatatcaaacttgagctgttctctctaatagcaaaacagccagccttcaaccagctacgaactgttgaacaacttgggtatataacaagtctttctctgagatcttagcttgcaatgattgccacatt

SEQ ID NO: 203380 - DNA, 1996 bp, Zea Mays
agttcgttggtgcctgagaatccatggtcgatcgtctccagtcgaagcgaaaagcgaaaaggagaaggggcgggggattgcgagcctgtgctgatggcggcggcggcggtggccgcggcggggagcagcaatgtcgagttcatccgcgcgcgcagcgacaagcgggagtaccgccgcgtggtgctcgccaacgcgctcgagatcctactaatcagcgaccccgacaccgacaaggcggcggcgtgcatggaggtcgaggtgggctcgttcagcgatccggagggacttgagggcctcgcgcacttcctcgagcacatgctattttatgccagcgagaagtatcctggagaacatgaatatacgaaatatatcatagagcatggtggctcttacaatgcatatacaagctccgagacaacgaatttctttttcgatgtcaatgtggacaattttgaagaagccttagatagatttgctcagttcttcattaagccattgatgtcacaggatgctgttcttagagagataaaagctgtggattctgaacacaagaaaaatttgttgtctgatggctggaggatgtatcagcttcaaaagcattttgcttcaaaggatcacccttaccacaaattcagtacaggaagttgggaaacactagaaactaaaccaaaagcgaggggcctggatatcagacttgaacttctgaagttttacaagaattattcagcaaacgttatgcaccttgttgtttatggaaaggagaacctcgattgcattcagggcttggttgagcgtatgtttagtgacataaaaaacactgatcagagaagcttgaaatgtccaagtcatcctctttcagaggaacatttacagcttcttgtcaaagcactgccaatagtagaaggggactatctaagaattatatggccaataacacctagcatccagttttacaaagaagctccttgccattatctgagtcacctcattggacatgaaggcgaggggtccatcttccatattataaaggaactaggatgggccatgaacttaatggctggagagtgcagtgacagtaatgagtattcctttttctcagtaagcatgaggctcactgatgctggccatgaacgcatggaggatattgttgggttgatcttcaaatatcttcatctattaaaagaagacggagtccatgagtggatatttaatgagcttgcggcgataaatgaaatggagttccattatcaagacaaagtccgcccaatcaactatgtgatgcgcactgtctcaactatgcggttgttcccaccagaagaatggttggttggagcagcattaccatcaaagtatgcatcacagagaataaatatgatactcaatcaactaatacctgaaacagtaagaatattctgggagtccaaaaaatttgaaggatctacgagttctgctgagccctggtataacacaccattttcagttgaaaatgtcactccttcagttatacaggaatggattgaaaaagctcctactgaaaaactccatcttccaaaacctaatattttcataccaaaggatttatctcttaaagaagtgcatgaaaaggttacttttccaacagtgttaaggaagagcccactttcacagttgtggtataagcctgatatgctgttctccacaccaaaggttcacattatcattgatttccactgtccattatccagccactcccctgaagcagttgttgctactgagctctttgttgatttgttagtagattatttgaatgcttatgcttatgatgctcaaattgctggtttattctattcaatatatgttacttcagctggattccaggtttctttaggtggttacaatgacaagatgagagttctcttaaatgccatactagtgcaaattgtgaaatttgaagttaagccaaacagattttctgcactgaagcttcgagagagctatggattgttgagccccctta

SEQ ID NO: 203381 - DNA, 1607 bp, Zea Mays
agaaagaaatgtacagtctacacagctgaccagagagctagtgcaagcgatctagcaagttttaatcttggaagaagccagctaggcgcgtgaatatggatcgcctcactgtgatggcgccgccgctgctcgtcctcctcctgctgctcctctcgcggtgctcggcggcggcgtcacggcgcggcgggggctggtgggaggagggcgagggggagtggaggccgagcgaggaggaagagaagggcaaaggcaaagggagggggctgttcctgctgcaccgggtggagaaggtggtggagtcggagggcgggcaggtgcgcgtggtgcgcggccagccgtggccgccggcgtccttcgcctgccgcgaggggctcatgcacatcggcttcatcaccatggagcccaagacgctgttcgtgccgcagtacctcgactccagcatcactctcttcgtgcagcggggggaagcgaaggttgggtatattcacaaggacgagctcgtggagaggaagctcaagatgggcgacgtcctccacatcgacgccggctccaccttctacatggtcaaccccggcaaaggccagaggctgcagatcatatgcagcgtggacgcctccgatagccttggctttggacctccttatcaggccttcttcctcggcggcgcaggggacccggcgtcggtcattgccggttttgggccgaagacgcttacccgtgccttcaacgccacctacgacgagttggcgcgtatcctgttgccacgaaccggcggccccatcgtgtactacaccgcggacgcggagccagagagcggtgccgccgaagaggagcgcgggcaggtcgacgggcacgacggtgtgctggacaggggagcgcgacgcgagggcgccggcgcgtgggtgccgggtggcaggggagacggaggcgacgagtgcggcggggtcgatgctggcgccgcacgtgaaccctcgggcgacggagtacggcgtggagctgggcggggaaggcacggtccaggtggtgttcccgaacgggtccctggcgatgagcgaggtggtgcgccccggcgacgtgttctggatcccgcgctacttccccttctgccaggtggcggcgcgggccgggcccttcgagttcttcggcttcaccacctcggcgcgccgcaaccggccgcagttcctggtcggcgcctcctcggtgctccgtaccatgctagggccggagatcgccgccgcgttcggcgctcgcgagaaggagttcagtaagctggtgcgtgcgcaacgggaggccctgattatgccgtcctctcctgggaaggaggaggaggagcatgggaagaaagggagggagaaagaggagtcactgccgatggttgtcgagcaggcggcggcggagtgagctgcttgatctttcagtcttggactcttggcttcctcagaagcgcgcgcgcgccaccggaaagtgtttctactcttgttactgcgccttgtcagtgatcgtgttgttggttttttttttcgtggcgccgtctataaataaaagtgctttgtgcgtttacagctatgaaatcaggattatcatccgtaactcgtaagctggacgcc

SEQ ID NO: 203382 - DNA, 1690 bp, Zea Mays
cacatccacactcacctgttgcctctatatccaccgccccaccgccgtagcaccagaaagaaatgtacagtctacacagctgaccagagagctagtgcaagcgatctagcaagttttaatcttggaagaagccagctaggcgcgtgaatatggatcgcctcactgtgatggcgccgccgctgctcgtcctcctcctgctgctcctctcgcggtgctcggcggcggcgtcacggcgcggcgggggctggtgggaggagggcgagggggagtggaggccgagcgaggaggaagagaagggcaaaggcaaagggagggggctgttcctgctgcaccgggtggagaaggtggtggagtcggagggcgggcaggtgcgcgtggtgcgcggccagccgtggccgccggcgtccttcgcctgccgcgaggggctcatgcacatcggcttcatcaccatggagcccaagacgctgttcgtgccgcagtacctcgactccagcatcactctcttcgtgcagcggggggaagcgaaggttgggtatattcacaaggacgagctcgtggagaggaagctcaagatgggcgacgtcctccacatcgacgccggctccaccttctacatggtcaaccccggcaaaggccagaggctgcagatcatatgcagcgtggacgcctccgatagccttggctttggacctccttatcaggccttcttcctcggcggcgcaggggacccggcgtcggtcattgccggttttgggccgaagacgcttacccgtgccttcaacgccacctacgacgagttggcgcgtatcctgttgccacgaaccggcggccccatcgtgtactacaccgcggacgcggagccagagagcggtgccgccgaagaggagcgcgggcaggtcgacgggcacgacggtgtgctggacaggggagcgcgacgcgagggcgccggcgcgtgggtgccgggtggcaggggagacggaggcgacgagtgcggcggcagcgatgacgcgcgtgaggcgacgtggtggtggacgaagctggttaacagggtcgtcggaggggcggctggcggcggcggcgctgcggaggcgaacaggaagggcaagaagaagaagggcggcgcgccggagccgtacaatctctacgacagcgagccccggggttccggaacgcgtacggaggaggggttgctgctggggtcgatgctggcgccgcacgtgaaccctcgggcgacggagtacggcgtggagctgggcggggaaggcacggtccaggtggtgttcccgaacgggtccctggcgatgagcgaggtggtgcgccccggcgacgtgttctggatcccgcgctacttccccttctgccaggtggcggcgcgggccgggcccttcgagttcttcggcttcaccacctcggcgcgccgcaaccggccgcagttcctggtcggcgcctcctcggtgctccgtaccatgctagggccggagatcgccgccgcgttcggcgctcgcgagaaggagttcagtaaagaagcgcgcgcgcgccaccggaaagtgtttctactcttgttactgcgccttgtcagtgatcgtgttgttggttttttttttcgtggcgccgtctataaataaaagtgctttgtgcgtttacagctatgaaatcaggattatcatccgtaactcgtaagctggacgcc

SEQ ID NO: 203383 - DNA, 1930 bp, Zea Mays
atggactccatggtgtttgaggttgctgaattggatggagcaacaatgatttgtcacactaacagtaaaatgaaagggaggttcgaagttttgttcctagccttccttgtagcgttgaagatgatgagagatcaaagaagaaaacagtcagagccattttggtcttcaatggtgatgaaaaaatggctaaacatcaggccgaaattaaatgatttcagcgaagacgagtttgatacaggcagtgaggatagtgacggtactaactctggagatgataataacttctttgagatacatggaaatctcaaatacatgattagcaaatcatcaggagagaaaacaattcctctgcgaagtcttcagagaaggaaatcagagagtttacgtgttaactacatcagtaacaaagatggtgatgataggtacatggaatgttgctggaagagtgcctagtgatgaccttcgtcttgatgagtggctttgtacacaagagccagcagacttgtatgttttaggtttccaggaagttgtcccactaagcgctggtaatgtgttgggagcagaggacagtagaccaatacggaaatgggaagctcttatccgccaaacacttaacagttctcagcaaaccaggacaatctgcaaaagctacagtgctccactctcgccattactaaggcctgttgcttcaggcgatgggaaatccaaacctgaagatagagtgacaggaagtttaactcagcttagagattggcaaactagtaagagtgagcttcattgcagctggttcgatgggaccagttcattggactggccagaatatccactcgacactccatcaaaggttttggtgtcaggtacaggcttgaggcgagtcatgagtttggggttatttagctccaactttgtgggaaaccctcgaggtcttgagctccaggatgtagatttgcatgctgggatgagaaggcagtatcatagctcgggaaatcttagcatgttatggtctgaacagcaggagaagcttgatgttttaaattcacttgatcgcttatctgatttggcgtcagaagaagactcaacttttgaagacaccgttgagggctgtgctactcttgggaaaagagaatcttccgtgcatcgtgcaaattatgtgcgaattgtcagtaaacaaatggttggtatacatgtttctgtatgggtttcccgaaaactgaggcgacatgttaacaatctggaggtatcaccggttggggttggactcttgggctacatgggcaacaagggatcgatttccatcagcatgtctcttttccaaactcgattgtgctttgtctgctctcatcttgcatctggtcataaatcaggagatcaacaaaaaaggaatgctgatgtttacgagattttacaaagaacaaggttttcttccttgtttgctgctggtcgtccacaaaagattccttctcatgatcggattttctggttcggggatcttaactaccgcattgacctgccggactctgaagtgcgatatctggtgggtatgaagaagtgggatgaccttttgaagtctgatcagctaacgaaggagctagtaagtgggaatacttttgttggttggaaggaaggcttgattaactttccaccaacttacaagtacgaaaggaatacaaccagatatgttggcgagcttcataatgaggaggagaaaaaaagatctccagcatggtgcgatcgtgtgctatggtttgggaagggtaccaaacaactatcatattggagctccggtctgaacctctcagatcaccggccagtcagcgccgtcttcttggttgaagttgaagtgttcaatcaacaaaaactcgagagggtcttgaacttcaatcctggatttgtttcaaatggggattattacatgatggcagatccttaa

SEQ ID NO: 203384 - DNA, 2175 bp, Zea Mays
gaaaaaaccttgtctcgacggcgtggaaagaaaccgcgtctacagcacagaggcggcggtgcctagggcacagagaaggcggcggcgacatctatactggctgaccggcgccattccatcggtgtccgcttctcgcaggtcatgtgtgacctgcttggtgtggttgctcgacactctcctcaattggtgatattttcttttggagcccaagttcttcgtctaaggcatgactggacatggcattttggcgacatcagaatagcacatgctgctagtgttgtttgatattagagacactttttgatttgcttgcatgttttattttcagtttgaggggcacgagtggtcggacttgtttcagtttcagaaaactagggacacttcttttagtttcagaattgagagaagtgtattttagtttcaggattcataatgatagggacacttcactcagcatatgttcggttgtgattaaaaccatggttgtggacgttctccatagcatctttctactttattttagtttcatgattcaaaatgctagtgacacttctttctatttttattttatagaaagcaacattgtacatggcaggtctatgtaagcccactaggcaacgttttacagtgttgccaggtctatgtacagccggtctctagtgggcttacagtgttgcttccttgttgaattatgttgcatatatggcggggattaaccgaacaaacattttgagacaggtatttaaaccataaagatattaaatcccaaagggattaagtgaaaaggagggatccactcaatccctccctggattagatccacttggggaattaatccattgcaaccgaacaagcccttaaggggaaccaaaatttcagaagataggtatgagagttataaactattcttggaagaaaaggtgaggctacctgcacttgtttggatctcacagcaggaaacgagttgatgttgctaatccttcactaaaataggaaaactaggcagttttctagttaaattccatcttagggataggccctttgtagttagtacttacgaatgagatggacatgcaccctttctcttgatgcacacaagatttaatggtacaatatgaatacaatatgataacttccatgacatttcaaaatatatagttccactttagtaaaatagttttggatgcatttgctacaatttactgcatattcaaattgaggctaaccttgtggcgtcgataaccttgaggctagtcttttgtatgcatttgctacaatttagtgcattttctacacaaaggacgaggaggggtgggtgctgattcacttagtggcaagcttcgactactctcaaatcatcgacatcctgcttgagcgaagcatatcttatggtgagcgtgctgaacacgaaggacgaggagtggtgggcgctgattcactcagtggcaagcttcgactactctcaaatcatcgacatcctgcttgagcgaagtatgagactgacgcggcatatcttatggtgagcgtgctgaacacgaaggacgcgtaggggtgggcgctgattcactcagtggcaagcttcgactactctcaaatcatcgacatcctgcttgagcgaagcatatcttatggtgagcgtgctgaacacgaaggacgcgtaggggtgggcgctgattcaaccagtggcaagcttcgactactctcaaatcatcgacatcctgcttgagcgaagcatatcttatggtgagcgtgctgagcacgaaggacgtggaggggtgggcgccgattcactccatggcgtgctccgacaactctcaaatcatcgacatccaccttgagcgatgtatgagaccagcacgatacatctgtattcggttcaagcggctttgatgcagctccagctgaccatcctcttgtcagtgggaatggttacgagcatacctcatgcactatttgctgagttaattggataagaggtttgcttatgcttgtgaggaagacaacaagagttcaattagtcgaacatgaaaatagtctaaatgcttgcgcttaagcggggaaaaacaataattcttcctattgtgatggcaaaaggtgtcctcgaaaagaacagaaccaaaaaatgttcctattgtcacggctcaacctcatagaaaatcttgagttggcgttttt

SEQ ID NO: 203385 - DNA, 1477 bp, Zea Mays
aaataagaattgtttaagctgttttttatgagtctagagatttgttgtaggacgaaacgagttctttgtcctgggcctttgtcactcttctctgtgtaacgacttcctccctttcctgccgcaccacgcaatcaccggggcggaggcggctgccggcgagcacttgggcgtctccggccaccgcctgcctcgttgtggttagtttccctcaccttccccttacctcactgccatattccttctcccgatccgtcagtttcgccagctgaagacgatcccaatctcagatccaactaggaactcacccagcgctatctcccggcaggctccccgttgactcccgcgatttgttacccgctggcgctgccgcacacagctcaaaaggagtagcagcgcccctggttgccggttggagcgtcaaggatgagcgggaggaagaatgcgggcaaggtttccccctggttgctcgtcctcatctgtttagggtgcttctttgtgacctacaacctcctgacgatgcccagccggggacgggatgggccgcgcaagttcctcggcggcggcggggatcgccactcaactgcctcgttggggtcaggctctgattcggaccccgcgaagcggttccacgtcgcgcttacggcgacggacgcactgtacagtcagtggcagtcgcggataatgcactactggtataaggagatgagggaccgacctggttccgacatgggtggcttcactaggatccttcactcgggcaagcctgatggattgatggatgagatacccaccatggtggttgatccccttcctgaaggcaaggatcagggatatattgtcttaaataggccttgggcttttgtccagtggatccagaaagcaaagatcgtagaagagtatatattaatggcagagccagatcatgtctttgtgaagcctttgccaaacttatctcatggtgatgagccagcggcatttccgtttttctacatcaaaccgactgagaatgagaagatattgaggaagtttttcccagaagaaaaagggcctatttcaaatattgatcctattggcaactctccggttataatcaagaaggctcagcttgagaagattgctccaacctggatgaatgtttcattaaaaatgaaagaggatcaggagacagacaaagcattcggatgggtcttggaaatgtacgcatacgctgttgctagtgcactgcacggtgtgcaccatagtctccataaagattttatgattcagcctccttgggacctgaaaacggacaacacattcatcatccattatacgtatggatgcgattattcaatgaagggtcagcttacttatgggaaaatcggtgaatggcgttttgacaaaagatcttaccttcaatctccaccaccaagaaatctttcactgccccctccaggagttcctgaaagtgtggtggccgtttagcttgaataatgac

SEQ ID NO: 203386 - DNA, 1427 bp, Zea Mays
gtcgtataggccgaagtattcagggtttagttgtgcgcgcggcgtgttcgatgaaacacgtggtacgaatcgcccaatgatgcgatctttgtgtgcacgggaggattgcgtgctgcaatcaactgagcatcagcacctacagacctaccctgtgaagcttgtggtttgagatgtgcagtttcagtactggagacaaacccatggagagaagattccaagccagtctatgtgctagccacaagcgataaccacctatggacaatgaaaactcgcaggagccgcaatgaagtcgaaagggaacttggaaagcttttctcaaacggagggggttctggagttggaactaaatcgaagtactctggcaccaagtttaacatggttgtcgaagatatcagagatggagtactggtatttgaggatgaggatgatgctgtaaaatactgcaaccttctgcagggcggcggccaagggtgcgagggaattgcggagatagaagcatcatcagttttcagcatgtgccgtaaaatgaaagcccttgctgttcttttccgccgtggaaagactcctccattgcctcaaagcctcgagcgcgacttgagggcgagaaagaggtcactggaggactagtgctgtctgtttacgctgcatagaagtgttaattgtactcatctagctgttggaagcatgggccctaggccttgtatacatcatagtagtacatagcagtccctagctgaactggaaccgagcctgacagaaaacacagacataattgctcgagaccagaaatctctttgaaattggatggatgttcttgtaattatgagcaacatgtttacaatgaataaaatgcgatacatcaagttattgtcattatttgattgatgtcttccaactggtgaatgaacagtacatacagacataattgctccagaaatctctttgagattggatggatgctctttaattatgagcaacgtttttacaatgaataagatgcgaatacatcaagttaatatcattatttgatgtcatccaacttatgaatgaataaatagtgcaagaggttgacgaccctgcttgacgacaaggcgagtctgaagaaattcctagtcatggctacttgttgatgatacatcgatacaggccgggatgtgattgtgaaatgtgtctcagaattcagggcgatgagcgcctctctgttagcttctccctcctgtacttgttgaaatctgctgcaagtcctgtgtccatgtcctgcttcatctgctccgccatctgcctcagcacctgcgcatcgttcaccacaaacgaaagcatgcctgtcaatccggtaatggtttctctgcaagagcaggctgcaggtgaggagacgaattcattgaagcaccgaccgtctcgccgacgcctctgatgatgctcgccgg

SEQ ID NO: 203387 - DNA, 830 bp, Zea Mays
cttttgtggtggcaagcatttaacaagtacgagtacagatgggctgatggtgtgcagataaagaaacccatagaggtatcagcaccaaaatatgtggagtatctgatggattggattgaaggccagcttgacgatgaatccatatttcctcaaaaacttggcacgccatttccaccgaacttcaaggaagtagtaaagacaatattcaagcgcttgtttcgggtctatgcccatacttaccactcccatttccagaagattgttagccttaaagaggaggcccatctcaatacctgttttaagcacttcattctgtttacaaatgagtttggcctgattgacaagaaggagctggctccacttcaggagctcatcgaatccatcatcgttccttactgagaacacggtttgctaaacatggatacagagctcttaatgctgatgctgtgaaattcagtctgtttatgacagcactttactgcatagagcttattgttcccgttattagacacaaggacatgtcacatatgcgtgtatctgtgttgtttcttcctgatcatgctgaccatgtaagtactgtcatatcagctatagaacggcgatgataatgtactgcagaaagaaaaaaaacacgagaaagctgagttggggctataaattgcatattggcacttatcgagtatagaatagatctccttctctttcttcttacaaacagaattgacttgttatttttaatggaatgaaataaatattcacgctttttgacatagaatccccttgaagggttgggtatatagaatatgtatatatatagtcttttccaatgc

SEQ ID NO: 203388 - DNA, 842 bp, Zea Mays
ttgtggccatgccttttgtggtggcaagcatttaacaagtacgagtacagatgggctgatggtgtgcagataaagaaacccatagaggtatcagcaccaaaatatgtggagtatctgatggattggattgaaggccagcttgacgatgaatccatatttcctcaaaaacttggcacgccatttccaccgaacttcaaggaagtagtaaagacaatattcaagcgcttgtttcgggtctatgcccatacttaccactcccatttccagaagattgttagccttaaagaggaggcccatctcaatacctgttttaagcacttcattctgtttacaaatgagtttggcctgattgacaagaaggagctggctccacttcaggagctcatcgaatccatcatcgttccttactgagaacacggtttgctaaacatggatacagagctcttaatgctgatgctgtgaaattcagtctgtttatgacagcactttactgcatagagcttattgttcccgttattagacacaaggacatgtcacatatgcgtgtatctgtgttgtttcttcctgatcatgctgaccatgtaagtactgtcatatcagctatagaacggcgatgataatgtactgcagaaagaaaaaaaacacgagaaagctgagttggggctataaattgcatattggcacttatcgagtatagaatagatctccttctctttcttcttacaaacagaattgacttgttatttttaatggaatgaaataaatattcacgctttttgacatagaatccccttgaagggttgggtatatagaatatgtatatatatagtcttttccaatgc

SEQ ID NO: 203389 - DNA, 1039 bp, Zea Mays
cagagcctggctaagcagtattgttgcaaccgggagcacagctccgaaagcacatagatgccactctcggcagtggaaaccttagggaagctgtgaggttgcctcctggagaggatatcaatgaatggcttgcggtgaatactgtggatttctttaaccaagttaatatgctgtatggcacactcacagaattttgcacacctgagagctgtccgacaatgacagctggcccaaagtacgagtacagatgggctgatggtgtgcagataaagaaacccatagaggtatcagcaccaaaatatgtggagtatctgatggattggattgaaggccagcttgacgatgaatccatatttcctcaaaaacttggcacgccatttccaccgaacttcaaggaagtagtaaagacaatattcaagcgcttgtttcgggtctatgcccatacttaccactcccatttccagaagattgttagccttaaagaggaggcccatctcaatacctgttttaagcacttcattctgtttacaaatgagtttggcctgattgacaagaaggagctggctccacttcaggagctcatcgaatccatcatcgttccttactgagaacacggtttgctaaacatggatacagagctcttaatgctgatgctgtgaaattcagtctgtttatgacagcactttactgcatagagcttattgttcccgttattagacacaaggacatgtcacatatgcgtgtatctgtgttgtttcttcctgatcatgctgaccatgtaagtactgtcatatcagctatagaacggcgatgataatgtactgcagaaagaaaaaaaacacgagaaagctgagttggggctataaattgcatattggcacttatcgagtatagaatagatctccttctctttcttcttacaaacagaattgacttgttatttttaatggaatgaaataaatattcacgctttttgacatagaatccccttgaagggttgggtatatagaatatgtatatatatagtcttttccaatgc

SEQ ID NO: 203390 - DNA, 1247 bp, Zea Mays
aaaaaaattcggtcccttcgtcctctactcctctagtcctctcggctcctcgcagtcgctcactgcgtgcgccaaaagcagcagcagctccagccgtcgccgtctccactctccagtctccaccactgctccgcccgcgccggatcgagggagggcaggcggacgaggaggagggatgagtctcttcgggcttggacgaaaccagaagacattccgccccaagaagagcgctccatcaggtagcaagggagcacagctccgaaagcacatagatgccactctcggcagtggaaaccttagggaagctgtgaggttgcctcctggagaggatatcaatgaatggcttgcgctgtggatttctttaaccaagttaatatgctgtatggcacactcacagaattttgcacacctgagagctgtccgacaatgacagctggcccaaagtacgagtacagatgggctgatggtgtgcagataaagaaacccatagaggtatcagcaccaaaatatgtggagtatctgatggattggattgaaggccagcttgacgatgaatccatatttcctcaaaaacttggcacgccatttccaccgaacttcaaggaagtagtaaagacaatattcaagcgcttgtttcgggtctatgcccatacttaccactcccatttccagaagattgttagccttaaagaggaggcccatctcaatacctgttttaagcacttcattctgtttacaaatgagtttggcctgattgacaagaaggagctggctccacttcaggagctcatcgaatccatcatcgttccttactgagaacacggtttgctaaacatggatacagagctcttaatgctgatgctgtgaaattcagtctgtttatgacagcactttactgcatagagcttattgttcccgttattagacacaaggacatgtcacatatgcgtgtatctgtgttgtttcttcctgatcatgctgaccatgtaagtactgtcatatcagctatagaacggcgatgataatgtactgcagaaagaaaaaaaacacgagaaagctgagttggggctataaattgcatattggcacttatcgagtatagaatagatctccttctctttcttcttacaaacagaattgacttgttatttttaatggaatgaaataaatattcacgctttttgacatagaatccccttgaagggttgggtatatagaatatgtatatatatagtcttttccaatgc

SEQ ID NO: 203391 - DNA, 1486 bp, Zea Mays
ttcgttctcgtctgcaagggcgaagggcaatgcaaatgaccaccaacctggccttccgtgtgcacgagcactgcacgaccactgcctgcgtgcatcaccgcaggaaccagactgatgagtaatctaatgactcattgtgttgtctagggcaggcagaatattacgcacgcgtgttggagtatttttaaaggatctcacgttacatgtggaataacatcaacaaagttgggggggaaatgtcgagaggcaatttttttttggcacagagaaaaaagaagttgcaataggcggagcggagagaagctttagataccttttcggccacccatcatatactctgtctgctgttcttccctataaattcgtcgacctctccatatcacagagagatagagagagagagagatagacaggagagagagagagaggggaagagagagagagagagagagagagatagatgtggtaactcaagaactgttcttatgcatgcagcagccataagcattgctactagcgtctcctgcacgtgctgtgtcgtttccagggtttcatgcggggcgaagcagctggtctctgccgcctgaacgccgccggaatctgcgaggcctccccgagctgcgtgcgtcgtcggataaggcagccggcacggcaatgccggttccgcttgctccgtacccagctcctccggcgccattcacgccgcccaatggggcccagagccagctcgtctgcaccgggtgccggaacctcctcatgtacccagctggtgcgacgtcggtctgctgcgccgtctgcagcaccgtcaccgccgtgccggctccaggaactgagatggcgcagctagtgtgcggaggatgccacaccctcctcatgtacatacgcggcgcgacgagcgtgcagtgttcttgctgccacactgtgaacctggctatggaagcaaatcaagtcgcgcatgtgaactgcgggaactgccgcatgctgctcatgtaccagtacggggctcggtccgtgaagtgcgcggtctgcagttttgtgacatcggttggaacctcacctggtgcagagcagaagcccagcagctgagctgatagtgtccctgaaagtgctgtgagaccacctatgaaaaggatgctttgagtgcacatgtatagagttcttccctgaagcgattctttcactttcttttcttttgttttcttttgttttcttttcttttttggttcctcctcaccatctccaccccacccgtccacttctgcgttccttcgatggatctcgcgagcccgcggaataaatgagagttttggatatatagctagggcttaacctcgtcgacttgtctgtaaaatcgaatgagacatatatataaacctatgttgttttccttgtttctgaatttctggatgcttctctggctgctctttgatctgaacaatttgtatttgtgcacggtaatcgaatgacacacacacataaggatcta

SEQ ID NO: 203392 - DNA, 1754 bp, Zea Mays
ctggccttccgtgtgcacgagcactgcacgaccactgcctgcgtgcatcaccgcaggaaccagactgatgagtaatctaatgactcattgtgttgtctagggcaggcagaatattacgcacgcgtgttggagtatttttaaaggatctcacgttacatgtggaataacatcaacaaagttgggggggaaatgtcgagaggcaatttttttttggcacagagaaaaaagaagttgcaataggcggagcggagagaagctttagataccttttcggccacccatcatatactctgtctgctgttcttccctataaattcgtcgacctctccatatcacagagagatagagagagagagagatagacaggagagagagagagaggggaagagagagagagagagagagagagatagatgtggtaactcaagaactgttcttatgcatgcagcagccataagcattgctactagcgtctcctgcacgtgctgtgtcgtttccagggtttcatgcggggcgaagcagctggtctctgccgcctgaacgccgccggaatctgcgaggcctccccgagctgcgtgcgtcgtcggataaggcagccggcacggcaatgccggttccgcttgctccgtacccagctcctccggcgccattcacgccgcccaatggggcccagagccagctcgtctgcaccgggtgccggaacctcctcatgtacccagctggtgcgacgtcggtctgctgcgccgtctgcagcaccgtcaccgccgtgccggctccaggaactgagatggcgcagctagtgtgcggaggatgccacaccctcctcatgtacatacgcggcgcgacgagcgtgcagtgttcttgctgccacactgtgaacctggctatggaagagagatggaaaagcttgacagggatgtcctagagtcactggactggagctgaatgaatatctcgtagagatgcttcagtgtgccgagcacagcatttactggaactttcctacaaggaaggattttagtcccatgaccatgaccacccgttgaattcatcaagttgcgaactttgtcaaaaagaaagggaaaaataaacatcacgttcagagattgtgtatttgtccagggttcagaaatcaagtgctctgctcattcctaacatctccagtgacgaacggtcttcttgttttttttcttcttcttccgtcgcagcaaatcaagtcgcgcatgtgaactgcgggaactgccgcatgctgctcatgtaccagtacggggctcggtccgtgaagtgcgcggtctgcagttttgtgacatcggttggaacctcacctggtgcagagcagaagcccagcagctgagctgatagtgtccctgaaagtgctgtgagaccacctatgaaaaggatgctttgagtgcacatgtatagagttcttccctgaagcgattctttcactttcttttcttttgttttcttttgttttcttttcttttttggttcctcctcaccatctccaccccacccgtccacttctgcgttccttcgatggatctcgcgagcccgcggaataaatgagagttttggatatatagctagggcttaacctcgtcgacttgtctgtaaaatcgaatgagacatatatataaacctatgttgttttccttgtttctgaatttctggatgcttctctggctgctctttgatctgaacaatttgtatttgtgcacggtaatcgaatgacacacacacataaggatcta

SEQ ID NO: 203393 - DNA, 2188 bp, Zea Mays
agggcaggcagaatattacgcacgcgtgttggagtatttttaaaggatctcacgttacatgtggaataacatcaacaaagttgggggggaaatgtcgagaggcaatttttttttggcacagagaaaaaagaagttgcaataggcggagcggagagaagctttagataccttttcggccacccatcatatactctgtctgctgttcttccctataaattcgtcgacctctccatatcacagagagatagagagagagagagatagacaggagagagagagagaggggaagagagagagagagagagagagagatagatgtggtaactcaagaactgttcttatgcatgcagcagccataagcattgctactagcgtctcctgcacgtgctgtgtcgtttccagggtttcatgcggggcgaagcagctggtctctgccgcctgaacgccgccggaatctgcgaggcctccccgagctgcgtgcgtcgtcggataaggcagccggcacggcaatgccggttccgcttgctccgtacccagctcctccggcgccattcacgccgcccaatggggcccagagccagctcgtctgcaccgggtgccggaacctcctcatgtacccagctggtgcgacgtcggtctgctgcgccgtctgcagcaccgtcaccgccgtgccggctccaggtacgccgtacgcgcatggcatgaatcaatatcaccttcgtcaagaacttgcgagcaaataaacacggcgccgtggagccacatttgtgtgtgcagagctagcagtgcaacactgtccctttcgtctctctgttctttttaaccagttaagaagtagcatttgctgcatccataaagttttgtttgcctttttttttgagatgaaggctttcattcgctacagagacctagctgtaggttccatgatagttcaaggggacaactttggtggtttccctctgaacctcttgcagttctggtgctgtagcagtagttggttactggcctctgaaacgtgaagctgccgcgtgaatcttctgcaggaactgagatggcgcagctagtgtgcggaggatgccacaccctcctcatgtacatacgcggcgcgacgagcgtgcagtgttcttgctgccacactgtgaacctggctatggaaggtaaatcctgtgacttcgattcctgtacgaaagaagaagaagaagaaaaaaaaatcctgctttctgtatattgtgtggtctggaaagctcagcaaccttccaatagcattttaacgtcgtagaattggcctatcttggagtcgtaatcgttgaaattggctattatccagagagatggaaaagcttgacagggatgtcctagagtcactggactggagctgaatgaatatctcgtagagatgcttcagtgtgccgagcacagcatttactggaactttcctacaaggaaggattttagtcccatgaccatgaccacccgttgaattcatcaagttgcgaactttgtcaaaaagaaagggaaaaataaacatcacgttcagagattgtgtatttgtccagggttcagaaatcaagtgctctgctcattcctaacatctccagtgacgaacggtcttcttgttttttttcttcttcttccgtcgcagcaaatcaagtcgcgcatgtgaactgcgggaactgccgcatgctgctcatgtaccagtacggggctcggtccgtgaagtgcgcggtctgcagttttgtgacatcggttggaacctcacctggtgcagagcagaagcccagcagctgagctgatagtgtccctgaaagtgctgtgagaccacctatgaaaaggatgctttgagtgcacatgtatagagttcttccctgaagcgattctttcactttcttttcttttgttttcttttgttttcttttcttttttggttcctcctcaccatctccaccccacccgtccacttctgcgttccttcgatggatctcgcgagcccgcggaataaatgagagttttggatatatagctagggcttaacctcgtcgacttgtctgtaaaatcgaatgagacatatatataaacctatgttgttttccttgtttctgaatttctggatgcttctctggctgctctttgatctgaacaatttgtatttgtgcacggtaatcgaatgacacacacacataaggatcta

SEQ ID NO: 203394 - DNA, 1871 bp, Zea Mays
agggcaggcagaatattacgcacgcgtgttggagtatttttaaaggatctcacgttacatgtggaataacatcaacaaagttgggggggaaatgtcgagaggcaatttttttttggcacagagaaaaaagaagttgcaataggcggagcggagagaagctttagataccttttcggccacccatcatatactctgtctgctgttcttccctataaattcgtcgacctctccatatcacagagagatagagagagagagagatagacaggagagagagagagaggggaagagagagagagagagagagagagatagatgtggtaactcaagaactgttcttatgcatgcagcagccataagcattgctactaggtgccgattcccctcttctttgttttttattcccctcttgctcttctttgatgatgattggctgggaactacatcttggaattccttttttttctctctctcactcgatttctttgtttgattattggccatggtgggtgattcctcgcctgttttatctcgaaactggattagctgcgagtttttttttcttctttcaacccgctgcgttattctaagctcggtctactcgttgcatcaggccaacaatggcaagtggcttccatgaacatggctgtccatgaaaaatcccccgtatgcatgctcggtctaatctcctcaagctagcgaaacgaaatttcctaaaagccggtctggtcctcgaatacagcttgttgcctgagccgctgggagtcctatggagtagtagagttcttcaccttcttctgcgcgcgattactgttagccggcttgaggagaagctggaacgatcttgacgtgcattcagagaatcgatttttccccgtctcccaaggactcctcgtccattacgtctcctgcacgtgctgtgtcgtttccagggtttcatgcggggcgaagcagctggtctctgccgcctgaacgccgccggaatctgcgaggcctccccgagctgcgtgcgtcgtcggataaggcagccggcacggcaatgccggttccgcttgctccgtacccagctcctccggcgccattcacgccgcccaatggggcccagagccagctcgtctgcaccgggtgccggaacctcctcatgtacccagctggtgcgacgtcggtctgctgcgccgtctgcagcaccgtcaccgccgtgccggctccaggaactgagatggcgcagctagtgtgcggaggatgccacaccctcctcatgtacatacgcggcgcgacgagcgtgcagtgttcttgctgccacactgtgaacctggctatggaagcaaatcaagtcgcgcatgtgaactgcgggaactgccgcatgctgctcatgtaccagtacggggctcggtccgtgaagtgcgcggtctgcagttttgtgacatcggttggaacctcacctggtgcagagcagaagcccagcagctgagctgatagtgtccctgaaagtgctgtgagaccacctatgaaaaggatgctttgagtgcacatgtatagagttcttccctgaagcgattctttcactttcttttcttttgttttcttttgttttcttttcttttttggttcctcctcaccatctccaccccacccgtccacttctgcgttccttcgatggatctcgcgagcccgcggaataaatgagagttttggatatatagctagggcttaacctcgtcgacttgtctgtaaaatcgaatgagacatatatataaacctatgttgttttccttgtttctgaatttctggatgcttctctggctgctctttgatctgaacaatttgtatttgtgcacggtaatcgaatgacacacacacataaggatcta

SEQ ID NO: 203395 - DNA, 1156 bp, Zea Mays
tcagccaaattgcatgccggacctgtacgatagatatatcttgttgctccagccttcaattattcattctcgccgagtcaaaatgggaattcaagatgactaaaagaggggcggtctacgagccgctgccctggagcctgaggctgaagatcctcatcggtgcagctcgtggcctcgcgttccttcattcgtcagagaggcagatcatctacagggacttcaaggcttccaacatcttactggattcgcacttcaacgcgaagctctcggatttcggattggccaagcatggtccagacggcggggagtctcatgtgacaacaagagtcatggggacctatggctatgcagctccagagtacgtttctaccggccacctgtacgtgaagagcgacgtgtacggcttcggcgtcgtgctgctggagatgatctccggcctgagggcgctggacccgagccgcgagcgcgagaaggtgaacctggtgaactgggcgaggccgttgctgtccgaccggaggaagcttagccagctgatggacggcgggctggaggggcagtacaaccccaaagccgccctcctggccgcccagctgaccctcaggtgcctcaacggcgaccccaagagacggccgtccatgaaggaggtggtggaggcgctggagaagatcgagtcgtcggcgaagggcaggatggcgagggagccccggaacagctcgcgccgtggcctggtgcagtcccctaggggtgacagcgctaggaacaactccagctccaggggcaggtagacgcatggtctaatcttgaggatgattctgatgcatgtgtaaaggtagtagatgaccacgattcttgttgtcatgacgaagtttacgccgatcatgataatcaatgtagcgatgctgctcgagcatgactttgtagcatatatatatgcgtaaattcaaccattattcttccatggaagtcttgtctgagttgagctagattgcacttacaataccagcaatgccatgaagtgttgtctgagttgagctgcatcaggctgtattaagtactatatttatagatttcgtatcaacatttttttttgttctacatgtttcttaaacatttaaatttattgtaccttgttactatattatattaaacatcaatt

SEQ ID NO: 203396 - DNA, 1328 bp, Zea Mays
gggtaaggggtcccgtgtttctctgacagctgggccccgcgttactcttgcctccaggccttccgggagtttggcgacccgtctcgggctcttgtgggggctagggtttaggcactaagcggcggccggcggcggcggggaggatggcggaggcggtcgtgaggtgcctccgggacggacggctcgacggcgagcacgcgccggcactggctgtggagggatcactcaagtgctgcccgctcgcggcgggtgcgatgctccacatcgcggccgcattcgcctcccaggtcgccgcagggaaggcgcaggccaggggactggtggttgtggcgtttgatcggagcccacaggtgtacctggaattcatgcgccgccgcaaccttgacgcaaatgctttggaccgatgtgttagaatattggattgctactctgacccacttggatggaagcagaagattcaaaatcagcagcatcaagggaacagtgcaaagcagttctcaacaaataaagataatattactgtttatagaagtgtgaaggatgttacaaaattgatgtcctccactactgaacttggaggaggttttgaaggagaaggcaaaacatatttttctgtggctgttgactcaattagctccatgttaaggcatgcttcagtgtcatcaatttcaggccttcttagtaaccttcgaagccatgaacaagtatcatcaatcttttggatgatacattcagacctccatgagcccaaggtaccccgagcatttgaatgtctttctactatggttgcttgtgtggagccagcacttgtggatcctgtttgtggagagagtccgggaaacatgtctatccttgagcaaaattattcaaaagcaaaatttattgttcgccttaaacgacgaaatggacgggtgaagcacctttacgagaacctgtatattgaggggaatgatatcaaatttgattcggctccttctgtaagtatagaagtgaaccaaagtctagtgcctaaggttcagttcaatcttgagctgtcagagaaggagcgtagcgacagggcaaatgttgttcttcctttcgaacatcaaggaaatggccaaccaattcatatatatgatggtcgccggtccctacctgaggctcaacgtgaccccaatttaactgcaccgccccttgtggatgaagtaaaaaatcccaaatctggaactgcaaagggtgaaatacattacttccgtgattcagatgacgagcaacctgactcggatgaagatccagatgatgatttggacatataagagtgcacagggatgagatagatatagagctac

SEQ ID NO: 203397 - DNA, 3923 bp, Zea Mays
  misc_feature (3922)..(3923): n is a, c, g, or t
ttttttgctcctagtttgcacccgttgtggagttttttggttagcccgttcgttttgtgcggttttctgttttccatgggtgatttaggaggtgaatgtgcctacaatacacgcgggtgtagtctgcacgttgttttagcggatcccaggtttccatggcgtccaattcgcaacgcggcgtaggaatcccatcctagattcggtcgagctgcaatgccggcgtccgcatagctggaaatcgggcgctgacggacaccgggcgccgagatgggccgttccggccgccgccggcgggaccgcgtgcggtggagcaatctctacaccttctcctgcttccgtgcccagcaagagcacgccggcgatgcgggcccctcctccgatggggctggcgccgtcggcgggccgggcttctcgcgcgtcgtgtactgcaacaacgccgccctgcagaagccgctcaagtacatcaccaactacatcaccaccaccaagtacaacatcatcaccttcttccccaaggccatcttcgagcagttccgacgcgttgccaacctctacttcctcctcaccgccatcctctcgctcaccccagtgtgccccttctctcccgtcagcatgattgctccgctggcctttgttgttggcctcagcatgatgaaggaggggttggaggactggcgccgcttcatccaggacatgaaggtgaacaaccgctatgtcagcacgcacaagggtgatggcgaattcgactaccggcactgggaggacctttgtgtcggtgatgtggtcagagttgagaaggaccagttcttccctgctgatttactgctactgtcctcgagctatgaggatggtatttgctatgttgagacaatgaacctcgatggtgagacgaaccttaaggtgaagaggtcacttgaggtaacgctgccgctggaagaagacgagtcatttaaggatttccaggcagtgatacgctgcgaggatcccaacccgtccttgtacacatttactggtaactttgagtatgagaggcaggtgtacgcccttgatccgtctcagatacttctgagggactcaaaactaaggaatacagcctttatctatggagtggttatcttcactggccatgacagtaaagtcatgcagaactcaactgagtcgccatcaaagaggagcaggattgagaagaagatggatttgatcatatacatcctgtttactgtgcttgtgttgatatcgctcattagttcaattggattcgccgtgaggatcaagttagatttgccccgctggtggtacttgcagccagagaaaagcaataaattagatgatccatcacgcccagctctttctgggatattccatctaatcacagctctcattctttatgggtatctgattccaatctcgctgtatgtctcgattgaacttgtgaaggtattgcaagcacatttcattaaccaggacattcatatgtttgatgaggacactggcaatactgctcaggcacgtacatcaaatttgaatgaggaacttggccaggttcatactatcttatcggataaaactggcactctgacctgcaatcaaatggatttcctgaagtgttcaattgctggagtatcatatggcgtgggttcaagtgaagttgaacgtgctgctgcaaagcatatggcatcaggtgctgatgaccatgatatccctttacaagatatatgggaggagaacaatgatgatgaaatcgagttggtaggagtcaactttagtgttgggaccaacataaagccctccataaaaggcttcagttttgtggatgaccgtctcatgcaagggaactggaccaaggagccaaattcttccacaattctactcttcttcaggatacttgctctgtgtcacacagcgataccagagataaatgaagcaactggttctattgcctatgaagcagaatcacctgatgagggggcttttcttgtggcagccagggaatttggatttgaatttttcaagcgaacacaatcaagtgtctttgtcagggagaaacacacttcttcgaaagacacagttgagagggagttcaagattctcaatctattggaattcagtagcaaaagaaaacgaatgactgtaattctgcaggatgaagatggtcaaattcttcttttttgcaaaggagcagacagcatcatatttgatagactggcaaaaaatggaaggatgtatgaagttgatacgactaggcatctgaatgattatggtgaggcaggcttgcgaacattggcactatcatacagggtgcttgatgaatcagaatattctttgtggaatgcggagtttcttaaagcaaagacatatattggtcctgatagagagttgcaacttgaacgagtctctgagttgattgaaagagagctgatccttgttggtgcaactgctgtagaggacaaattacaaaagggggttcctcagtgcatagatcggttggcgcaagcaggtctcaaaatctgggttctgacaggtgataagatggaaactgcaattaacatcggatatgcatgcagtttactgaggcaaggcatgaaacaaatatgtttgtccatacccactggtgagcaggtagctcaggatgcaaagaaggttgcaaaggagagtctcctgtcgcaaatcgccaatgggtcacaaatggtcaaactcgagaaggatccagatgcagcatttgctctagttattgatggaaaagctctggcatttgctttggaggatgacatgaagcatatgttcttgaacctggcaatcgagtgtgcttctgtcatatgttgtcgtgtgtctccaaagcagaaagcactggtgactcggctcgttaaagaaggtataggacaaaccactttagcagtaggtgatggtgcaaacgatgtgggcatgattcaagaagctgatattggagttggaataagcggggtagagggcatgcaggcggtgatggctagtgatttttctatttctcaatttcggtttcttgagcgacttcttgtcgttcatggacattggtgctacaagagaatcgcccaaatgatttgctacttcttttataagaatatcgcatttgggcttacaatattttactttgaagcattcgctgggttttctggtcaatctgtatacgatgattggtttatgctgcttttcaatgttgttcttacctcacttcctgttatatcactcggagtatttgagcaagacgtttcatccgaaatctgcttacagttcccagcattataccagcaagggccaaagaatcttttctttgattggtaccggatccttggatggatggggaatggcctctactcctctctggccatattcttcctcaatctctgcatattctatgatcaggcaatccgtgttggggggcagactgcagacattgctgcggtgggaactaccatgttcacctgcatcatctgggctgtcaacatgcagattgccctaacaatgagccatttcacatggattcaacatctctttgtatggggcagcataacaacttggtatctcttcatcctcgcctatgggatgacattgaggtctggcgacaactaccagatcctattagaagtccttgggccagctcccatatactgggcagcgacgcttctggtgactgctgcctgcaacatcccctacctgatacacatatcctaccagagatcgtgcaatccacttgatcaccatgtgattcaagagatcaagtacctaaagaaagatgttgaagaccagacgatgtggaagagggagcggtcgaaggccaggcagaagacaaagattggtttcactgcgagggttgatgcaaagatcaagcagatcagggggaaattgcataagaaaggcccatctttaacaatccagacggtatcgnn

SEQ ID NO: 203398 - DNA, 3924 bp, Zea Mays
  misc_feature (3923)..(3924): n is a, c, g, or t
cccgccccccgctcctcgctccaactcccacccacccaccaaagcgtcgccggccgacgcgtgcgaatccccaggacgggatcgataccccgcttgatcgccggactctctgcctcggtcctcctcttcgcacctctctctgcctgtgaatccagctgcaggtccaattcgcaacgcggcgtaggaatcccatcctagattcggtcgagctgcaatgccggcgtccgcatagctggaaatcgggcgctgacggacaccgggcgccgagatgggccgttccggccgccgccggcgggaccgcgtgcggtggagcaatctctacaccttctcctgcttccgtgcccagcaagagcacgccggcgatgcgggcccctcctccgatggggctggcgccgtcggcgggccgggcttctcgcgcgtcgtgtactgcaacaacgccgccctgcagaagccgctcaagtacatcaccaactacatcaccaccaccaagtacaacatcatcaccttcttccccaaggccatcttcgagcagttccgacgcgttgccaacctctacttcctcctcaccgccatcctctcgctcaccccagtgtgccccttctctcccgtcagcatgattgctccgctggcctttgttgttggcctcagcatgatgaaggaggggttggaggactggcgccgcttcatccaggacatgaaggtgaacaaccgctatgtcagcacgcacaagggtgatggcgaattcgactaccggcactgggaggacctttgtgtcggtgatgtggtcagagttgagaaggaccagttcttccctgctgatttactgctactgtcctcgagctatgaggatggtatttgctatgttgagacaatgaacctcgatggtgagacgaaccttaaggtgaagaggtcacttgaggtaacgctgccgctggaagaagacgagtcatttaaggatttccaggcagtgatacgctgcgaggatcccaacccgtccttgtacacatttactggtaactttgagtatgagaggcaggtgtacgcccttgatccgtctcagatacttctgagggactcaaaactaaggaatacagcctttatctatggagtggttatcttcactggccatgacagtaaagtcatgcagaactcaactgagtcgccatcaaagaggagcaggattgagaagaagatggatttgatcatatacatcctgtttactgtgcttgtgttgatatcgctcattagttcaattggattcgccgtgaggatcaagttagatttgccccgctggtggtacttgcagccagagaaaagcaataaattagatgatccatcacgcccagctctttctgggatattccatctaatcacagctctcattctttatgggtatctgattccaatctcgctgtatgtctcgattgaacttgtgaaggtattgcaagcacatttcattaaccaggacattcatatgtttgatgaggacactggcaatactgctcaggcacgtacatcaaatttgaatgaggaacttggccaggttcatactatcttatcggataaaactggcactctgacctgcaatcaaatggatttcctgaagtgttcaattgctggagtatcatatggcgtgggttcaagtgaagttgaacgtgctgctgcaaagcatatggcatcaggtgctgatgaccatgatatccctttacaagatatatgggaggagaacaatgatgatgaaatcgagttggtaggagtcaactttagtgttgggaccaacataaagccctccataaaaggcttcagttttgtggatgaccgtctcatgcaagggaactggaccaaggagccaaattcttccacaattctactcttcttcaggatacttgctctgtgtcacacagcgataccagagataaatgaagcaactggttctattgcctatgaagcagaatcacctgatgagggggcttttcttgtggcagccagggaatttggatttgaatttttcaagcgaacacaatcaagtgtctttgtcagggagaaacacacttcttcgaaagacacagttgagagggagttcaagattctcaatctattggaattcagtagcaaaagaaaacgaatgactgtaattctgcaggatgaagatggtcaaattcttcttttttgcaaaggagcagacagcatcatatttgatagactggcaaaaaatggaaggatgtatgaagttgatacgactaggcatctgaatgattatggtgaggcaggcttgcgaacattggcactatcatacagggtgcttgatgaatcagaatattctttgtggaatgcggagtttcttaaagcaaagacatatattggtcctgatagagagttgcaacttgaacgagtctctgagttgattgaaagagagctgatccttgttggtgcaactgctgtagaggacaaattacaaaagggggttcctcagtgcatagatcggttggcgcaagcaggtctcaaaatctgggttctgacaggtgataagatggaaactgcaattaacatcggatatgcatgcagtttactgaggcaaggcatgaaacaaatatgtttgtccatacccactggtgagcaggtagctcaggatgcaaagaaggttgcaaaggagagtctcctgtcgcaaatcgccaatgggtcacaaatggtcaaactcgagaaggatccagatgcagcatttgctctagttattgatggaaaagctctggcatttgctttggaggatgacatgaagcatatgttcttgaacctggcaatcgagtgtgcttctgtcatatgttgtcgtgtgtctccaaagcagaaagcactggtgactcggctcgttaaagaaggtataggacaaaccactttagcagtaggtgatggtgcaaacgatgtgggcatgattcaagaagctgatattggagttggaataagcggggtagagggcatgcaggcggtgatggctagtgatttttctatttctcaatttcggtttcttgagcgacttcttgtcgttcatggacattggtgctacaagagaatcgcccaaatgatttgctacttcttttataagaatatcgcatttgggcttacaatattttactttgaagcattcgctgggttttctggtcaatctgtatacgatgattggtttatgctgcttttcaatgttgttcttacctcacttcctgttatatcactcggagtatttgagcaagacgtttcatccgaaatctgcttacagttcccagcattataccagcaagggccaaagaatcttttctttgattggtaccggatccttggatggatggggaatggcctctactcctctctggccatattcttcctcaatctctgcatattctatgatcaggcaatccgtgttggggggcagactgcagacattgctgcggtgggaactaccatgttcacctgcatcatctgggctgtcaacatgcagattgccctaacaatgagccatttcacatggattcaacatctctttgtatggggcagcataacaacttggtatctcttcatcctcgcctatgggatgacattgaggtctggcgacaactaccagatcctattagaagtccttgggccagctcccatatactgggcagcgacgcttctggtgactgctgcctgcaacatcccctacctgatacacatatcctaccagagatcgtgcaatccacttgatcaccatgtgattcaagagatcaagtacctaaagaaagatgttgaagaccagacgatgtggaagagggagcggtcgaaggccaggcagaagacaaagattggtttcactgcgagggttgatgcaaagatcaagcagatcagggggaaattgcataagaaaggcccatctttaacaatccagacggtatcgnn

SEQ ID NO: 203399 - DNA, 3999 bp, Zea Mays
  misc_feature (3998)..(3999): n is a, c, g, or t
ctctcctcgtctcagctcgcggccacgctagtcgctccccacctcgttccctgcctcgtccccacccttctcgctccgccccccgccccccgctcctcgctccaactcccacccacccaccaaagcgtcgccggccgacgcgtgcgaatccccaggacgggatcgataccccgcttgatcgccggactctctgcctcggtcctcctcttcgcacctctctctgcctgtgaatccaggtccaattcgcaacgcggcgtaggaatcccatcctagattcggtcgagctgcaatgccggcgtccgcatagctggaaatcgggcgctgacggacaccgggcgccgagatgggccgttccggccgccgccggcgggaccgcgtgcggtggagcaatctctacaccttctcctgcttccgtgcccagcaagagcacgccggcgatgcgggcccctcctccgatggggctggcgccgtcggcgggccgggcttctcgcgcgtcgtgtactgcaacaacgccgccctgcagaagccgctcaagtacatcaccaactacatcaccaccaccaagtacaacatcatcaccttcttccccaaggccatcttcgagcagttccgacgcgttgccaacctctacttcctcctcaccgccatcctctcgctcaccccagtgtgccccttctctcccgtcagcatgattgctccgctggcctttgttgttggcctcagcatgatgaaggaggggttggaggactggcgccgcttcatccaggacatgaaggtgaacaaccgctatgtcagcacgcacaagggtgatggcgaattcgactaccggcactgggaggacctttgtgtcggtgatgtggtcagagttgagaaggaccagttcttccctgctgatttactgctactgtcctcgagctatgaggatggtatttgctatgttgagacaatgaacctcgatggtgagacgaaccttaaggtgaagaggtcacttgaggtaacgctgccgctggaagaagacgagtcatttaaggatttccaggcagtgatacgctgcgaggatcccaacccgtccttgtacacatttactggtaactttgagtatgagaggcaggtgtacgcccttgatccgtctcagatacttctgagggactcaaaactaaggaatacagcctttatctatggagtggttatcttcactggccatgacagtaaagtcatgcagaactcaactgagtcgccatcaaagaggagcaggattgagaagaagatggatttgatcatatacatcctgtttactgtgcttgtgttgatatcgctcattagttcaattggattcgccgtgaggatcaagttagatttgccccgctggtggtacttgcagccagagaaaagcaataaattagatgatccatcacgcccagctctttctgggatattccatctaatcacagctctcattctttatgggtatctgattccaatctcgctgtatgtctcgattgaacttgtgaaggtattgcaagcacatttcattaaccaggacattcatatgtttgatgaggacactggcaatactgctcaggcacgtacatcaaatttgaatgaggaacttggccaggttcatactatcttatcggataaaactggcactctgacctgcaatcaaatggatttcctgaagtgttcaattgctggagtatcatatggcgtgggttcaagtgaagttgaacgtgctgctgcaaagcatatggcatcaggtgctgatgaccatgatatccctttacaagatatatgggaggagaacaatgatgatgaaatcgagttggtaggagtcaactttagtgttgggaccaacataaagccctccataaaaggcttcagttttgtggatgaccgtctcatgcaagggaactggaccaaggagccaaattcttccacaattctactcttcttcaggatacttgctctgtgtcacacagcgataccagagataaatgaagcaactggttctattgcctatgaagcagaatcacctgatgagggggcttttcttgtggcagccagggaatttggatttgaatttttcaagcgaacacaatcaagtgtctttgtcagggagaaacacacttcttcgaaagacacagttgagagggagttcaagattctcaatctattggaattcagtagcaaaagaaaacgaatgactgtaattctgcaggatgaagatggtcaaattcttcttttttgcaaaggagcagacagcatcatatttgatagactggcaaaaaatggaaggatgtatgaagttgatacgactaggcatctgaatgattatggtgaggcaggcttgcgaacattggcactatcatacagggtgcttgatgaatcagaatattctttgtggaatgcggagtttcttaaagcaaagacatatattggtcctgatagagagttgcaacttgaacgagtctctgagttgattgaaagagagctgatccttgttggtgcaactgctgtagaggacaaattacaaaagggggttcctcagtgcatagatcggttggcgcaagcaggtctcaaaatctgggttctgacaggtgataagatggaaactgcaattaacatcggatatgcatgcagtttactgaggcaaggcatgaaacaaatatgtttgtccatacccactggtgagcaggtagctcaggatgcaaagaaggttgcaaaggagagtctcctgtcgcaaatcgccaatgggtcacaaatggtcaaactcgagaaggatccagatgcagcatttgctctagttattgatggaaaagctctggcatttgctttggaggatgacatgaagcatatgttcttgaacctggcaatcgagtgtgcttctgtcatatgttgtcgtgtgtctccaaagcagaaagcactggtgactcggctcgttaaagaaggtataggacaaaccactttagcagtaggtgatggtgcaaacgatgtgggcatgattcaagaagctgatattggagttggaataagcggggtagagggcatgcaggcggtgatggctagtgatttttctatttctcaatttcggtttcttgagcgacttcttgtcgttcatggacattggtgctacaagagaatcgcccaaatgatttgctacttcttttataagaatatcgcatttgggcttacaatattttactttgaagcattcgctgggttttctggtcaatctgtatacgatgattggtttatgctgcttttcaatgttgttcttacctcacttcctgttatatcactcggagtatttgagcaagacgtttcatccgaaatctgcttacagttcccagcattataccagcaagggccaaagaatcttttctttgattggtaccggatccttggatggatggggaatggcctctactcctctctggccatattcttcctcaatctctgcatattctatgatcaggcaatccgtgttggggggcagactgcagacattgctgcggtgggaactaccatgttcacctgcatcatctgggctgtcaacatgcagattgccctaacaatgagccatttcacatggattcaacatctctttgtatggggcagcataacaacttggtatctcttcatcctcgcctatgggatgacattgaggtctggcgacaactaccagatcctattagaagtccttgggccagctcccatatactgggcagcgacgcttctggtgactgctgcctgcaacatcccctacctgatacacatatcctaccagagatcgtgcaatccacttgatcaccatgtgattcaagagatcaagtacctaaagaaagatgttgaagaccagacgatgtggaagagggagcggtcgaaggccaggcagaagacaaagattggtttcactgcgagggttgatgcaaagatcaagcagatcagggggaaattgcataagaaaggcccatctttaacaatccagacggtatcgnn

SEQ ID NO: 203400 - DNA, 1592 bp, Zea Mays
tgcggcgacctgggaggcgaatgcggccgcgatgtggagcatcgcacccgccgcgagcgggcagcacttgagtgatccctccacagccagtgccggcgcgtgctcgccgtcgagccgtccgtcccggaggcacctcacgaccgcctccgccatcctccccgccgccgccggccgccgcttagtgcctaaaccctagcccccacaagagcccgagacgggtcgccaaactcccggaaggcctggaggcaagagtaacgcggggcccagctgtcagagaaacacgggaccccttacccgtgtcggatataatcaagccgtcgtttgaccccgcctcgaaaccttttgccgtcttgcggcggccttctgctccgccgctcgttctcatatcttgcggcggcctggggaaaaagaggagagatcggagatgaaggcgtgtgcgaaggctgcgggggagaggctgtcgctggtctgtgctccgtcaactaggcagcctctagctcggagctttgttaaggcaagaagattaccctctcaacatgagacgaagtcacaagtatcctgctcggttagggtgtcagaaaacacagctcacagaatagatgccacagcagaaaatattttcccagcagtgaaagatcatgtcttgaaagcaactgatgcaatcaacagaggagaagtgattgcggtgcctactgataccatatacgggtttgcatgtgatgcatggagcagttaatcgtatttatgagatcaaaggacgcatacaaacaaggcctctggcaatttgtgttggtgatgtctcagacatatcacggtttgctttagtggaccacttgccacatggcttgcttgatagtctacttcctgggcctgtcactattgttctaaaacgaggtgaaaacagcatattagagagatcacttaatcctggcttggatagcattggagttcgtgtgccggatctggatttcatacgatccattgctcgtggtactggaagtgcacttgcactcaccagcgccaacttaagcggacagcctagtagtgtctgtgtcaaagatttcgagggtttatggccacattgttcatatgtctttgatggtggagtacttccttctgggcgtgctggttcaacaatcgttgatctaataacaccaggagtttacaagatattgagggatggaagctcaaggaaggaaacagcagcagtgctcggcaagttcggctttgttgaagcgttgtaactactcggcactttaagaaagtaagcacgatcaaagagtggctgtcttatccacattatatcttgtttaattagtgatacattagagcttttgttgctgtttgtgcttttcttttacatcttcaaacttattgtattattgcgaatgtgatgttgagtagaataacagagttcacattatttaagctgtgtagagtgtgtgacatgggcttgttttgtagcaaatgaagcagctcagttgtggattttggatgtgttgtgaacgaaaatatgatattttcttatgcctgttcttcgcccatggttctgcttgttagcttctacgtgacatcaagtcgttggttacagg

SEQ ID NO: 203401 - DNA, 1672 bp, Zea Mays
tgcggcgacctgggaggcgaatgcggccgcgatgtggagcatcgcacccgccgcgagcgggcagcacttgagtgatccctccacagccagtgccggcgcgtgctcgccgtcgagccgtccgtcccggaggcacctcacgaccgcctccgccatcctccccgccgccgccggccgccgcttagtgcctaaaccctagcccccacaagagcccgagacgggtcgccaaactcccggaaggcctggaggcaagagtaacgcggggcccagctgtcagagaaacacgggaccccttacccgtgtcggatataatcaagccgtcgtttgaccccgcctcgaaaccttttgccgtcttgcggcggccttctgctccgccgctcgttctcatatcttgcggcggcctggggaaaaagaggagagatcggagatgaaggcgtgtgcgaaggctgcgggggagaggctgtcgctggtctgtgctccgtcaactaggcagcctctagctcggaggtctccttgtcatctgggtcccaggccattggacgctcttcccctgctgttgctctgggacacctgggcctgctttgttaaggcaagaagattaccctctcaacatgagacgaagtcacaagtatcctgctcggttagggtgtcagaaaacacagctcacagaatagatgccacagcagaaaatattttcccagcagtgaaagatcatgtcttgaaagcaactgatgcaatcaacagaggagaagtgattgcggtgcctactgataccatatacgggtttgcatgtgatgcatgctctgcaggagcagttaatcgtatttatgagatcaaaggacgcatacaaacaaggcctctggcaatttgtgttggtgatgtctcagacatatcacggtttgctttagtggaccacttgccacatggcttgcttgatagtctacttcctgggcctgtcactattgttctaaaacgaggtgaaaacagcatattagagagatcacttaatcctggcttggatagcattggagttcgtgtgccggatctggatttcatacgatccattgctcgtggtactggaagtgcacttgcactcaccagcgccaacttaagcggacagcctagtagtgtctgtgtcaaagatttcgagggtttatggccacattgttcatatgtctttgatggtggagtacttccttctgggcgtgctggttcaacaatcgttgatctaataacaccaggagtttacaagatattgagggatggaagctcaaggaaggaaacagcagcagtgctcggcaagttcggctttgttgaagcgttgtaactactcggcactttaagaaagtaagcacgatcaaagagtggctgtcttatccacattatatcttgtttaattagtgatacattagagcttttgttgctgtttgtgcttttcttttacatcttcaaacttattgtattattgcgaatgtgatgttgagtagaataacagagttcacattatttaagctgtgtagagtgtgtgacatgggcttgttttgtagcaaatgaagcagctcagttgtggattttggatgtgttgtgaacgaaaatatgatattttcttatgcctgttcttcgcccatggttctgcttgttagcttctacgtgacatcaagtcgttggttacagg

SEQ ID NO: 203402 - DNA, 1559 bp, Zea Mays
tgcggcgacctgggaggcgaatgcggccgcgatgtggagcatcgcacccgccgcgagcgggcagcacttgagtgatccctccacagccagtgccggcgcgtgctcgccgtcgagccgtccgtcccggaggcacctcacgaccgcctccgccatcctccccgccgccgccggccgccgcttagtgcctaaaccctagcccccacaagagcccgagacgggtcgccaaactcccggaaggcctggaggcaagagtaacgcggggcccagctgtcagagaaacacgggaccccttacccgtgtcggatataatcaagccgtcgtttgaccccgcctcgaaaccttttgccgtcttgcggcggccttctgctccgccgctcgttctcatatcttgcggcggcctggggaaaaagaggagagatcggagatgaaggcgtgtgcgaaggctgcgggggagaggctgtcgctggtctgtgctccgtcaactaggcagcctctagctcggagctttgttaaggcaagaagattaccctctcaacatgagacgaagtcacaagtatcctgctcggttagggtgtcagaaaacacagctcacagaatagatgccacagcagaaaatattttcccagcagtgaaagatcatgtcttgaaagcaactgatgcaatcaacagaggagaagtgattgcgctctgcaggagcagttaatcgtatttatgagatcaaaggacgcatacaaacaaggcctctggcaatttgtgttggtgatgtctcagacatatcacggtttgctttagtggaccacttgccacatggcttgcttgatagtctacttcctgggcctgtcactattgttctaaaacgaggtgaaaacagcatattagagagatcacttaatcctggcttggatagcattggagttcgtgtgccggatctggatttcatacgatccattgctcgtggtactggaagtgcacttgcactcaccagcgccaacttaagcggacagcctagtagtgtctgtgtcaaagatttcgagggtttatggccacattgttcatatgtctttgatggtggagtacttccttctgggcgtgctggttcaacaatcgttgatctaataacaccaggagtttacaagatattgagggatggaagctcaaggaaggaaacagcagcagtgctcggcaagttcggctttgttgaagcgttgtaactactcggcactttaagaaagtaagcacgatcaaagagtggctgtcttatccacattatatcttgtttaattagtgatacattagagcttttgttgctgtttgtgcttttcttttacatcttcaaacttattgtattattgcgaatgtgatgttgagtagaataacagagttcacattatttaagctgtgtagagtgtgtgacatgggcttgttttgtagcaaatgaagcagctcagttgtggattttggatgtgttgtgaacgaaaatatgatattttcttatgcctgttcttcgcccatggttctgcttgttagcttctacgtgacatcaagtcgttggttacagg

SEQ ID NO: 203403 - DNA, 1091 bp, Zea Mays
caaatgtttccttcctttggaaattgaccaaatagccattctcttgttggtcttatcaggtgcatctcctggtgagggcactggggcaactatgtctgacgatgaagacaatcaggtggacagtgagagcaacatgtttgatggaaatgaggggtcagatggaatgggatttggcccattaatgttgactgagggtgagagatccttagttgagcgcgtccggcaggagctaaagcatgagcttaagcaggggtacagagacaaacttgtggatattcgggaagagatattgcggaagcgaagagctgggaaactccctggcgacactgcttctaccttaaaagcatggtggcaggctcattctaagtggccgtacccaaccgaggaagacaaggctcgactggtgcaggaaacagggctacaactgaagcagatcaataactggtttatcaaccagcgtaagcggaactggcacaacaattcggcgtcatcctcgtcggacaaaagcaagagaaaaaggtgatgggaacgcagaaccagcctggtagggcatggtcggggaacgaagtttatgtaaataatgcttctactgtgaagagttccatcatatttgttgctccagaaaagaccctcagaccggtgtttcctgaacccatattcatacaaagacatcagacgatgaataatgttgcgagtagtcaaataaaataaataacttgtatagtgaataactagaaactagcattcatcgttttggtattgtatagcgctagagtgtaattgtttggtcggactgtcttgtataatggtgtaaggttcaaatgcattttgacctagcattcgatattgtattttgtgatgttaaaaaccattgtattccgttttgtgttttatccgtggaatagggacactgtttagtgttgccctcaattcggccatgtcgtgttgtcaacttcatattaaacttcaaagttgtttgtatttaataaacttcaaacttcatatataacacgaggttgtggtatagtttcacgatatgcaattatttgtatttaataaacaacatattgttgaagatattattagccaaa

SEQ ID NO: 203404 - DNA, 1448 bp, Zea Mays
gcctctcaagctcaagggctcaaggccattagcgtaattacaaaattgtaattaattctcaatctcaaggttagtaacgtaattctagagcttccgagcagaaaaggtacggagtcggaaggatatgatcgcttaggagtgcggctagggttttttcttgtcacaccttccctcggtcccttccatcttctagccgccgccgccgccgccgctgcccaaaaccctacctaccctcttcttccccctcactctcctttcatctccattctaatggcggcccaacccgtccggcgaagctgctagtgcttgtatctactatcttcatcaggtacttcgccatcctactgaagtattccccgccgccgctgccatggccaccctcaaccctttcgaactcctcggcgccgacgacaacgacgacccgacgcagctgattgcggcggcggcggctgctgctcagaaagccgaggcgaagaagtccgccgtggcgcctgctgggaaggctgcccagcctgcggcgaccaccaagttcccgaccaagcccgctcctccctcgcagacggttcgggatgcacgcggcggtggctcatcagctcgtggaggctttggccgtggtgaacgtggccgtggcagaggtggacggggatatggccagaaccgtggcttcagtggtgacaatggcaatgagttccagggaggttatggtggcggaggctatggggatggtgctgtaactggtggatctgaaggagaaagggagagagagactcgtcccccgtaccgtggcggaggcagacgtggtggttacaggaatgttgagtttgctgatgactctgagaggccaccacggagaaactatgagcgccacagcgggactggccatggctatgagatgaagcgtgatggcgcagggcgtgggaactggggcactgccactgatgaacttattgcccaggatgcagaggactctccgaagatggaggaggctgctcctgttgctgagaaacaaggtgagcagaatgatgccccagcagcagatgagaacaaagataacaaggatgctactgcaaatgaggaggaagaaaaggaagaggacaaggagatgactctggaggaatttgagaaaataagagaggagaagaggaaagcactacttgcattgaaggctgaggagaggaaagttgaagttgacaaggatttgcagtctctgcagccactttcaaacaagaaagaaaatgatgaagttttcattaagctgggttctgacaaggataagaagaaggaaaatgctgagcgtgatgagcgtgccaagaagtcggtgagcatcaacgagttcctgaaacctgctgaaggagaaaggtactacggcggccgtggccgtggaaggggccgtggggatcgtggtggttttagaggcggatacggagggggatacagtcgtgggcggc

SEQ ID NO: 203405 - DNA, 2677 bp, Zea Mays
caaaggccctcaattttgaattgctggattcttgggaagccctgtacctgactactggatccactaccaagctcttcaagttccaggatccattcctctttgtcgggcaagagctcttggcctctgtggattatcagcctgattcacaactctctgcaagaattcgagcgcagatgggccaagaaagcgcggctgacgcgattcctggtttgatggtttctgttggtgtttcgggctaacagactctcttttttttgtttacttcctcaaagttccacttcaacatatggatccgggcttcccgagttggaatctgatcactcgcgtcagtgcttcttagcttccttcatttgccgtcatggaggagcagaactcatggcttattaggaccaagttctcccatactgtctacactagagtggatccacgaagagtagcagctgttgctccggtgggcaaagatgtggtgctgccttttgctccgcttagtaaggatgttgagcggaagctgcagaaaattttcagtatgaagaagtctgcatcgatgcctgttgatcgggatgatgaagacacagggactgcattcaagcactgcgctagcttgccgctagtccggtcctcgcctcagcttgatagggacaaggtcaacaagcccaggagggcgggcctggaggttcctgcaagccccccgatgaactcagagagttgcaagacaccaaaggcaaggagcctggtcaagagcccaagttcgatgatgctcctgagctacttgaacaaggcaccatcaaaccaaggctacagtccgcaaaaggcttatggatctcggcccagaccgagatcaaagtccccccttcccagtatcgcgccttcggaagtgttcagggaagcgaagtctaccagcaagaggtttgcaagccctcctccacagcgaagaggatctgaaaagagtatctatggcaaatcgtttgctagacaggtgtcggatattggtcagagtcctgattggtgttcaactccagtggtatctggtaagcacaagtctcaaaagaatagtgcttggtcaaggaaatccagcggtggaaggaggattagcgcagtaaaccctgcggatgatcgtagggcgcagatggttagaatgaatcaggcggtgcagacgacgttcgattggacgctcgatccatccaagctgcttgttgggcacaggtttgctagtggagcgtgtagccggctgtacaaggggttctatgatgagaagccagttgcaattaaatttatccgccaacctgatgatgacgacaatgggaagacggctgcaaagcttgagaagcagtataacagtgagatcaattcgttgtctcacctgtaccataggaacgtgatcaagcttgtagcagcctacaaatgcccaccggttttttacatcatcaccgagttccttcccggaggctcgttaaggtcatacctaaacaacacggagaaccacccaatccctctggagaagaccatatccatcgctctcgacatcgctcgaggtctggagtacgtacactctcaagggatcgttcaccgcgacatcaagcccgagaacatcctcttcgacgaggactcgtgcgtgaaggtcgctgatttcggtatcgcctgcgaggagaccttgtgtgacgtgcttgtggaggatgaaggcacctacaggtggatggcgcctgagatgatcaagcagaaggcgtacaaccggaaggtggacgtctacagcttcgggctggtcatgtgggagatggtgtccggtagagttccttacgagaacctgacccctttccaggtggcttacgcagtggccaacaggaacttgaggccaacgatttctccagaatgcccatcggccctcgggcccctgatcgagcagtgctgcgccttgcagcctgacaagaggcccgacttctggcagatcgtcaaagtcctggagcagtcccactccatcctctcgcagggtggctgcctcgacgcgcagaagagcggcacctgccaggaccccaagaagcggctcatgcagtggatccagaagctgaaaccaacgcatggcgcctgagtaaccgagttcttacaggctatagcatcgtttcagccgcagttttttttttcttttctgtctagttgggtatgctctcagtagtttagacctgttaaggaggatccttggtttaaggaaccagcgttctaaggcggatgctcgtagctgtgtgaccaaccactggtctgcgagcatagatcttgcagtagctgtacatggttatgcttttgcatctcgtctccccatcatgttaaaacttccctgcaggttgttctcatggatggtaccatagtgtgtgcggtgtgcggtgtgccccctcactcgttgagctgaaagcgagaggaaaatcatacgacgcagagttgactcctgaggccgtctttcgggaaagggtcgtatgctaacacaattattgcgcctttcccttctattgttagcagctgccctgccgtgcttattgtcatcatgatgctgatatctgagacagcaacatctgatggctgcttgtctaaaggctccattatcctcgacgtcacacaaagtatagtgttttttttcacgcaaagtgtagtgtttggatgaaacaaactttatagatttcgaaaccatgat

SEQ ID NO: 203406 - DNA, 2750 bp, Zea Mays
gtcacggacaaacttggcagcgatagatctttcatcttcgtacgcagtggggggcgattggtcaaatcgcagacagtgtctcggacgtcgccgtgcttggattcttgggaagccctgtacctgactactggatccactaccaagctcttcaagttccaggatccattcctctttgtcgggcaagagctcttggcctctgtggattatcagcctgattcacaactctctgcaagaattcgagcgcagatgggccaagaaagcgcggctgacgcgattcctggtttgatggtttctgttggtgtttcgggctaacagactctcttttttttgtttacttcctcaaagttccacttcaacatatggatccgggcttcccgagttggaatctgatcactcgcgtcagtgcttcttagcttccttcatttgccgtcatggaggagcagaactcatggcttattaggaccaagttctcccatactgtctacactagagtggatccacgaagagtagcagctgttgctccggtgggcaaagatgtggtgctgccttttgctccgcttagtaaggatgttgagcggaagctgcagaaaattttcagtatgaagaagtctgcatcgatgcctgttgatcgggatgatgaagacacagggactgcattcaagcactgcgctagcttgccgctagtccggtcctcgcctcagcttgatagggacaaggtcaacaagcccaggagggcgggcctggaggttcctgcaagccccccgatgaactcagagagttgcaagacaccaaaggcaaggagcctggtcaagagcccaagttcgatgatgctcctgagctacttgaacaaggcaccatcaaaccaaggctacagtccgcaaaaggcttatggatctcggcccagaccgagatcaaagtccccccttcccagtatcgcgccttcggaagtgttcagggaagcgaagtctaccagcaagaggtttgcaagccctcctccacagcgaagaggatctgaaaagagtatctatggcaaatcgtttgctagacaggtgtcggatattggtcagagtcctgattggtgttcaactccagtggtatctggtaagcacaagtctcaaaagaatagtgcttggtcaaggaaatccagcggtggaaggaggattagcgcagtaaaccctgcggatgatcgtagggcgcagatggttagaatgaatcaggcggtgcagacgacgttcgattggacgctcgatccatccaagctgcttgttgggcacaggtttgctagtggagcgtgtagccggctgtacaaggggttctatgatgagaagccagttgcaattaaatttatccgccaacctgatgatgacgacaatgggaagacggctgcaaagcttgagaagcagtataacagtgagatcaattcgttgtctcacctgtaccataggaacgtgatcaagcttgtagcagcctacaaatgcccaccggttttttacatcatcaccgagttccttcccggaggctcgttaaggtcatacctaaacaacacggagaaccacccaatccctctggagaagaccatatccatcgctctcgacatcgctcgaggtctggagtacgtacactctcaagggatcgttcaccgcgacatcaagcccgagaacatcctcttcgacgaggactcgtgcgtgaaggtcgctgatttcggtatcgcctgcgaggagaccttgtgtgacgtgcttgtggaggatgaaggcacctacaggtggatggcgcctgagatgatcaagcagaaggcgtacaaccggaaggtggacgtctacagcttcgggctggtcatgtgggagatggtgtccggtagagttccttacgagaacctgacccctttccaggtggcttacgcagtggccaacaggaacttgaggccaacgatttctccagaatgcccatcggccctcgggcccctgatcgagcagtgctgcgccttgcagcctgacaagaggcccgacttctggcagatcgtcaaagtcctggagcagtcccactccatcctctcgcagggtggctgcctcgacgcgcagaagagcggcacctgccaggaccccaagaagcggctcatgcagtggatccagaagctgaaaccaacgcatggcgcctgagtaaccgagttcttacaggctatagcatcgtttcagccgcagttttttttttcttttctgtctagttgggtatgctctcagtagtttagacctgttaaggaggatccttggtttaaggaaccagcgttctaaggcggatgctcgtagctgtgtgaccaaccactggtctgcgagcatagatcttgcagtagctgtacatggttatgcttttgcatctcgtctccccatcatgttaaaacttccctgcaggttgttctcatggatggtaccatagtgtgtgcggtgtgcggtgtgccccctcactcgttgagctgaaagcgagaggaaaatcatacgacgcagagttgactcctgaggccgtctttcgggaaagggtcgtatgctaacacaattattgcgcctttcccttctattgttagcagctgccctgccgtgcttattgtcatcatgatgctgatatctgagacagcaacatctgatggctgcttgtctaaaggctccattatcctcgacgtcacacaaagtatagtgttttttttcacgcaaagtgtagtgtttggatgaaacaaactttatagatttcgaaaccatgat

SEQ ID NO: 203407 - DNA, 2853 bp, Zea Mays
tctctctctctctctctctctctctctctctctctggcgccagcgcgcaggatttttcttcttcttcttcttcttttggcatgggggtgggggttcatcggtcttcccgaaccgctccaggtgtttcagtactctgcgacgtaccagcttagttcttcagggctggggttttggtcgatccgcttctctcctcaaaaggaaggattcttgggaagccctgtacctgactactggatccactaccaagctcttcaagttccaggatccattcctctttgtcgggcaagagctcttggcctctgtggattatcagcctgattcacaactctctgcaagaattcgagcgcagatgggccaagaaagcgcggctgacgcgattcctggtttgatggtttctgttggtgtttcgggctaacagactctcttttttttgtttacttcctcaaagttccacttcaacatatggatccgggcttcccgagttggaatctgatcactcgcgtcagtgcttcttagcttccttcatttgccgtcatggaggagcagaactcatggcttattaggaccaagttctcccatactgtctacactagagtggatccacgaagagtagcagctgttgctccggtgggcaaagatgtggtgctgccttttgctccgcttagtaaggatgttgagcggaagctgcagaaaattttcagtatgaagaagtctgcatcgatgcctgttgatcgggatgatgaagacacagggactgcattcaagcactgcgctagcttgccgctagtccggtcctcgcctcagcttgatagggacaaggtcaacaagcccaggagggcgggcctggaggttcctgcaagccccccgatgaactcagagagttgcaagacaccaaaggcaaggagcctggtcaagagcccaagttcgatgatgctcctgagctacttgaacaaggcaccatcaaaccaaggctacagtccgcaaaaggcttatggatctcggcccagaccgagatcaaagtccccccttcccagtatcgcgccttcggaagtgttcagggaagcgaagtctaccagcaagaggtttgcaagccctcctccacagcgaagaggatctgaaaagagtatctatggcaaatcgtttgctagacaggtgtcggatattggtcagagtcctgattggtgttcaactccagtggtatctggtaagcacaagtctcaaaagaatagtgcttggtcaaggaaatccagcggtggaaggaggattagcgcagtaaaccctgcggatgatcgtagggcgcagatggttagaatgaatcaggcggtgcagacgacgttcgattggacgctcgatccatccaagctgcttgttgggcacaggtttgctagtggagcgtgtagccggctgtacaaggggttctatgatgagaagccagttgcaattaaatttatccgccaacctgatgatgacgacaatgggaagacggctgcaaagcttgagaagcagtataacagtgagatcaattcgttgtctcacctgtaccataggaacgtgatcaagcttgtagcagcctacaaatgcccaccggttttttacatcatcaccgagttccttcccggaggctcgttaaggtcatacctaaacaacacggagaaccacccaatccctctggagaagaccatatccatcgctctcgacatcgctcgaggtctggagtacgtacactctcaagggatcgttcaccgcgacatcaagcccgagaacatcctcttcgacgaggactcgtgcgtgaaggtcgctgatttcggtatcgcctgcgaggagaccttgtgtgacgtgcttgtggaggatgaaggcacctacaggtggatggcgcctgagatgatcaagcagaaggcgtacaaccggaaggtggacgtctacagcttcgggctggtcatgtgggagatggtgtccggtagagttccttacgagaacctgacccctttccaggtggcttacgcagtggccaacaggaacttgaggccaacgatttctccagaatgcccatcggccctcgggcccctgatcgagcagtgctgcgccttgcagcctgacaagaggcccgacttctggcagatcgtcaaagtcctggagcagtcccactccatcctctcgcagggtggctgcctcgacgcgcagaagagcggcacctgccaggaccccaagaagcggctcatgcagtggatccagaagctgaaaccaacgcatggcgcctgagtaaccgagttcttacaggctatagcatcgtttcagccgcagttttttttttcttttctgtctagttgggtatgctctcagtagtttagacctgttaaggaggatccttggtttaaggaaccagcgttctaaggcggatgctcgtagctgtgtgaccaaccactggtctgcgagcatagatcttgcagtagctgtacatggttatgcttttgcatctcgtctccccatcatgttaaaacttccctgcaggttgttctcatggatggtaccatagtgtgtgcggtgtgcggtgtgccccctcactcgttgagctgaaagcgagaggaaaatcatacgacgcagagttgactcctgaggccgtctttcgggaaagggtcgtatgctaacacaattattgcgcctttcccttctattgttagcagctgccctgccgtgcttattgtcatcatgatgctgatatctgagacagcaacatctgatggctgcttgtctaaaggctccattatcctcgacgtcacacaaagtatagtgttttttttcacgcaaagtgtagtgtttggatgaaacaaactttatagatttcgaaaccatgat

SEQ ID NO: 203408 - DNA, 3310 bp, Zea Mays
atgcattattagtacaaagcgtgagaagggacaacaacataaatcctagccatggtggatccctacctaagctaagcagcggcaataataagcgtaaagaatgtggaaaaggagaggtcaggagaaccaaaagaaacttttttccacctctcctgtgatcgtgatgaaaagcttggcattctgcagtccctccccccccccccccccacacacacacacacactctccactccacaacagaaacacagcagccagccagcttcccattccactcggccattgactctggaatctcaccgcacgtcgcacccttcaaattctctgtatttacacaccaatgccctcgcctgcctgcgcttccgtatttgcgcaggcgggcccagcaagagaagaaaggaaacccgcggcgctctcgaattctgatttctgcagcctgcgccgccctttgctttgctgccatcggtggaagagatagagagagagagaacaaaggggagcggcaggcggcaggcagcccgtacggcggtgcggggggagcggcgtactaccgtatcccaccaccacccccaccggcacggggccgcgtttaccgggtgcgcggcactaccacgcacgggcccttttttctggtgcgcgccctcaatgcgctattgatacaccccctgggctctggctggctagctggctggccaggctcctcctcctcggcctcgatccgcttctcctcctctgcccgcctacctggagcggggagcgggaagagcggcggcgggagcccggcattctgatccgcttctccgcgcgcaacaccggcctgccgcaaatgattcttgggaagccctgtacctgactactggatccactaccaagctcttcaagttccaggatccattcctctttgtcggttccacttcaacatatggatccgggcttcccgagttggaatctgatcactcgcgtcagtgcttcttagcttccttcatttgccgtcatggaggagcagaactcatggcttattaggaccaagttctcccatactgtctacactagagtggatccacgaagagtagcagctgttgctccggtgggcaaagatgtggtgctgccttttgctccgcttagtaaggatgttgagcggaagctgcagaaaattttcagtatgaagaagtctgcatcgatgcctgttgatcgggatgatgaagacacagggactgcattcaagcactgcgctagcttgccgctagtccggtcctcgcctcagcttgatagggacaaggtcaacaagcccaggagggcgggcctggaggttcctgcaagccccccgatgaactcagagagttgcaagacaccaaaggcaaggagcctggtcaagagcccaagttcgatgatgctcctgagctacttgaacaaggcaccatcaaaccaaggctacagtccgcaaaaggcttatggatctcggcccagaccgagatcaaagtccccccttcccagtatcgcgccttcggaagtgttcagggaagcgaagtctaccagcaagaggtttgcaagccctcctccacagcgaagaggatctgaaaagagtatctatggcaaatcgtttgctagacaggtgtcggatattggtcagagtcctgattggtgttcaactccagtggtatctggtaagcacaagtctcaaaagaatagtgcttggtcaaggaaatccagcggtggaaggaggattagcgcagtaaaccctgcggatgatcgtagggcgcagatggttagaatgaatcaggcggtgcagacgacgttcgattggacgctcgatccatccaagctgcttgttgggcacaggtttgctagtggagcgtgtagccggctgtacaaggggttctatgatgagaagccagttgcaattaaatttatccgccaacctgatgatgacgacaatgggaagacggctgcaaagcttgagaagcagtataacagtgagatcaattcgttgtctcacctgtaccataggaacgtgatcaagcttgtagcagcctacaaatgcccaccggttttttacatcatcaccgagttccttcccggaggctcgttaaggtcatacctaaacaacacggagaaccacccaatccctctggagaagaccatatccatcgctctcgacatcgctcgaggtctggagtacgtacactctcaagggatcgttcaccgcgacatcaagcccgagaacatcctcttcgacgaggactcgtgcgtgaaggtcgctgatttcggtatcgcctgcgaggagaccttgtgtgacgtgcttgtggaggatgaaggcacctacaggtggatggcgcctgagatgatcaagcagaaggcgtacaaccggaaggtggacgtctacagcttcgggctggtcatgtgggagatggtgtccggtagagttccttacgagaacctgacccctttccaggtggcttacgcagtggccaacaggaacttgaggccaacgatttctccagaatgcccatcggccctcgggcccctgatcgagcagtgctgcgccttgcagcctgacaagaggcccgacttctggcagatcgtcaaagtcctggagcagtcccactccatcctctcgcagggtggctgcctcgacgcgcagaagagcggcacctgccaggaccccaagaagcggctcatgcagtggatccagaagctgaaaccaacgcatggcgcctgagtaaccgagttcttacaggctatagcatcgtttcagccgcagttttttttttcttttctgtctagttgggtatgctctcagtagtttagacctgttaaggaggatccttggtttaaggaaccagcgttctaaggcggatgctcgtagctgtgtgaccaaccactggtctgcgagcatagatcttgcagtagctgtacatggttatgcttttgcatctcgtctccccatcatgttaaaacttccctgcaggttgttctcatggatggtaccatagtgtgtgcggtgtgcggtgtgccccctcactcgttgagctgaaagcgagaggaaaatcatacgacgcagagttgactcctgaggccgtctttcgggaaagggtcgtatgctaacacaattattgcgcctttcccttctattgttagcagctgccctgccgtgcttattgtcatcatgatgctgatatctgagacagcaacatctgatggctgcttgtctaaaggctccattatcctcgacgtcacacaaagtatagtgttttttttcacgcaaagtgtagtgtttggatgaaacaaactttatagatttcgaaaccatgat

SEQ ID NO: 203409 - DNA, 2965 bp, Zea Mays
ccgccactaccctgctccctcccccaagccgccgccactccttctccctccccctttctctctcttctctctctaccgcccacctctctccacctcctctccccaagccgcgccaccaggagtgcagcagccgctagaagctgccatccgcccgccaggagttcagtcaatctcctgtctcctgagagccgccgcccgccgagtcccgctcgccgctcggtcgctcccgtgaggcgctcgatctcctcagcgccgcgcccacccagccacggtggagccacccttcgtcccgtcgtccggcggccggccctcaatccctcacgccctagcttctctgccatttccggtcagcccctcacgccctagctttcctatcaggcgctcggtcgctccctttgccacgcgctcctagcttctctggtcggctcttcctccgccatttccggttggatcctcctatgagctttaatatatagaaatatcaacgagtcgccgataaaaaaccaagcatgaatgtgcagtgcagtgctcgacaaacggcaccagcgccgctgggtactgtcaccgcttcggtcgccggagcccggagatgtaaatgcgctggagttttcatgctgtcgctggaggaattgaggaagaaagtttggtaaccgtatactgctctaagaagttttgccagttttgatcatagccaagcttttgattcatcataatctgatcctgtaaccaatttctctccctatgtctagagcagcctcgtggccaatgcaattgatgccctggaactgccgaagggatctgcaattgctattgacatgcctatggatgttacctaatttcaggatgctaaggtaataatgcttggactggtacccagcatcgttcgtacttggaagaatacggactgtacagctggactagactggtcctccatccggtaattttttaattgctcaactatccagaccttttgtcttaactttgcaagttacacatatagtatggtatgcagtttctattgaccatattcattatatacagatgctttagctcctctagggaggcatccagtgtggattttgtgttaaaggataggttggaaaccacacgacagcaatatctgaatttcttatttgatgatgctcagatacataattttttgactgagccttgatattctcagaaggtgatgtcagtcttttcctaagagaagtaagtagtgttactccatccttactgctcggatgtcggatcattgactaccactgaggtcagcactggcattttttttaacgtagagctctgcagttcttacgctgacaccttataagtgaaagtgcaatatagaggccttgtgactatcttttcgtcagcaagagaacaacatcgatcttggtagttcttagttgcccctgtgtttcggaagtgttgtgtcagattattatatacccatttctagaaataaccaattgctcatattgcttacttagacaaataagcaatcttgaatctggaattttacagtgtacctgaactatcaactcccttcaacaaacttttttgtatggaacaggagcagcagcaccccccccccccccccgcctagtgaaaatattatgaacagaaaaagaacatcaaacagcaaagaaagaaaccaaaaagttcaacaaacattgcttatcatcaccagcaattattatccttattcctcctaatcagaaatcagctttaacgacctgtttggttgattgtctggtacttctctcaaaatatttatttgatttagctttaggagctatcttgtttccctatgcagggtcttcatttaaacttcctcaggattttatcagtatatattttacttttgcagtttaaacaatggaatgtagcatttatcggttccagctttcaatcttgcaaaatagaagcactgacagcgtgcttgttgcatgcattacctgtaataatgctccatttgtgttctttatttgtttagccactctaatcgacactgcccgtttatttacataggaacgtcaatcatatggatgcttcttcagtggaattatcatgtgaatccccatagtgcccaagctgtgaagcagtcatgattgatgcttgggctgttagctttatgtggtccagggggaggaaggataccttagaaactgtcagaaaagctcatttcatacttcatttttcatcatgttattttgttgcatgagacatttgtccaactgcgtagggaatgaaaattcaaattatttctgccactgattgggggatgtaattccaaacgttgtaaaaggcgactgtatctagtgattatttatggctgatgggaagagctggttgtggtatagtgtcagcagcgtatgatcggttggttcatcaaatctgtccttcgttgattagtttttttgttttgttttgcagatgcagttgaagacccaagatttgaacgacactattgtcacaccgaaagtgtgttcgatgaaatgcctccaacatccggaggtttctatttgtgaaagtttgcaggctaagacaaatgatagctattcaaggagctagaggctgctcaacataaagcatcaacagcaacctctggaacagctgaaaatgctctactggaagctaagtcagtgactgatcttaaatctaaagatttggagaagaagaaaagtgagctttgttcactgatacaagaagttggagtgcttttgtgaaggcttttgcgaatcacttgaagtgttagtacttttgtgaatgattttgtaaagtgtttgcaaatatgtgcaaaacataataacatgtgtaggttttgtgaatgattttgttgtggtgcttgttgatggtttatgtgatgtggatctatcattgtgcaatactaattaaatttgtatatctatgtgattatctgtataaaaattggtgatttgtgatgcttttgtatatataacag

SEQ ID NO: 203410 - DNA, 560 bp, Zea Mays
ctcggatgtcggatcattgactaccactgagatgcagttgaagacccaagatttgaacgacactattgtcacaccgaaagtgtgttcgatgaaatgcctccaacatccggaggtttctatttgtgaaagtttgcaggctaagacaaatgatagctattcaaggagctagaggctgctcaacataaagcatcaacagcaacctctggaacagctgaaaatgctctactggaagctaagtcagtgactgatcttaaatctaaagatttggagaagaagaaaagtgagctttgttcactgatacaagaagttggagtgcttttgtgaaggcttttgcgaatcacttgaagtgttagtacttttgtgaatgattttgtaaagtgtttgcaaatatgtgcaaaacataataacatgtgtaggttttgtgaatgattttgttgtggtgcttgttgatggtttatgtgatgtggatctatcattgtgcaatactaattaaatttgtatatctatgtgattatctgtataaaaattggtgatttgtgatgcttttgtatatataacag

SEQ ID NO: 203411 - DNA, 1621 bp, Zea Mays
  misc_feature (1)..(1): n is a, c, g, or t
ntgggcagagctcttccaacgactttagcaagatcaaaatctgtcccagtgtcatcgtccatgttgatgacatagcaccaaatgccccgtcatccaattgtgaaggctgtaaaacaccaaactcggccacaagatctgataaagcaaagtcatcattcaaagggagagtttcgagttttttcttccctaaaaataaaaggcagtcaaaagagaaaatcatcccatctgctagctttgatgggaaagtcgaagtcacttgttttggcagcatgaaaccacagggtggtcataatattggttctatgccattttgtgaggacacagatgatagttctgctactcaaacaatatgttcttcaaaagatgttgtttctattgaagtacctatttcttctgcctgtccaagtgaacatattgatggatcgagatcaggtggtctgaattgtagctgtgataagcctagccctacttcaattcttgatgtatcatttgaagatagcaaccttaatggatctgaatcgtcaagaagcattccttgtagcaacgagagaattgccttacgatccgatgccaattgaatctgtcacgcgctcattatccatgggagggaggatatgagctcaccttcgcctttacttgattcgacaaacttaaccccaatctcaagcgtggacgacgatgaacttgaatgtgttgcctttgtacaaaagattgtatcatctgctgggctaggcgacctgcggttggatatggtcttcacaggctggtacttgcctgactgccctgtagaccctgcattgtgcgacaagctattggaccggaaggaggaggctgctaagtcgagggagcggaggtcgaaccaaaagcttcttttcgattacgtgaacatggcagtggtcgagattggccatgacaccttactatgcgcctacccctggaggcaggcgtgctccatggcctgggaggagaccctctctcaagctttggcggaggaagtgccacaccatatgagggattggctccatggatcaggaaagtttgcaggaaacgagaacgacaacgccggaacgttgttggagagagtcatgcggcaggaggtggaagggagaggctgggtgaaatccatgagatgggagttggatgagatcacagagcagattgcaggaaatgtgctggatgaaatagtggtagaagcattggatggtctcgggatttgttctccgtggccagaaatggccatggcaataccgaatctgtagtagtagcgattgctctgtgtatgagaaatgagaactgctcttaaaattattttgtgctggaaaaaaaaactctcgagcatctgcatctcttgtatttagcacttctgaatatgcgctagctcactagagtggagactgtagaatttgctgttatatagagaacagccaaaagtaaaatagaaaaccgtacagccaatactggtgcatgtcaaacattttttttgcagcatagatgcttggatggtggtgtcagtaatttcctattcctaggctcatcaccacgtggtacgtactgctactggagaacactgttgactgttcgaatcctttctcttttgtgtgtggttttgtttttttagaag

SEQ ID NO: 203412 - DNA, 700 bp, Zea Mays
gggaaaaccataaaactgtctggcggagcgtggtgttcgagtcgtaccacatccagggcggcacggaccggacgggcgtccctacgaagatgatgtcggtcaacgcgacggtgcggctgcgcttccgcaaccgcggcaccttcttcagcctgcacgtcacggccacgccgttcctcctcttctacggcgacctcaccgtcgccaccggagagatggcggagttctaccagccgcggaagagcgggcggacggtgacggtgtccgtggtggggaagcaggtgccgctctacggcgcgggcgccagcctgcacagcaagcccaacaacgggcgcctcggccccgcggtggtgcccgtcaggctccgcttcgtgctgcgcgcgcgcgcccacatcctcggcctcctcgtcaagtccaagttctaccgccgcgtgcgctgcggcctcgacatccgcgaggcgcacctcggcaggccggcccgcggcgtcgcctccggctgcgactaccacgacgggatgcgatgatcgttcctgccgccgttgtgtcgcctcgggcggggtttgctgcgttgtggttgcggacgaactgtgtaatcgattcctacgaaccgttctaatgtaaccggcggcgtcgacaagatcacagatcgtgggcgcagcttggctaatgccacgagtatcgcattaaatcctctgcccaaacc

SEQ ID NO: 203413 - DNA, 2595 bp, Zea Mays
cactgctgtattactagcatttgcttgctttgcttggaatggtagtggtttgcattgctccacgagtgaggattttcagttccttctgagtattttgctatacatgctgcttttttggtcccatatcggcgaatttcttcctcttgtcattcgcagatgacagtctgataccccactgccttcactgagtgctagagcccctccttgtcaattcactgtctggtgctgaatcgagttcattgaagatgccaaggtccgaatcagacagtgatgatgttttcttcgatgcatttgaagatgttctatctgcaggggaaccttcgttttcagaggattgcagcacaagtgatgaagtttcagggccaatgaaattagagtatgagatttgggcaaacgaaccaattagtgttcaagaaaggcgccaaaggttcctgaagggaatgagactcgatgatttcgtgtctacgaggataggttcttttcaatgccatggtgaaatcacagccgtcgagtcttccactgacatggaggagagaactgtcagtggcctttcttccggggattcatctgtttgtgacaatgagtcagattttgacggtgcctgttgcataagggatacggatactggaaagagatatattgtccacaatggtgcacacagcagtataactggcatgcccaaggaggttggatcagataaggtgatgactcttctggagtttgagagtttgcttggcctctctaggtctgttcaaaagttattgcggaggggatgtggtaacagtcctgcaaaagaaacaaaaagtgctaaggaaaaggacggcaaaagctcgtcaaggaaattcgttacaaagagaagctttggtggcatttgcaagtacgatgtccatgtgaaaaattgcacaaacagtataccaaccagaacaagagttcagcaccggaagaaaaaatttcttgaattctctgctgtgtacatggatcaagaaatcagagctcacaagggttcaattagggtcatgaaattcagcccatctggctggtatttagcaagtggcggtgaggattgtgctgtacggatatggcaaatcatagaagtagaagcatctcctaagttatacaggggagaggatccgcatgaaaaggtggaaaaagttcaggtctttaagacaaatataggaaagaagcacaaccctgcacttgcagttatacccaagaaggtttttcgtatatcagagactccattacatgaatttcgtggccatgcaagtgatatccttgatatggcatggtccaaatcagattgtctgttaacttcatctaaagataagacagtgcgcttatggaaaccgggctgcgacggttgtctcgcagttttcaaacacaaagactatgtaacatgtgttcagttcaaccctatcgacgagaaatacttcatgagcggttcattagatggtaaagtgcgcatttgggatgtgttggacaaacgagtaactggctggacttatacgcgaactatcataactgctttgagttaccagtcagatggaaagggttttgttgttggcactattgcaggcgcatgtcgtttctatgatcaatctggtgaaaacatccagctagagaaagaattgtttgtgcaagggaagaagaagtcagccgccagtcggatcaacaatctaaagttatgtacaagtgattccaatagggttgtagttacatcaggagattccaaaatccgagtcgtcaatggtgataccatccaaaagtttgaagggccttggaagtcgaaggctctgtcatcgccgtcattaacatcagacggcagataccttatatctgtgggcaaagattccaacgtctacatttggaacttggcgaactctagagatgcaagatcggttcattcgtgcgagctgttcttctccaaagctgtaactaccgcagtaccatggccgggagtgtaccaagatgggcacacgaagccttcctatctgactgagaaatactgcagcatgcccattttgcgccaccacggggagtgccagtccgctgagccgtggtcgttcgtggacggcagcaagggattggcgacatggcctgaagagaagttgccttctacagcaaagcctggaagcagcccgcagctgggcgactgtctctccatgatatccgccgcgtggagcacggtcatcgtgaccgccagccgcgatggcgtgatccgatcttttcacaactacggcttgcccgttagattgtgagcttcgagaccggtttgaggtagtcagtggagcgccgccatggttggtgactgataatccgctaaggttttgtaagtttttttttctttttcttttctggtcagagttactagaaattatttatgtaacatttttagatcattaatttcttgtgaagagatgatctgtagtcagtccaaggccaaacacttgtgctgttttttgctggatggttgtgacaaaagtaaaaaaaaactcaaccatccagttatagttagcgggaaaatatcctatgcaatcacttatcctggtgcaagcatgcaatcaagcgatctggtgcatccgatctagatctaat

SEQ ID NO: 203414 - DNA, 2866 bp, Zea Mays
ggcgtggaaggtgaggaacgcgcttccgtgcgtgcaggagggtccccctatttgttgggggacgggaaggttggcagttctctgtaccgcgcgctcgcgcccgaaatttcacaacaccaaacccgcaggggggagaagcgcaaagccacgaggagtgcgaggcgagggccgacaccggggacaagcacggcgcggcggcggaggcagcaatggcggcgctgcagagttggcgcaaggcgtacggcgcgcttaaggacaccaccaccgtcagcctcgccaatctcaactccgacttcaaggatctggatgtcgcgatcgtgagggccaccaaccacgtggagagcccgcccaaggagcgccacctgcgcaagattgtggcggcgacgtccatcgcgaggccacaggcggacgtcacttactgcatccatgcgcttgcccgacgactcgccaaaaccaggaactggatcgttgccctaaagacacttgtagtgatccataggcttcttcgtgaaggtgaccctgcattccgcgaagagtttctaacatttacacagagagtgcggattttgcagctgtcaaacttcaaggatgattccagcccagttgcttgggattatgcttcatgggttcgcacatacggtttatttttggaagaaaaactagaatgcttcagggttttgaagtatgacattgaagctgcacgtttatcaaagcaaggtcaaggacctgaaaagggccacagtagaactacggaattgaattctcaggacttgctggagcaattgccagcactgcagcaattgttatatcgacttattggctgtcgagcagaaggagctgcaaaaaacaattatctggtgcaatatgctctagcccaggttcttaaagaaagcttcaaaatttattgtgcaataaatgatggaattatcaaccttattgacaagttctttgagatgccaaagcatgaagcactaaaagcccttgacgtttacaagagggctgtccaccaggctgggaacctatctgacttctatgaaagttgtcagggtttagagcttgcaagaaatttccagtttcccactttgagggagccaccacaaacattcctttcaaccatggaggagtatgtgaaggaggctccgcgtatgatgccagttgtagagccactggttatttcctgggctctagtaaaccatttggatttttgcatgacaccttcacattttataacaagtagcagcctcaatgtgtgatacttcatgtgccttgcatgttaaagtagagcatatcataaccatggcgaaactagagcaaattagagggtgatggtagtggggtgtccttaccttgcacatacatgttccacaggggttgtatgtatggtgaaaaattagacaacatcattgctttaacatttatagggggtacatttgagttgagccccctaatctcaatgtagcttgcactgatcacaacttcattcttctttatatctaacgacagcaagctacctgatgtagggaaacagttagcatcaataattgtggcctagtgaacaatttctcttttactttgacatttttgtgataattgtgtcatcagtgtgaatgtcacacactctttttgggagataaatgattaccgtcaagtcaagtttataccagccgatttacttattgtggaatggattcttaaatacggactatccttcttatttcaccaggagcttcctgagcggcttcttctgacatacaaaccagaagaagaagttcatgataccgttccaattgtagcggagaaactgcaagttgttgaagaaattgctccagttccttcttcccaaatagctttgcctcccaagcctgagattgcagatactggtgatttactggggttaggtgattcaacccctactgtgttggcgatagaggagagcagtgctttggccttggccattcttccgacaggtattgataactcaacaacaactacacagcaagatagtggatttgatccaacaggatgggaacttgctcttgttactacaagcagcaatgcgactccactgtctatggagagtaatttgggtggtggatttgacaagctcacattggacagcctatacgatgatggaacctacaggcagatgcagcaacaacagctatacggatcagcccctcccaatccattcatggcaagcgatcccttcgccgtatcaaatcaagtagctcccccaccatcagttcaaatggcggccatggctccacagccccagcatttgcccatgatgattgaaccaaatcccttcggaccaccacagcagcatcacgcgggcgtcgctcctgcagcaaaccccttcctcgacgccgggttcggtgcgttcccggcagtaaatggaatgcatccacagaccaaccccttcggaggcgccgcacaacttctctagtcatatatactttgcaaagtttgcattacaattacatagaagatgtgcaatctgtagatacccacgcaacgatgcaagacaagcaattgacgtctgtggaatcgcttttctccgtcagaccgttaccaatcagggaatcgccatgttgcaccagcctcttctcgcccttccttaggctttggccgcttggcctttcttgtgtagctttctgttttgctgtgtctggttttccatcttccgtggcgagccattgcacccattgtaaagaaatttgtttcatcaggctttgggctgataaaatcatgagtacgtgccaataaggcaataacccatcagcgtttgcatttgtgtaactcctgatgaccgtgcgaatattttcgcaattggtcccaaaccacttttggcactattaaaaaacag

SEQ ID NO: 203415 - DNA, 3063 bp, Zea Mays
ctgccctctccgattcacttctagctgcgctcctccatggtgttggtgacttcgtcgccgtgggttccacggctaccgccggagacatgtgccgcgctgcctgttcgtgaatatggcctgagcggctgagccaccgaaacattcggtgggcgggcgattcctgccttccgccaaccacgcccggcgccaccgtctgtttgcttctcacatccaagtacggtggcgcccagctggcggctccgggacgcgccagctaccctcagctaccgaaagggaaatctggcgaagaatcaactgaaaagaattcgcacaacgaagttccagagaccgacgttcgagagacaggcgagacgtgcttgtcaaataccagcgcctctcgcttcccggcttcccgccgagcctttctcttcttccttcctgaagaaatccttctccaacaagctagatgcaggaccaacggaccattcaggacatcatgacgagctgtctcaagagccctgacaattgcaaccagaccacaccatgcctgcctaattccgtacgtagtaagttcaacataggggatatactgatactacgaacagaccaatcagtgttcagaatgatactacgaacagaccaatcagtgttcagaatcgtcatgcttacttactgcatgctcagccggggtggtagccatgcaaagaagttcaaacatgctgccaaataatggatggatattgacaacgattccgtcacctgaacctccattggcgtggaaggtgaggaacgcgcttccgtgcgtgcaggagggtccccctatttgttgggggacgggaaggttggcagttctctgtaccgcgcgctcgcgcccgaaatttcacaacaccaaacccgcaggggggagaagcgcaaagccacgaggagtgcgaggcgagggccgacaccggggacaagcacggcgcggcggcggaggcagcaatggcggcgctgcagagttggcgcaaggcgtacggcgcgcttaaggacaccaccaccgtcagcctcgccaatctcaactccgacttcaaggatctggatgtcgcgatcgtgagggccaccaaccacgtggagagcccgcccaaggagcgccacctgcgcaagattgtggcggcgacgtccatcgcgaggccacaggcggacgtcacttactgcatccatgcgcttgcccgacgactcgccaaaaccaggaactggatcgttgccctaaagacacttgtagtgatccataggcttcttcgtgaaggtgaccctgcattccgcgaagagtttctaacatttacacagagagtgcggattttgcagctgtcaaacttcaaggatgattccagcccagttgcttgggattatgcttcatgggttcgcacatacggtttatttttggaagaaaaactagaatgcttcagggttttgaagtatgacattgaagctgcacgtttatcaaagcaaggtcaaggacctgaaaagggccacagtagaactacggaattgaattctcaggacttgctggagcaattgccagcactgcagcaattgttatatcgacttattggctgtcgagcagaaggagctgcaaaaaacaattatctggtgcaatatgctctagcccaggttcttaaagaaagcttcaaaatttattgtgcaataaatgatggaattatcaaccttattgacaagttctttgagatgccaaagcatgaagcactaaaagcccttgacgtttacaagagggctgtccaccaggctgggaacctatctgacttctatgaaagttgtcagggtttagagcttgcaagaaatttccagtttcccactttgagggagccaccacaaacattcctttcaaccatggaggagtatgtgaaggaggctccgcgtatgatgccagttgtagagccactggagcttcctgagcggcttcttctgacatacaaaccagaagaagaagttcatgataccgttccaattgtagcggagaaactgcaagttgttgaagaaattgctccagttccttcttcccaaatagctttgcctcccaagcctgagattgcagatactggtgatttactggggttaggtgattcaacccctactgtgttggcgatagaggagagcagtgctttggccttggccattcttccgacaggtattgataactcaacaacaactacacagcaagatagtggatttgatccaacaggatgggaacttgctcttgttactacaagcagcaatgcgactccactgtctatggagagtaatttgggtggtggatttgacaagctcacattggacagcctatacgatgatggaacctacaggcagatgcagcaacaacagctatacggatcagcccctcccaatccattcatggcaagcgatcccttcgccgtatcaaatcaagtagctcccccaccatcagttcaaatggcggccatggctccacagccccagcatttgcccatgatgattgaaccaaatcccttcggaccaccacagcagcatcacgcgggcgtcgctcctgcagcaaaccccttcctcgacgccgggttcggtgcgttcccggcagtaaatggaatgcatccacagaccaaccccttcggaggcgccgcacaacttctctagtcatatatactttgcaaagtttgcattacaattacatagaagatgtgcaatctgtagatacccacgcaacgatgcaagacaagcaattgacgtctgtggaatcgcttttctccgtcagaccgttaccaatcagggaatcgccatgttgcaccagcctcttctcgcccttccttaggctttggccgcttggcctttcttgtgtagctttctgttttgctgtgtctggttttccatcttccgtggcgagccattgcacccattgtaaagaaatttgtttcatcaggctttgggctgataaaatcatgagtacgtgccaataaggcaataacccatcagcgtttgcatttgtgtaactcctgatgaccgtgcgaatattttcgcaattggtcccaaaccacttttggcactattaaaaaacag

SEQ ID NO: 203416 - DNA, 1253 bp, Zea Mays
caaagagtcatcatcttctctatcctacatcaacaagtgtctcatcaaaaacccttgaacttgtgttttcaaatgtatggggtactgctttgaagtatgtaggtcgaaaaaagtatcatgtcagttttattgacgatttcagcaagttcacctcgttgaatttcagaacatggttgagcaccactttaacacgaagatcattgctatccaaactaattggggggatgaatatcagcgtccgaactcgcttagtgtcttgtcctcatgctcaccacaaagtggtcctgttgaaagaaagagtcgccacataatagaggtatgttccagaaataattgaaggggacatggattctataagacctgaagtaaaactgttctactctagtcagggatccaaaatttctgataagtcacataaccaggagacaacagatctacacaaatgtatttctcgaatccatcattgtacgcctgatgatgaaaaaccaaatctctgtgtacttgttactggagcactaggtggaaggtttgatcacgaggcggcaaatatcaatgttctgtatctgttttcggacatgaggattgtcctcctatcagacgattgcttgatccgacttcttccaagaacacatcgccatgagctttatattgagtcgtctgttgaaggaccccattgtgggcttttccctgttggagcaccatcaacaagcacaacaactactggcctgaaatggaatctaagtgaatcaaagatgagatttgggagcatgataagcacatccaacattgtgcagtcggagaaagtaactgtagaatctgatgcagatctcttgtggacaatttctctgcgaaatctgacataagcagttcctagtttgttatcttttttcttctctttcctgtcaagtggcaaccaagctcttgtacagccacttttgtgtttatgagttgtgtgtctggtaaataaataccatctgatgacaaatcgatgaggtctcatcattagacaggatgtctaccacgatcttgaactgctgatgaattatgtgaataacacgagcaggcatgatggttgtatcctctctagttgtataactgtattgttgtacttgcaacggggtttcttgtataaaattgttctcaacagttcacactgtatggttggattttgtaatgagtctggcaattgggtacagtgatatatgctaatccatctgttctaatgtaagacattttagattttctatttacat

SEQ ID NO: 203417 - DNA, 1430 bp, Zea Mays
gtggtcccgtttgacggcgctcgtgagaacagtccatgtccgtcgcagcacatcgagcggctacaaccaacttcagaattctgaaagggacacaccgtcataccgacagcgaagacctttgccgtttttattcttcctccgtctctgcctgtacagcggcggcttggccacctctgagcctcaagccctcaacctccctcttcggcgcgtaacgtcagtcctcaggtcaagatgttgtggcgcgcagtacgcagtatggatgtaataatgcattcttcgagtttccttcttccgaaactgtatcaacctgtcaacaaaccagtcaagaactatgctttagttgttctaaaccagcatcttccacgattcatgcctcgactctgggatcatgaacagcaaacttgaggatctgcgctgatggaggagctaatcatatttttgatgagatgtatcagataaccaatgatgaagacaaaaaaagcaccagaaataagtatgttccagaaataattgaaggggacatggattctataagacctgaagtaaaactgttctactctagtcagggatccaaaatttctgataagtcacataaccaggagacaacagatctacacaaatgtatttctcgaatccatcattgtacgcctgatgatgaaaaaccaaatctctgtgtacttgttactggagcactaggtggaaggtttgatcacgaggcggcaaatatcaatgttctgtatctgttttcggacatgaggattgtcctcctatcagacgattgcttgatccgacttcttccaagaacacatcgccatgagctttatattgagtcgtctgttgaaggaccccattgtgggcttttccctgttggagcaccatcaacaagcacaacaactactggcctgaaatggaatctaagtgaatcaaagatgagatttgggagcatgataagcacatccaacattgtgcagtcggagaaagtaactgtagaatctgatgcagatctcttgtggacaatttctctgcgaaatctgacataagcagttcctagtttgttatcttttttcttctctttcctgtcaagtggcaaccaagctcttgtacagccacttttgtgtttatgagttgtgtgtctggtaaataaataccatctgatgacaaatcgatgaggtctcatcattagacaggatgtctaccacgatcttgaactgctgatgaattatgtgaataacacgagcaggcatgatggttgtatcctctctagttgtataactgtattgttgtacttgcaacggggtttcttgtataaaattgttctcaacagttcacactgtatggttggattttgtaatgagtctggcaattgggtacagtgatatatgctaatccatctgttctaatgtaagacattttagattttctatttacat

SEQ ID NO: 203418 - DNA, 1425 bp, Zea Mays
gtggtcccgtttgacggcgctcgtgagaacagtccatgtccgtcgcagcacatcgagcggctacaaccaacttcagaattctgaaagggacacaccgtcataccgacagcgaagacctttgccgtttttattcttcctccgtctctgcctgtacagcggcggcttggccacctctgagcctcaagccctcaacctccctcttcggcgcgtaacgtcagtcctcaggtcaagatgttgtggcgcgcagtacgcagtatggatgtaataatgcattcttcgagtttccttcttccgaaactgtatcaacctgtcaacaaaccagtcaagaactatgctttagttgttctaaaccagcatcttccacgattcatgcctcgactctgggatcatgcaaacttgaggatctgcgctgatggaggagctaatcatatttttgatgagatgtatcagataaccaatgatgaagacaaaaaaagcaccagaaataagtatgttccagaaataattgaaggggacatggattctataagacctgaagtaaaactgttctactctagtcagggatccaaaatttctgataagtcacataaccaggagacaacagatctacacaaatgtatttctcgaatccatcattgtacgcctgatgatgaaaaaccaaatctctgtgtacttgttactggagcactaggtggaaggtttgatcacgaggcggcaaatatcaatgttctgtatctgttttcggacatgaggattgtcctcctatcagacgattgcttgatccgacttcttccaagaacacatcgccatgagctttatattgagtcgtctgttgaaggaccccattgtgggcttttccctgttggagcaccatcaacaagcacaacaactactggcctgaaatggaatctaagtgaatcaaagatgagatttgggagcatgataagcacatccaacattgtgcagtcggagaaagtaactgtagaatctgatgcagatctcttgtggacaatttctctgcgaaatctgacataagcagttcctagtttgttatcttttttcttctctttcctgtcaagtggcaaccaagctcttgtacagccacttttgtgtttatgagttgtgtgtctggtaaataaataccatctgatgacaaatcgatgaggtctcatcattagacaggatgtctaccacgatcttgaactgctgatgaattatgtgaataacacgagcaggcatgatggttgtatcctctctagttgtataactgtattgttgtacttgcaacggggtttcttgtataaaattgttctcaacagttcacactgtatggttggattttgtaatgagtctggcaattgggtacagtgatatatgctaatccatctgttctaatgtaagacattttagattttctatttacat

SEQ ID NO: 203419 - DNA, 1508 bp, Zea Mays
ctcagtctcggcttcttcgttttccttcgcccgacgcggccgccgccgttcccgctcggtcccggggttccgtaggggcaggcgtcctatcttgccctagtggttaccttccaggggcaccgcgtgctggtggaggtctccaacggtagtgtccgtggaagacagttactcggcgccgtcatggcggcggccggtggcggaagggaagccaccacatccggctgtggtctcaagcgccgctacgcaccacacgaccaggaggaggagacgatgaatcaagatcagccttctaaggaagatcggtgtgggcgaatttggagtgggatcgacttgctcaaggacgtcactgaaaacaagcatgtcctacctactggacttgaaggcattgacagacttcttgggggcgggctgcgccaaggtcagctcacagaggttactggaccatcatcttctggtaaaacacaggtttgtctacattctgcttcacatgctccagtgaagcatacgggtgtggttatgtacttggatactagtaattctttctctcctagtcgtattgccaccataattgatggaactaacgacctatctgatcaaaaaggttttgacttgctgtctaaggagaggctcaagactgtgatgcaaagcatcatctgcgagtctgtgtttgatatatttggtgatggcaggagaatttgcttacttataattgactcaatatcatccttacttgctcccattattggaggcaagtatccacaagggcgatcgatgatgatatcactggcgatgatcctaaagaagttagcctatgagcataatctagctgttctggtgaccaatcatatggtttcagctggcaatggtgctgtcaagcctgctcttggtgagagctggaaatctgttccacatgtccgcctgatgatatctcgtgaacatagtagtaatatctgcacgggaactgtgctgaagcacacactactggcttctggccgtactgcaaaattcgtgctgccctgataacctttcagacgaggtgatgataagttgccgttaagaactgatagacgattgatggttcatactctaagaacccacggcgaatgtcttctctgttcttcttggttgtacatatacggtgtatgtagtgtatactaagttgttggagtagcccttgcattttattttccttttgcaacaaatggtcaaatgtatcttatcacatgataaagtacatcttatgttgttttgtgcatgcttggttggttactagagattgcaacggagaaatccccgtcggtgaatagctctccatccctatccccgtaaagaagtttatatgatcgcaaaacttatccaatgatcaaaccataatgcatatgcgtactttctgtcctaaaatatttgatctccacgaatattttagggtctgattgggaacatagtttctcaaaatcacagtttataataccatagtttaatgtatgtcataacataattataatata

SEQ ID NO: 203420 - DNA, 2174 bp, Zea Mays
gctttatattctcgctatcgccgcgcaaaggaggacggacaggagggcgagagcagctgtcgcttttgacctatcggggggcgccgggcgggcgtaacggaaccaaggcggccaggtagctgctgtgctgctacgagtagtaagcactatatatataacgggcaacggcaaagccatcgtcgtcgtcgtggaactcgtacttgcgtgcgtgcgcacaagaacgcgggtcagagctgctggcggttggaggagcagaggagatcgctgtgcgggcggcgatggagaagccccggcaggtggcgcggaaattcctggcccggccgcagcacgagggcgccggcgccgtcgtccgccgcagcatcggcaggttcgagctgaggtacttcgacccgttccttgtcctcgacgagttcacagtttctgctccggccggcttccccgaccacccgcaccgaggcttcgagaccgtcacctacatgcttgaggtatgatcaccgttttcattggggtcctttcttcttcttctttttttcccgtcagaacaagcctaaacgagtggccatggacgtcgccttgcatcccctgcgtgcggcgcattcagcgcaaaaaggcattgcttgcttggttcacattcatccccaatgacatctcagcgggacccggtgcgttcggaaacgagaaacgcgtgggtggtgccatttgtcaacggcgccaaatgatgtctccgcggttgggttctgaattcccctgtcctccatcaaggatccgtcccgacggggcccagtcccattaactttctaaggtcaaagtaagatgagttgggagctataccgtccacacgatttttggaacacgtcgcccccaaaaatcactcatgttcacctcacctccaattgactctcatccaaacactacataaaatatggtcgtctaatttcatccctgcttatacatccaaccaaacacactctttcatccctctttatacatccaactaaatgcacccttattcaaaaaataatttaacctctacagtcatatgtggttttgtggctcccagagtaccccttaccgaaatattatatagtatcatcgtccctataaacaattcgtgtgggtttggcctttgaaaacaatttgtaaaggtgctagtactcagttggtaccagtggttgtgccgagaaaccaacgagctcgtgtaaaaaaaaagaatcagggtcacagtccggttctcacctcctggctcctgccccttggctgggcatggaacgctgtttcagggcgccgtgacgcacgaggacttcgagggccaccgtggcaccatcaaggccggcgacgtgcagtggatgacggccggccgcggcatcgtgcactccgagatgcccgccggccccggcacgtccaggggcctgcagctctgggtcaacctctcctccgccaacaaaatggtcgagcccgggtaccaggagatccagagcaaggacatcgcgtgcacgtccgacggcgacggcggcgtcacggtgcgcgtgatcgccggccacgccatgggcgtgcgctcgccggtgcgcacgcgcacgccgaccatgtacctggacttcacggtgcgcccgcgcggcgcggtgcggcagcccgtgcgcgcgtcctggaacgccttcgcctacgtgctggagggcgagggcgtgttcggcgccgagcggtgcgcgcccgtcggcgcccaccacctgctgctgctcggccacggcgacggcctcgaggtctggaacaagttgcccgaccgcccgctccgcttcctgctcgtcgccggcgagcccatcggggagcccgtcgcgcagctcggccccttcgtcatgaacaccgaggaggagatcgacatgaccgtcaacgacttcgagtgctacgccaatgggttcgagaaggcccgccactggaagtcgcaggcgatgctggcgcttggcgtagagtagggcgagacatgagcacaggatcaccaaagaaaacgaatagatttttttttgcttcttttttccccattattatcgttccggtttgttgcgttcaattttaacccccaacattggatcgctttgtgtacatatctgccgtaaattatttttttatcaataacgaaattaccagctgttcataaaagtgtcttgaaacaaaaagaatcccaa

SEQ ID NO: 203421 - DNA, 1648 bp, Zea Mays
actaaagatatagctgtattatatgctaagaattgccaatattaagactcccaagatggataagctcagtggttctgcacgtcttatgattgtttcagatcttgaccatacaatggttgatcatcatgacgaggagaacctgtccttgcttaggtttggtgccctgtgggaatctgtttactgtgaggattctctactagtcttctcgactggaagatcaccaactctttacaaggaattaaggaaagagaagcctatgctaactccagacatcactatcatgtctgttggcactgagataacatatggggaggcaatggttcctgatgatggctgggaagaatatctgaacaataagtgggacaggaatattgttgtagcagaaactgtgagcttttctgagctgaagcttcagccagagacagaacagcgcccgcacaaggtcagcttttttgttgataagaagaatgcccaggaagtgataaaatctgttgccgagagattggacaaatgtgggatgccaaaataatatatagtggtggccaggaccttgatatattacctcaaggagctggaaagggccaagcacttgcatatttgcttaaaaagctaagctcatgtggaaaaccgcccaacaatactcttgtttgtggtgactctggtaatgatgcagaattattcagcatccctggtgtacatggtgtcatggtcagcaatgcccaagaggaactacttcagtggtacacagaaaatgcgaaggataacccaaagataattcattcaaatgagagatgtgcagctggtattatacaagctattggacacttcaagctaggacctaacatttctcctagagacctgcagtttccttatgcaaaggaagcctctttcaaacctacagatgctgtagtgaagttctacgttctctatgagaagtggcgcagggctgaggttccaaagtctgattcagttataaagtacttcaaaaacatcactcatgcaaatggagttaccatccatcctgctgggcttgaactctcactccatgcatccattgatgcgttgggatcatgttatggtgacaaacaagggagaaagtaccgagcatgggtggacagactttttatcacacagactggttcagatagttgggtggggaggtttgacttgtgggaatcagaaggtgatgtgcgtgcgtgttctctgtcaagtcttgctttgattctgaaggctgaatccccagagggctttgtgctaacccacatccaaaagacatggctgaacggatactcgtcaggggttgagcaggcgtttaagctgtagagcagtataccgtctcggctcgtggttggagttttcttgagaatagaatagaataatgtacctgtttataatattaacttcccaaaaccgcactggaggatcaccagggagaggattcggtgccttctcctatttggcgcgtaagataaatgttttgtctcatggctttcatgagaagatgaaattgactcatcttggtatatatttacaaatcttgaataatgcagcgttatctatatccagggatgtcaacggcaatccagggaaattgggtttttacttcattactcattaatgctttatttggttagaagatgattgatgg

SEQ ID NO: 203422 - DNA, 1612 bp, Zea Mays
ctggaacccgactcccaagatggataagctcagtggttctgcacgtcttatgattgtttcagatcttgaccatacaatggttgatcatcatgacgaggagaacctgtccttgcttaggtttggtgccctgtgggaatctgtttactgtgaggattctctactagtcttctcgactggaagatcaccaactctttacaaggaattaaggaaagagaagcctatgctaactccagacatcactatcatgtctgttggcactgagataacatatggggaggcaatggttcctgatgatggctgggaagaatatctgaacaataagtgggacaggaatattgttgtagcagaaactgtgagcttttctgagctgaagcttcagccagagacagaacagcgcccgcacaaggtcagcttttttgttgataagaagaatgcccaggaagtgataaaatctgttgccgagagattggacaaatgtgggatgccaaaataatatatagtggtggccaggaccttgatatattacctcaaggagctggaaagggccaagcacttgcatatttgcttaaaaagctaagctcatgtggaaaaccgcccaacaatactcttgtttgtggtgactctggtaatgatgcagaattattcagcatccctggtgtacatggtgtcatggtcagcaatgcccaagaggaactacttcagtggtacacagaaaatgcgaaggataacccaaagataattcattcaaatgagagatgtgcagctggtattatacaagctattggacacttcaagctaggacctaacatttctcctagagacctgcagtttccttatgcaaaggaagcctctttcaaacctacagatgctgtagtgaagttctacgttctctatgagaagtggcgcagggctgaggttccaaagtctgattcagttataaagtacttcaaaaacatcactcatgcaaatggagttaccatccatcctgctgggcttgaactctcactccatgcatccattgatgcgttgggatcatgttatggtgacaaacaagggagaaagtaccgagcatgggtggacagactttttatcacacagactggttcagatagttgggtggggaggtttgacttgtgggaatcagaaggtgatgtgcgtgcgtgttctctgtcaagtcttgctttgattctgaaggctgaatccccagagggctttgtgctaacccacatccaaaagacatggctgaacggatactcgtcaggggttgagcaggcgtttaagctgtagagcagtataccgtctcggctcgtggttggagttttcttgagaatagaatagaataatgtacctgtttataatattaacttcccaaaaccgcactggaggatcaccagggagaggattcggtgccttctcctatttggcgcgtaagataaatgttttgtctcatggctttcatgagaagatgaaattgactcatcttggtatatatttacaaatcttgaataatgcagcgttatctatatccagggatgtcaacggcaatccagggaaattgggtttttacttcattactcattaatgctttatttggttagaagatgattgatgg

SEQ ID NO: 203423 - DNA, 1629 bp, Zea Mays
ggcggcggagcatctggaacccgactcccaagatggataagctcagtggttctgcacgtcttatgattgtttcagatcttgaccatacaatggttgatcatcatgacgaggagaacctgtccttgcttaggtttggtgccctgtgggaatctgtttactgtgaggattctctactagtcttctcgactggaagatcaccaactctttacaaggaattaaggaaagagaagcctatgctaactccagacatcactatcatgtctgttggcactgagataacatatggggaggcaatggttcctgatgatggctgggaagaatatctgaacaataagtgggacaggaatattgttgtagcagaaactgtgagcttttctgagctgaagcttcagccagagacagaacagcgcccgcacaaggtcagcttttttgttgataagaagaatgcccaggaagtgataaaatctgttgccgagagattggacaaatgtgggctagatgccaaaataatatatagtggtggccaggaccttgatatattacctcaaggagctggaaagggccaagcacttgcatatttgcttaaaaagctaagctcatgtggaaaaccgcccaacaatactcttgtttgtggtgactctggtaatgatgcagaattattcagcatccctggtgtacatggtgtcatggtcagcaatgcccaagaggaactacttcagtggtacacagaaaatgcgaaggataacccaaagataattcattcaaatgagagatgtgcagctggtattatacaagctattggacacttcaagctaggacctaacatttctcctagagacctgcagtttccttatgcaaaggaagcctctttcaaacctacagatgctgtagtgaagttctacgttctctatgagaagtggcgcagggctgaggttccaaagtctgattcagttataaagtacttcaaaaacatcactcatgcaaatggagttaccatccatcctgctgggcttgaactctcactccatgcatccattgatgcgttgggatcatgttatggtgacaaacaagggagaaagtaccgagcatgggtggacagactttttatcacacagactggttcagatagttgggtggggaggtttgacttgtgggaatcagaaggtgatgtgcgtgcgtgttctctgtcaagtcttgctttgattctgaaggctgaatccccagagggctttgtgctaacccacatccaaaagacatggctgaacggatactcgtcaggggttgagcaggcgtttaagctgtagagcagtataccgtctcggctcgtggttggagttttcttgagaatagaatagaataatgtacctgtttataatattaacttcccaaaaccgcactggaggatcaccagggagaggattcggtgccttctcctatttggcgcgtaagataaatgttttgtctcatggctttcatgagaagatgaaattgactcatcttggtatatatttacaaatcttgaataatgcagcgttatctatatccagggatgtcaacggcaatccagggaaattgggtttttacttcattactcattaatgctttatttggttagaagatgattgatgg

SEQ ID NO: 203424 - DNA, 1644 bp, Zea Mays
gcaagtagagggattcgcgagcctacaccgtatctctgcgagactcccaagatggataagctcagtggttctgcacgtcttatgattgtttcagatcttgaccatacaatggttgatcatcatgacgaggagaacctgtccttgcttaggtttggtgccctgtgggaatctgtttactgtgaggattctctactagtcttctcgactggaagatcaccaactctttacaaggaattaaggaaagagaagcctatgctaactccagacatcactatcatgtctgttggcactgagataacatatggggaggcaatggttcctgatgatggctgggaagaatatctgaacaataagtgggacaggaatattgttgtagcagaaactgtgagcttttctgagctgaagcttcagccagagacagaacagcgcccgcacaaggtcagcttttttgttgataagaagaatgcccaggaagtgataaaatctgttgccgagagattggacaaatgtgggatgccaaaataatatatagtggtggccaggaccttgatatattacctcaaggagctggaaagggccaagcacttgcatatttgcttaaaaagctaagctcatgtggaaaaccgcccaacaatactcttgtttgtggtgactctggtaatgatgcagaattattcagcatccctggtgtacatggtgtcatggtcagcaatgcccaagaggaactacttcagtggtacacagaaaatgcgaaggataacccaaagataattcattcaaatgagagatgtgcagctggtattatacaagctattggacacttcaagctaggacctaacatttctcctagagacctgcagtttccttatgcaaaggaagcctctttcaaacctacagatgctgtagtgaagttctacgttctctatgagaagtggcgcagggctgaggttccaaagtctgattcagttataaagtacttcaaaaacatcactcatgcaaatggagttaccatccatcctgctgggcttgaactctcactccatgcatccattgatgcgttgggatcatgttatggtgacaaacaagggagaaagtaccgagcatgggtggacagactttttatcacacagactggttcagatagttgggtggggaggtttgacttgtgggaatcagaaggtgatgtgcgtgcgtgttctctgtcaagtcttgctttgattctgaaggctgaatccccagagggctttgtgctaacccacatccaaaagacatggctgaacggatactcgtcaggggttgagcaggcgtttaagctgtagagcagtataccgtctcggctcgtggttggagttttcttgagaatagaatagaataatgtacctgtttataatattaacttcccaaaaccgcactggaggatcaccagggagaggattcggtgccttctcctatttggcgcgtaagataaatgttttgtctcatggctttcatgagaagatgaaattgactcatcttggtatatatttacaaatcttgaataatgcagcgttatctatatccagggatgtcaacggcaatccagggaaattgggtttttacttcattactcattaatgctttatttggttagaagatgattgatgg

SEQ ID NO: 203425 - DNA, 1692 bp, Zea Mays
ttgggtcctcgcgcgcgggaggaaaaggaaggtctcgcacgggagcaagtagagggattcgcgagcctacaccgtatctctgcgagactcccaagatggataagctcagtggttctgcacgtcttatgattgtttcagatcttgaccatacaatggttgatcatcatgacgaggagaacctgtccttgcttaggtttggtgccctgtgggaatctgtttactgtgaggattctctactagtcttctcgactggaagatcaccaactctttacaaggaattaaggaaagagaagcctatgctaactccagacatcactatcatgtctgttggcactgagataacatatggggaggcaatggttcctgatgatggctgggaagaatatctgaacaataagtgggacaggaatattgttgtagcagaaactgtgagcttttctgagctgaagcttcagccagagacagaacagcgcccgcacaaggtcagcttttttgttgataagaagaatgcccaggaagtgataaaatctgttgccgagagattggacaaatgtgggctagatgccaaaataatatatagtggtggccaggaccttgatatattacctcaaggagctggaaagggccaagcacttgcatatttgcttaaaaagctaagctcatgtggaaaaccgcccaacaatactcttgtttgtggtgactctggtaatgatgcagaattattcagcatccctggtgtacatggtgtcatggtcagcaatgcccaagaggaactacttcagtggtacacagaaaatgcgaaggataacccaaagataattcattcaaatgagagatgtgcagctggtattatacaagctattggacacttcaagctaggacctaacatttctcctagagacctgcagtttccttatgcaaaggaagcctctttcaaacctacagatgctgtagtgaagttctacgttctctatgagaagtggcgcagggctgaggttccaaagtctgattcagttataaagtacttcaaaaacatcactcatgcaaatggagttaccatccatcctgctgggcttgaactctcactccatgcatccattgatgcgttgggatcatgttatggtgacaaacaagggagaaagtaccgagcatgggtggacagactttttatcacacagactggttcagatagttgggtggggaggtttgacttgtgggaatcagaaggtgatgtgcgtgcgtgttctctgtcaagtcttgctttgattctgaaggctgaatccccagagggctttgtgctaacccacatccaaaagacatggctgaacggatactcgtcaggggttgagcaggcgtttaagctgtagagcagtataccgtctcggctcgtggttggagttttcttgagaatagaatagaataatgtacctgtttataatattaacttcccaaaaccgcactggaggatcaccagggagaggattcggtgccttctcctatttggcgcgtaagataaatgttttgtctcatggctttcatgagaagatgaaattgactcatcttggtatatatttacaaatcttgaataatgcagcgttatctatatccagggatgtcaacggcaatccagggaaattgggtttttacttcattactcattaatgctttatttggttagaagatgattgatgg

SEQ ID NO: 203426 - DNA, 1756 bp, Zea Mays
ccgcgcgacgcctccgcaccaccgtccatattcccccatcaaactgcgaaccgaaaaaggagaagacggacaacgaattgggatcgaaaaacatctccgttccccaccaccaccttcgctccttctgcttcgcccgtccccctccgtcgcgtcgactcccaagatggataagctcagtggttctgcacgtcttatgattgtttcagatcttgaccatacaatggttgatcatcatgacgaggagaacctgtccttgcttaggtttggtgccctgtgggaatctgtttactgtgaggattctctactagtcttctcgactggaagatcaccaactctttacaaggaattaaggaaagagaagcctatgctaactccagacatcactatcatgtctgttggcactgagataacatatggggaggcaatggttcctgatgatggctgggaagaatatctgaacaataagtgggacaggaatattgttgtagcagaaactgtgagcttttctgagctgaagcttcagccagagacagaacagcgcccgcacaaggtcagcttttttgttgataagaagaatgcccaggaagtgataaaatctgttgccgagagattggacaaatgtgggatgccaaaataatatatagtggtggccaggaccttgatatattacctcaaggagctggaaagggccaagcacttgcatatttgcttaaaaagctaagctcatgtggaaaaccgcccaacaatactcttgtttgtggtgactctggtaatgatgcagaattattcagcatccctggtgtacatggtgtcatggtcagcaatgcccaagaggaactacttcagtggtacacagaaaatgcgaaggataacccaaagataattcattcaaatgagagatgtgcagctggtattatacaagctattggacacttcaagctaggacctaacatttctcctagagacctgcagtttccttatgcaaaggaagcctctttcaaacctacagatgctgtagtgaagttctacgttctctatgagaagtggcgcagggctgaggttccaaagtctgattcagttataaagtacttcaaaaacatcactcatgcaaatggagttaccatccatcctgctgggcttgaactctcactccatgcatccattgatgcgttgggatcatgttatggtgacaaacaagggagaaagtaccgagcatgggtggacagactttttatcacacagactggttcagatagttgggtggggaggtttgacttgtgggaatcagaaggtgatgtgcgtgcgtgttctctgtcaagtcttgctttgattctgaaggctgaatccccagagggctttgtgctaacccacatccaaaagacatggctgaacggatactcgtcaggggttgagcaggcgtttaagctgtagagcagtataccgtctcggctcgtggttggagttttcttgagaatagaatagaataatgtacctgtttataatattaacttcccaaaaccgcactggaggatcaccagggagaggattcggtgccttctcctatttggcgcgtaagataaatgttttgtctcatggctttcatgagaagatgaaattgactcatcttggtatatatttacaaatcttgaataatgcagcgttatctatatccagggatgtcaacggcaatccagggaaattgggtttttacttcattactcattaatgctttatttggttagaagatgattgatgg

SEQ ID NO: 203427 - DNA, 1952 bp, Zea Mays
agaaacctcgtctcctccctcttctgtcttctcccgctcaccgcccaccgcccgacctgtgctgccgcccatggcgagacgccttctctcccgcggccgcctcattaagctcgaccggcccatcctacccgccgctctcacccgtctgctttcgcgcggcccgcccactccgacgactagcgaaccggaggacaagggcaaaaaagcggcggctgtcctagtggaggcggtcgccacgaaccacaaaaaggacgcggaggtcgggagagatggatccgaggaggacgacgaggatacgagcccgccctggaggagctggaggccggacgtcgcgtggctctccaaggcactcgagcccgcactggacctgtacaagcaatacagctggaagcctttcgcgtcttctggtcgtgtggaaaacatccctgcaagcactcgtacatttagtgagatcctaagcgacctccagagaagtaagataagcataaaggactggagcctcagtgatctcaccattggcctctacctcatttacctcagccaagcatcctcaaagaactcggaagctttcaagggcgttcagatatcctccaataagatggttcaagaactaatttatcaccttgaacttgcaagaggttgttataaaggtaatgcagctgggcttgcaaggtatagcatgcttcggaagagaaatgttgtaaagtttgtgaaagactctagtattttgagacctggatattacattggcattgacccacgagctaaattggtgattcttgggattcgtgggactcatacagtctatgatcttgttactgatttgattgctctaagcgataagaaagtatcacctaaaggtttctcaacacactttggaacatacgaggcagctcgttggtaccttcgccatgagctgggaataatcagaaaatgtttggaaaaacacaaggtgaggagtttgaagcaggactatgagttacggttggtaggtcactctcttggaggagcatcagcggcgttgcttgctataatgctacggaagaagtcaaaggaagagcttggtttcagtccagacattatttctgctgttggatttggaacaccgccttgcatatcaaaggaagctgctgaaagttgtgcaagctatgtctctactgttgtgctccaggatgatattatacctaggctcagtgcagcttcgttggcaagactgcgaaatgaaatactcaaaacagattgggtaagtgttctggaaaaggaagacttgaagcatatagtggatatcgtgactaatgctaagcttgttgtttcgtcaattcaagatgtggcgcgtaaacttggtgattatgccaaaattgtatcaccatcgacaaattctggtgttaccaaagatccaactaactcgacagagatggcgacatcgattagtagaaatgatgtgtttgtgcctgaggatctcttccttcctgggaccctgtattacctgcagagggacattgaggatataaatgacgttgaagaagagtcatacacgctctggaaaggtgatccaggggaaaattttcagaggatattgttgtctggtaatttgatatctgatcacagatgcgaaagcatatactacgctctgagagaagtgctcaagacacttcccccaccccggactctggatgaatgatctttcttttcttctgttctctcaggagctttaatctgtagtggctggatgcctgctttccgtagttttctgatggctgttcctttggtctttttgttggcctgtgaatgttgtacagtataagctgctgtgctaaaaaagcaagaatacgcgccgggcaatgtgatcttgcaagtccgatttgggtgttgtcttttaaccgtgtgcttttgagttgacgctacaaaattgaaatcgatagattgatttcattatcaattgtaatatatgg

SEQ ID NO: 203428 - DNA, 1671 bp, Zea Mays
tcccgttgcaacgcacgggcactaacctagtatacatatacatattatattattatatttagctttaggataaaaatgattatgaaatatttatatgaaataaaaaatattaaccaataacaaatgttaccctagactagttgtagaaaaggaaaaatcttcactagtgatggaataattaaagacaattgtttctgttatgataataatggaagcagaatgaagaacagaaaaaagagtaaaataaaaaagaagccatggcaaaataagagttaaaaaaagtgaaggagaaagaagaacgagccagtttcatagcccgctttctgttgaaaacaaaaatcggcccgatagggcacgccgagagaagcaagctgtaaaaacagccccgaaccgaagaactgttctcctgcgttcgtttctcttctcgacggggacgaccgccagagccgccgccttacgtccagctgccacggtacttcatcgggccctttgccggtgcaggcggcgcagcacccaccgcaccaggctataaatggcaggaaggcaccgggcaccccgacaataccatgatgaacctcgaggataccgtgatggtccaccacctccacttccacgaccaagacctctctcaccgcgtcgcatggcagaggaactgtctaggcgccgtgctgagatccgtagaatccatgaggacaatcagcgtctggcggatgaaattgttagtctcaagcaaaccatgccgcgtttgcaagaagacctccgaatctcaagccaggctgttccaaagctccgggcagagaaagagctcgagtcgagggagctgactcagaggaacctgaagctggaagctgagctgcgtgccttagaacccctcaggcaagacgctctgcatctgcgatctgaagcaagtaaactgcagtctctgaggcaagagttggctgcgaaggttcaaggcctatcaaaagagcttgaacttcagaagtctgaaagccagaaaatgactgctttggtagctgaacgtgatgcgctgtgtcaagaactgctccaggctagggcgaaccttgagtttgagaagaaggcgaagccagagctgactgcgcaggttcaggcaatggagaaggatcttgtggctatggctcaggaggcggagaagctgagggctgatatcgcgaagagaaacacacctactagtttcagcagccgtggaacgtatggagcctcgttgtcgactcctgggatgggtttgcaaggcatgtatgatggcggcggctattctatggctgggagccgctacggcagtggcactggggcttggagctcgcacgatccccatggctacccgcatctttaactgtgcttctgaccggtgttttctcctgaacagctccctgagtaccttggctaagtttcttgtagtagtataacttgtggtgcaccattgctacccttcctctggtcaatacacaacaatataccaactttggttgtcttggttgttttttcccctactgcacacggtgacgctgttgtgagcattagatgtttggccactcggccgttttgccgtggtgagttttggcttaattcattattaggtaacaggcctgtaagctgtatagtaagaataacacaagatcctctaggacctagccaatgcattgtagctacctc

SEQ ID NO: 203429 - DNA, 641 bp, Zea Mays
ccgtcccgtgctcagatccggccagatcgccctcaggattttattccgccctccgtctccgggctcgcttggatcgagatgggcgtctgcgcgtccaaggccgcctactcctgctgctgctgctgctgctgccgcgagccgcacaacggggttactaacgagaggaccgatgctgtaacggatgacgaggaggcatacgacctgcctgcgttccaggagtttaccttcgagcagttgcggctagctacatcagggtttgcggtggagaacatcgtgtctgagcagggtgagaaggctcccaatgtggtatacaaggggaagctccatgcccagcgccgcatcgccgtcaagcgcttcaaccgctctgcctggcccgacccgcgccagttcctggaagaagctagatcagttggcctgctccgaagcaaaaggttggcaaatttgcttggctgttgctgcgaaggtgatgaaaggttgcttgttgcagaatacatgcccaatgatacgctcgcgaaacatcttttccactgtgagtcctttgaaaacattctatcataaagctgcaaaggcctgatgggcatgattaagtcagggatcagtccacacaagtgactcgatcacgcttcacccgagcctagcct

SEQ ID NO: 203430 - DNA, 1371 bp, Zea Mays
ctaggatctgaaattaggggaccaaattgggatcaaacgggagatttcgactttgaagctaatcaaacatcccaacgtggttcagctgcatgaggttatggcgagtaggacgaagatatacatggttcttgaatttgttgatggaggcgagttattcgataagatcgtcaattctggaaggctaggagaggatgaagctaggatatactttcatcaacttataaatgcggttgattattgtcatagccgaggagtgtaccatagagatctgaagccagagaatctacttctggactcacatggaacccttaaagtttcagactttggcctaagtgcatttgcaccacaaacaaaagaggatgggcttctgcatactgcctgtggaactccaaactatgtagcgcctgaggtgctcgctgataaaggctatgatgaaattttggaagatgaatggttcaaaaaaggctataaaccaccacattttgaacaaggcgaagatgttaaccttgacgacgttgatgctgcattcaatgattcagaggaccgtcttgtagcagagaaaagagaaaagccagaatcaatgaatgcatttgctcttatttcgaggtcacagggcttcaaccttggaaatttgtttgagaaggagatgatgggaatggtaaagagggaaacatctttcacgtctcaatgtacagcacaggagatcatgtcaaaaatagaggatgcatgtgggccacttggtttcaacgtgcggaaacaaaattacaagatgaaattgaaaggtgacaaatccggaagaaaaggccacttatctgttgcaactgaggtttttgaggttgctccttcacttcacatggttgagcttcgtaaaaccggaggagacacattggaattccacaatttctacaagaatttctcatcagagctgaaagatatcgtgtggaaagctgaatctgatgcaagtatgaaacagacgaagtgacacccagggaatctgtgtaacttatgatgtcacattgtgagatagaccaccacctcgggtgataccgcttgtttggtactgtatgttttttttactggtaccacattggcaatcaatctcgtgtacagagctccttctgaatgagcgcagctgtacacgagacatgaagaggccctccctgagatgctccaaacgttgcaatggaactaaaaatttgtataaatgggtccttggcgtcctaccaatcgggcctgctgcaggggcaaccactagcggaggagcggcaggtccccttctctattgtatagagcaccgactttctgtagtttctactgttgtcacttttacaaaaacaaattttttttctaatcgaccacggtcaagcttcc

SEQ ID NO: 203431 - DNA, 1796 bp, Zea Mays
ataaagccgcaggcgcgcggagcggaggtcgcgagagcaaaattcactgctccctgcccgtcgaaccagccgagcaagccaacgcaaacccagcgagccgcggcacctcgtcgcgcgcgccttgcctgtccgcttcttcgtccgatcgtccgccggtccgagccgagccccccgaagtatggcggagcccgcggcggcggggaggaagacgcgggtggggccgtacgaggtcggcaagaccatcggggagggcagcttcgccaaggtgaagcacgcccacgactcccgcacgggcgccgtccgcgctatcaaggtgctcgaccgcagccacgttctccgccacaagatggtcgagcagatcaaacgggagatttcgactttgaagctaatcaaacatcccaacgtggttcagctgcatgaggttatggcgagtaggacgaagatatacatggttcttgaatttgttgatggaggcgagttattcgataagatcgtcaattctggaaggctaggagaggatgaagctaggatatactttcatcaacttataaatgcggttgattattgtcatagccgaggagtgtaccatagagatctgaagccagagaatctacttctggactcacatggaacccttaaagtttcagactttggcctaagtgcatttgcaccacaaacaaaagaggatgggcttctgcatactgcctgtggaactccaaactatgtagcgcctgagatgtatggtcctgtggcataatcttgtttgttcttatggccggatacttacccttcgatgatgccaatctgatgagactgtacaaactgatctgccatgcaactttttcttgcccaccatggttttcttctggagcaaggaagtttattaagcgcattctcgatcctaaccctgataccaggataaaaattgcagaaattttggaagatgaatggttcaaaaaaggctataaaccaccacattttgaacaaggcgaagatgttaaccttgacgacgttgatgctgcattcaatgattcagagggcttcaaccttggaaatttgtttgagaaggagatgatgggaatggtaaagagggaaacatctttcacgtctcaatgtacagcacaggagatcatgtcaaaaatagaggatgcatgtgggccacttggtttcaacgtgcggaaacaaaattacaagatgaaattgaaaggtgacaaatccggaagaaaaggccacttatctgttgcaactgaggtttttgaggttgctccttcacttcacatggttgagcttcgtaaaaccggaggagacacattggaattccacaatttctacaagaatttctcatcagagctgaaagatatcgtgtggaaagctgaatctgatgcaagtatgaaacagacgaagtgacacccagggaatctgtgtaacttatgatgtcacattgtgagatagaccaccacctcgggtgataccgcttgtttggtactgtatgttttttttactggtaccacattggcaatcaatctcgtgtacagagctccttctgaatgagcgcagctgtacacgagacatgaagaggccctccctgagatgctccaaacgttgcaatggaactaaaaatttgtataaatgggtccttggcgtcctaccaatcgggcctgctgcaggggcaaccactagcggaggagcggcaggtccccttctctattgtatagagcaccgactttctgtagtttctactgttgtcacttttacaaaaacaaattttttttctaatcgaccacggtcaagcttcc

SEQ ID NO: 203432 - DNA, 1868 bp, Zea Mays
ataaagccgcaggcgcgcggagcggaggtcgcgagagcaaaattcactgctccctgcccgtcgaaccagccgagcaagccaacgcaaacccagcgagccgcggcacctcgtcgcgcgcgccttgcctgtccgcttcttcgtccgatcgtccgccggtccgagccgagccccccgaagtatggcggagcccgcggcggcggggaggaagacgcgggtggggccgtacgaggtcggcaagaccatcggggagggcagcttcgccaaggtgaagcacgcccacgactcccgcacgggcgccgtccgcgctatcaaggtgctcgaccgcagccacgttctccgccacaagatggtcgagcagatcaaacgggagatttcgactttgaagctaatcaaacatcccaacgtggttcagctgcatgaggttatggcgagtaggacgaagatatacatggttcttgaatttgttgatggaggcgagttattcgataagatcgtcaattctggaaggctaggagaggatgaagctaggatatactttcatcaacttataaatgcggttgattattgtcatagccgaggagtgtaccatagagatctgaagccagagaatctacttctggactcacatggaacccttaaagtttcagactttggcctaagtgcatttgcaccacaaacaaaagaggatgggcttctgcatactgcctgtggaactccaaactatgtagcgcctgagatgtatggtcctgtggcataatcttgtttgttcttatggccggatacttacccttcgatgatgccaatctgatgagactgtacaaactgatctgccatgcaactttttcttgcccaccatggttttcttctggagcaaggaagtttattaagcgcattctcgatcctaaccctgataccaggataaaaattgcagaaattttggaagatgaatggttcaaaaaaggctataaaccaccacattttgaacaaggcgaagatgttaaccttgacgacgttgatgctgcattcaatgattcagaggaccgtcttgtagcagagaaaagagaaaagccagaatcaatgaatgcatttgctcttatttcgaggtcacagggcttcaaccttggaaatttgtttgagaaggagatgatgggaatggtaaagagggaaacatctttcacgtctcaatgtacagcacaggagatcatgtcaaaaatagaggatgcatgtgggccacttggtttcaacgtgcggaaacaaaattacaagatgaaattgaaaggtgacaaatccggaagaaaaggccacttatctgttgcaactgaggtttttgaggttgctccttcacttcacatggttgagcttcgtaaaaccggaggagacacattggaattccacaatttctacaagaatttctcatcagagctgaaagatatcgtgtggaaagctgaatctgatgcaagtatgaaacagacgaagtgacacccagggaatctgtgtaacttatgatgtcacattgtgagatagaccaccacctcgggtgataccgcttgtttggtactgtatgttttttttactggtaccacattggcaatcaatctcgtgtacagagctccttctgaatgagcgcagctgtacacgagacatgaagaggccctccctgagatgctccaaacgttgcaatggaactaaaaatttgtataaatgggtccttggcgtcctaccaatcgggcctgctgcaggggcaaccactagcggaggagcggcaggtccccttctctattgtatagagcaccgactttctgtagtttctactgttgtcacttttacaaaaacaaattttttttctaatcgaccacggtcaagcttcc

SEQ ID NO: 203433 - DNA, 2753 bp, Zea Mays
ccgcacacaagtcctcacgatatttagattcttatgcagctagttatacacgaattcaaattctatatttaaaaggagtaccaaacaggtccaatgtgtgtaataaaaagaaaaaaaaagattccagtagcagcagtaaagcccattcgtatgtggccctgctccggaccgaaagataaagcccatttgaaatccagctcggcctgctgtcagttcaggagcaggacgagtcggggtcggcgcggcggcaggccgcaggccggcagcaggctctcgcttcgctctctcgttgtctgtcgagaggaagaagacgaggcgagggacggcagcagtagcagctccagcatcttctagcttcttcattcatgggattcggtctctactaggattaggggtgcttcatttcatccgatccccaacgacttgacctgattctgatctcgacgacgatgcggaagcgggatctgggcatcctgctgctcgccgccttcgccatcttcttctccctccaccacgaaggcgacttctccttccgggagtcctggtaccacctcaccgacgaggacttccccatcaagtacgaggccgaccgcctgcccccgccgctcgtcgccgatctcaacggcgacggcaagcccgaggtcctcctccccacccacgacgccaagatccaggttctccagccgccccacgcccgccacctcaacgatgactccgccttccaggaggcccgtgtcatggccgacatctctctcctccccgacaacgtccgcctcgcctcggggaggcgccccatcgccatggccgtcggcaacgtcgaccgctcctacagacctggcgaggtcaggaagcaggtgctcgtcgtcgtcacctccggatggtcagtcatgtgcttcgaccataacctcaagaagctgtgggagcacaacctccaggacgatttccctcatgccgcccaccaccgcgaggtcgcaatctccataaccaattatactctcaagcatggagatgcaggcctcgtcatcgttggaggaaggatggagatgcagcatcattcagcagatctcttcgatgaatttatgataccagaacacaacatggatgatcgccgtcgaagcgccagtgagaaacagggctctgaggctggcaatgcagacctgcgccattttgccctttatgccttcgctggacgtagtggcgaccgtagatggagccggaagaatgagaacatccagtcacagccatcagatgcttctgtgatgttaccacagcataattacaaactcgacgttcatgccctcaatagtcatcaacctggtcagttcgaatgtcgtgaattcagagaatcaatccttggcatcatgcctcatcattgggataggagagaggatactaccctacaacttgcacattttaggaagcataaaaggaaacaagttaagagaacgcctggaaaggctgttattaatagcgtgaacaagcccattgaacacaatccacctgggaaggatgcttccaatagaatagctagagctcttgggaaggctgcagatatggctaactcaaataaagccaggaaggcacagaggatgcagtatgttccgacaatcactaatcatactcaagtttggtgggttcctaatgttgttgttgtacatgaaaaggaagggatagaggttgtccatctagcttctggacgtacaatatgcaagcttcatttaaatgaaggaggccttcatgcagatattaatggagatggagttctggatcatgtccaggttgttggtggaaatggtattaaagagcagactgtcgtgagtggatcaatggaagtgctgaaaccctgttgggcagtcgctacatccggtgtgccagtgcgggagcaactttttaacgtctctatctgccattacaaccattttaatctgttccatcatggtgacttctcgagaagttttgggaggacattgatacagctggtttagaggtcgcgactcctatcctggtccagacagacgatgggcataaacacaggagaggaagccatggtgatatcatctttttgacaagccggggagaggtgacatcgtactctcctgggctgctcggccatgatgcggtgtggagatggcaagtatcatcaggggcgacatggtccaaccttccatctccatcgggaatgatggagaacatagtggtgcctaccttgaaggccttctccctacgtgcctatgacccgaaagaggtgatcatcgccggtggtgaccaggaagcggtggtgctctctccttctggtggcatactggccatgatcgagctcccagcgccccccactcacgctcacctcctggaggatttctccggggacggtctcaccgacatgattgtggtaacttccggtggaatatatggattcgtgcagacaaggcagcctggggctcttttcttcagcacgctggtggggtgcctgatagttgtgatcggcgtggtattcgtgtctctgcacctcagttcgtccaatgccgccaaacccagggcttcctcgtctgaatacagatgatgttttgatatgcaaggtcaagagacttttggtactcctatgttctagtagtctatatatttaaccaaatgagaattcgtgttattgtatgataagaattgttcctactagtatatctcatgatatactgatagtgcaatctcgtttttttccaacacagcatgaaggtgtgctttgtttgtatttagtacgg

SEQ ID NO: 203434 - DNA, 6027 bp, Zea Mays
ccgcacacaagtcctcacgatatttagattcttatgcagctagttatacacgaattcaaattctatatttaaaaggagtaccaaacaggtccaatgtgtgtaataaaaagaaaaaaaaagattccagtagcagcagtaaagcccattcgtatgtggccctgctccggaccgaaagataaagcccatttgaaatccagctcggcctgctgtcagttcaggagcaggacgagtcggggtcggcgcggcggcaggccgcaggccggcagcaggctctcgcttcgctctctcgttgtctgtcgagaggaagaagacgaggcgagggacggcagcagtagcagctccagcatcttctagcttcttcattcatgggattcggtctctactaggattaggggtgcttcatttcatccgatccccaacgacttgacctgattctgatctcgacgacgatgcggaagcgggatctgggcatcctgctgctcgccgccttcgccatcttcttctccctccaccacgaaggcgacttctccttccgggagtcctggtaccacctcaccgacgaggacttccccatcaagtacgaggccgaccgcctgcccccgccgctcgtcgccgatctcaacggcgacggcaagcccgaggtcctcctccccacccacgacgccaagatccaggttctccagccgccccacgcccgccacctcaacgatgactccgccttccaggaggcccgtgtcatggccgacatctctctcctccccgacaacgtccgcctcgcctcggggaggcgccccatcgccatggccgtcggcaacgtcgaccgctcctacagacctggcgaggtcaggaagcaggtgctcgtcgtcgtcacctccggatggtcagtcatgtgcttcgaccataacctcaagaagctgtgggagcacaacctccaggacgatttccctcatgccgcccaccaccgcgaggtcgcaatctccataaccaattatactctcaagcatggagatgcaggcctcgtcatcgttggaggaaggatggagatgcagcatcattcagcagatctcttcgatgaatttatgataccagaacacaacatggatgatcgccgtcgaagcgccagtgagaaacagggctctgaggctggcaatgcagacctgcgccattttgccctttatgccttcgctggacgtagtggcgaccgtagatggagccggaagaatgagaacatccagtcacagccatcagatgcttctgtgatgttaccacagcataattacaaactcgacgttcatgccctcaatagtcatcaacctggtcagttcgaatgtcgtgaattcagagaatcaatccttggcatcatgcctcatcattgggataggagagaggatactaccctacaacttgcacattttaggaagcataaaaggaaacaagttaagagaacgcctggaaaggctgttattaatagcgtgaacaagcccattgaacacaatccacctgggaaggatgcttccaatagaatagctagagctcttgggaaggctgcagatatggctaactcaaataaagccaggaaggcacagaggatgcagtatgttccgacaatcactaatcatactcaagtttggtgggttcctaatgttgttgttgtacatgaaaaggaagggatagaggttgtccatctagcttctggacgtacaatatgcaagcttcatttaaatgaaggaggccttcatgcagatattaatggagatggagttctggatcatgtccaggttgttggtggaaatggtattaaagagcagactgtcgtgagtggatcaatggaagtgctgaaaccctgttgggcagtcgctacatccggtgtgccagtgcgggagcaactttttaacgtctctatctgccattacaaccattttaatctgttccatcatggtgacttctcgagaagttttgggaggacattgatacagctggtttagaggtcgcgactcctatcctggtccagacagacgatgggcataaacacaggagaggaagccatggtgatatcatctttttgacaagccggggagaggtgacatcgtactctcctgggctgctcggccatgatgcggtgtggagatggcaagtatcatcaggggcgacatggtccaaccttccatctccatcgggaatgatggagaacatagtggtgcctaccttgaaggccttctccctacgtgcctatgacccgaaagaggtgatcatcgccggtggtgaccaggaagcggtggtgctctctccttctggtggcatactggccatgatcgagctcccagcgccccccactcacgctcacctcctggaggatttctccggggacggtctcaccgacatgattgtggtaacttccggtggaatatatggattcgtgcagacaaggcagcctggggctcttttcttcagcacgctggtggggtgcctgatagttgtgatcggcgtggtattcgtgtctctgcacctcagttcgtccaatgccgccaaacccagggcttcctcgtctgaatacagatgatgttttgatatgcaaggtcaagagacttttggtactcctatgttctagtagtctatatatttaaccaaatgagaattcgtgttattgtatgataagaattgttcctactagtatatctcatgatatactgatagtgcaatctcgttttttgttgtctaccttggtgttcctagcccccacaaccatttgtacgttggttttttttttaagtttgtttggtcagcaggtcaggcaacaatccagtccatctaatttgagtacatgatggtcaagattgtttcctggtcgacaagttgcctgcccggctataaacaaaatatgatgtcctagcatgcaaagctcgtcttgtctacagtagaatgtgtaaaatagaagatgcagacaagtttgaaatagaaaatgagatataaaatagaagacgtagacaagtttgaaatatagaatgagataggagatctgttgaagatagtttgaagttgaagatagtttgaagatagtcttattgtgttgtcacaattctaccaaagagagggaaagaaaaaaaaatgacaccacacgtcaggctcagctcacagaggccaccgccgccgtgttcctctgtcccgcgggcccccaccccacccgcgtcttcaacttcctgcctgccgctcttctccttgtttgttcccttccgtctaatttggctgcgggtgcaggtggaggccgaggccgaggccaacgccgcctgcgcctggcctgccgtgaggtggaggcggaggcggaggccgaagccaacgccgcccgcgcctggcctgccgttccgcgtcatcttcttccttcgcgtaacgacgccggccaggccaataaataaacaatttccaattccgttcctggaggacgtctgcacggggaccttcccagcgggcgacggccggctgcatccatggcggtggccttcctgctgctgggattgggtttcctccttggcctcctctccctggcgatcgcggaggggctgacgctcctttgggccatccgaagcctcacgcgccgcacatcggcctcacgcagcacgccgccgccatcactccccatccacccgacgccggcgcggtctgtgtctcgccacagcctcaaccgacaggacacctcatttcatccatccactgctgcagtattccacacgttcacgacctgtaccttgacacctttcccattctatctacgagtaaacagggcttcttatggatgctggagcaacccaaggatagcagcatcaatggcgctagcccagggatcagagacaggaagctcctcgtcgaggttttccctgtaaaaatgtctgctacgcttcaaggacattccctcaccttgtctggacccgatgatgcctcgcagctaaccattgacctgctcggttgcacagttgctgctgtttctgcatccaatctgccctcacgtaaatgggccaagaggtatccgataaaactggaaagcaaggaatctggtatttgcagggggagcaaggtatgctatgtttatgcagacacctcttgggagaaggaatcatggtgtaaagcactccgtcttgcttctactacggacaaggacaaactcaaatcccatgaaatgctgacccaagagttccgcagttacatgtcctctctgaaagctggatacccttcctttctgggaccctcgacactctccagtcaggaacatgtgcttgtggacaacactgtgaagaatgatggaccttcaaaactccgaggttttctcaaacgattggtgggaaagaaggcatctgccaaggcttctcaggagagcaaaacaggtccggcgccatctaaacaagatacaagccaacccagtactcctagctccactatgagtttcaacagccagctaccagcttcccccagtgcaaaggtggatgaaaagcttgccgatgacggtacactttgttggaacctcctaatctcccggttgttttttgatgctaaaatgaatgatgagatgaacaaagccatcagagcacgtattcagcgaacattgtcgaacaccagaactccagcctacattggtgagatcacgcttactgacctcaaccttggcaagctcccaccatctctgcacagaatgagagtcctcccactggatttggacgaatcgtgggctttcgaagttgacttcgagtgttctagtggaatactgctgcatatcgaaacaagacttgaggttcaggcgccagagctggaaaaggacattatgaagactgatattagaggcaatcctaatggggacgcgagttcagatttccttgatagtattgagcaatatggtaaccaattcgggccttcagaagtttcggattttgcagcagaggtcaacgatgaagcagataccttaaggaaatcaaagagcgctgggtgggcatcaacatatatgtcaaggtggagaagtatcttgaattcaatagcggaccaggtttcacaggtgccgctatcattggcgattaaaatttcttcagttcgtggaacgatgcggatacatctaaagcctcctccgggtgatcgagtttggtatgggtttacgtccatgccggagatagagtgggagttggaatcatcggttggggataggaagataagcagcagttacatcgcctcgcttatcggcaacaggatcaagatcttggtgatgcccaactgtgaaagctttcctatttcctggatgatagcagatacggatgactgggtgccccgcagaattgcaccttttatatggctgaaccgtgagcccgctgataggcgtgctgcagacacaactagagagatgatgccaggggaagcttccacatccaaggccattgcaaagaacaagtcgagtccgctgccgtctacaaaaagaatcaccaacggttcctggaacaagacaaagatacgtgttgatgggcaagagcaagagcaggcagaagcatcaacgagctcgcagtcttggctggtttcagcaaatggtgatgcaacaagggaacagctgaggatgccactgctgagcagcagcggagacgagagagcaggccctgtggaggagcagcaagcatcaccttctgctgctgaggaggagggagatgcgaagaagaggaagaggcgtgcacgggtgatggatctaggaaggaggatgggcgacaagctggaagagaagggcaagcgtttcgtcgggaagatgcgggagaacgcgaggaacaaccgcttgctattgccggacttggagcaggccaccacccctcctgctcctgctcctagttaggcattttaaggatgttactcgacaaaatgaaaattaatcagttgcagcgcctagcaacagctcctaattaggagcacttgtattatgtaaaagaaagaaagaaaaagcttatgagatatgattgtaccacacagatggatgtatgcatctctcatctcacccactgaattaacacaaca

SEQ ID NO: 203435 - DNA, 1484 bp, Zea Mays
aggcaaaacagccccggaccgcgtgcgtttcgcttccggcttccgcccctgctgtttcttggcgttcaccccctctttctctcgtggcgacgacggcgaccgtcgccgcccccctacgcgctaggtgccagggtccgtcgggtccttcgctggcgacgagcacctaccaggcgatccagtggtgtgtttgggaaggtttccgcggtcgggcggcgccccccagtggcgaagatgatccgactaccgacgtacgaagcaggaggcgtccgttgccatcttcttctcctttgagtatatgatactagcaacatccacagtatcaacattcgtgaagtatatattctatgttagtgacatgctaatggaagaattcgcattgcagattatgtgcgctacagaaagatcacttccaacatgaatgaacgctttccagatgctacatcagaagagctcgatgtgagtgatgctacatgtattatttgccgtgaggagatgactacagcaaagaaactgctctgtgggcatctgttccatgtgcattgtctaaggtcgtggctagaacgccaacacacttgccccacgtgcagagctccaatcattcccgcagataatggacatgctgtatcagcacgacaacatggagcccaggctggggttcagcctgctgcaggtactgccactccatcctcagaaggagcaccaggtgagaacatgagcaggcaccaagcaaaacttgaagctgctgcagcggcagcttctttatatggaaggtcttttgtttatcctccagcaaacaccctaaaaaggtctgttcctcctcagcctgcatcaagtacaccacaatctgaagcaagtagctccaatcatcagtcacaaaaagaccaagaaatgcagtcccgaaacagcagcgatggtttagtgcctctgcctcttaatgcagatggtgctgttggttcaggaacaagcacaagggaccttgaaaattcacttcagaaggcacaagaaaactttattaagagccagattgagatgttacagatccaactgcaaatggtgcagcgtggcgctgctgggccgcccagtaacgagaatactgagcacacagaagaatgactgaatctgtgaacagacacttctgcatcgtggtgtaataataaggagaatactgatgagcacacagctgaatctgtaaataggcggcgatgaggatgggacaaaagaaagccaaggattggcgatacctggggctgggggaaactgttacatgatgtcttgcctggatttttggcaggcctgttaatttatgcttcactattagtgccttgttgccagcaccagatgtttctctctctctgtgtgtgtgtggtggtttctgtacatgaaagccttttgacgggagaaccaaccatggctagtttaattatgaagttcacttgttgtacccgagggaaaatagaaatgactcttgtttttgcctatctatc

SEQ ID NO: 203436 - DNA, 734 bp, Zea Mays
gtcgtgtgctcttccgagcaaagttgcacctgtagcttcaaggataccctctcaggcatcacctcagcccccaaaggtagaaccaccagttcctaaggtggtttcacctcctcagccacaaaaatctcctgccaaagttgaggcaacaccccctaaagttgagaagccatcagttgcgccgcctcctaaagttgattatgctactgatctctttaacatgttatcaatggatggaacaacagagaaagagccagagtcatctccaaacgacgataatgcctgggatggcttctagtctgcacaaccagtacctagctcggaggaaaaagattctgccaaaccagcagaaagcaagacccaatctacatctggaatagaagacttatttaaagattcgccagctgtgtcgttatcctcagctccagctatttcccaagaaaatgcaaagaatgatatcatgagtttgtttgagaagtccaatatggcatcaccatttgctgtccaacagcagcagttggtgtttatgtctcagcagcaagctcttctaatggctactcttaaagatggaaattcaccacaaatagttccagggaataccaatcaactaaacactaacgtttctaatccccctcttggaaccttgcctttccaaaactggacaaatcttggctatcaaaatcctgggttgactctagcagcagcacagaatggtgccacaatgaggagcatttcag

SEQ ID NO: 203437 - DNA, 1982 bp, Zea Mays
gtggttctctattttcttttcccgcgagttgttaatcccttcgccgtactcagctaccgccgccgccgccgccgccgcgtgagttgagagaacgagagccaagaagccagggagggacttgagcttcacttgggaagggctagtactgctcccgcccccgccacggccgtctggctgtctgttgcgcgactgcgccagcctggcggctctgccccgggctgctggcgccgccattgctttcccttggagccgctggcagctaaactggtgccctcggccgcctttgtgcgttcctcgccactgcgcccggggtagctgaggtctgaagacggaggtgtcgcccgcctcacggctcctgcaccacggtttttctttctcgcatcgccagagcaacaactgccccccgccgttgtttgtcctgtgctcaaaatggaggctaatggagcagtggatctggaggttgacattatcggcccaggttcggaggatggtgcaagaccttcagagattagcgacattgaggtggactcgccgttctgccgctacccttctaattgtgatgctgctgctctactggatgcagctgcttcagacaattcggatagactattgaagaagaaaaaggtgactgatcattggagaaagtatgtaagcccactaatgtggagatgccaatggttagaactgcggatgaaggatttgcaatcgcaagtgtctaaatatgacaaggagcttgcagtactcaagcatgagaaggagttgcagacaaaaatgattgaattggattgttcctcctcacgatctgtaccattctcctctctttgctgcagaaagactatgaagcgaaggaggagaaaaagaaatgaagataaaattgacacttcatcatatatctctaatcatactgtattatcttattttgaaaaaatggaagcagatggtcattctattgaagacaatgccaacctagtcgatgacaacacaaaagcaaataatgatgctgattggctacttggtattgaaggaggtgataccactgttgagcagattcttttaagcattcaagctgctcaagacagggtattcagtctgagatcaaatctcaagcaagcaatggctaggaagaataagggaataacccttaaaattaacacatccgtcattggtacacacagctcaaattgctcaccaggaaagggcaaagttgctggactgcatgagagatctccccaggacacatcagaatgtgatatggatgattctggcatgcctgatagtgctctctcaagctatggagaagctagcaacatggatatttttgagagcaccatgagcctattgtctgaaggcccacatcagatgggagaatttcgtgaaagttctgaagatgtattgattgacaaccaggcagcagaggaagggtaccgaaacttcgaggtgatcagccacccaagcaagcggctaagggtatcagtgaagcgagaagctgggccacactcggaggatgagagcgtcgcccctgttgtcggtgtcaagagagaagagacacacgaggaagctaccaccagcttcagcctgcacggggcattcctgaagccctgcttcacggggaagaggcaggagaggaagccgaaaaagcaaatgaagcgaaggcgaggtggcccgaccgcggcagctgccgctctcatctcgtggaggagcaagaggatccggaagaagaagcaactctaggatggacgcacatgccatggttcacactttctggcctgatcagatgatgggatgacgacggcaaccgcatacttaaatctttttcttagccttattcttttttatttgtctttctttaccttatcactttttttatctgcctctccttaccgttatcctttttctttcctggattctgtttaacttttggctgtttgtttcggtttcaaatgggactgttttgccaatgcgtttcattcattccaggttcc

SEQ ID NO: 203438 - DNA, 1095 bp, Zea Mays
gtgctttcctctacagcggcatcggcaaaagggaagaaatagagcccgttcccggaccaataagcccaaaggcccatcaaccgagagccttcgtcttccttctctcatcctttgctcctcttcaaacgctcgagaaagagagagagactaaatcctccctcgaaaccctagcatagccactgccttcccgcacgctaggaaggggaagatatgggcgccgaggaggacgccgctgcacgccgcgagcgtctccgcgccctccgtgccgccaaggacctcctctccacccccgacggcgccccaaccccttccaccgacggagaacaccaaaatggcaaccatgagatggcagaagagccagaattaccaggtcatcaggatgcacctggtgaggctgctaaagaggatggtagccccactgaggaggccgaagaggttgaagatgatggtgagcttccagccatgaagttcagaaactaccttccccatgatgaacaacttcgaggaggcaagctggctccagtgtctcttcccaagtttgaagacccaattagtgccgaaactgcagagccaaaggaagtggagaacctttttggaaacatagcaccaaagaatccaaattgggatctgaaacgtgatgtgcagaagagaattgataaactggaaaggcgcacgcagaaagcgttggctgagattgcattggaacagcagagggagaaggaagccttggaggaatctcaagattgaccgacctgtataagtgaccagtgactcatgctggttggtccctcgagcagacgtcattatcttatttagataatgtaatgtactttgggatgctctgtgtatctaccatcttgggatgtactgaattgagtttgggacgtgtatctacctaccatcttgtattgtcagctcaaggatgtagcaaactagtagcaacttcaaaaaatgagatgtagcagtcctgttctgttagacggacctggtcaaactaccgtactaaatacaaacaaagcacaccttcatgctgtgttggactcggtattctcaggcaatggacgaataatgacttcttttgttgtgttaaaaagt

SEQ ID NO: 203439 - DNA, 1794 bp, Zea Mays
cgcgtttattaattcccaccccgccgctgctcacgtatcgcccgccgtcctctcctctcctccccggccccttcactccaccaacgaaccccacgcaggcagcagcacgcgcaagccgcaaggcaaggcacaaacactaggggccgggcatggcgacgcgggcggacgtggagaagggcgggccggcgaggaaggagcccggcaaggtgccgtcgccgctgtacccgcagcacgagggggagcgggagtgggtgccctggctcgtccccgtcatcttcgtcgccagcatcaccgtcttcgtcgtcaccatgtacgccaacaactgccccgcgcgcgacaccaacaagtgcgtcgcccgcttcctcggccgcttctccttccagccgctgcgacagaacccgctcttcgggccctcctccgccacgctcaccaagatgggggccctggtgtgggagaaggtggtgcaccgccaccagggctggcgcctcctctccagcatgtggctccacgccggcgtcatccacctggtcgccaacatgctctgcctcctcttcatcggcatgcgcctcgaacagcagttcggatacgtgaggatcggcgcgatctacgtgctctccggcgtgggcggcgccgtgctgtcgtcgctggtcgtccggaaccgcgtcaccgtgggggcctccggggcgctcttgggcctgctgggcgccatgctctcggagctgctcaccaactggaccatctacaccaacaaggcggcggccgtggccacgctcctgtccgtggccgccgtcaacctggtgctcggcgtcctgccccacgtcgacaacctggcgcacctcggcggcttcctcgcgggcttcctactcggcttcgtcgtgctcatgcgcccccacttgggctggatggagcgctacggactccccgccggcgcgccctgcaccgccaggaagtacctcgcgtaccagtggaccctcctcgccgtcgccatcatcatcctcctagtcgggtaagcaggacaggacatcctgattgatttatttatttatttattatatatatgcccttcgtagctggccaggccatttccttcgtccagcatgtacatataacaggagtaacgtgactggattctcctcttcctctctcatggctagccagcgtgttgacattgacaaccacgctgtgcacgatactctatgccgttttgtgtgcgctcatatataattcaaaagtctcaacaactcattattccttgcgtgtatggtttcctctctctgcagattcgcggccggcatggcgatgctcttccgcggcgccaacgccaacgacagctgccactggtgtcactacctcagctgcgtgcccaccgccagatggaactgcaccaactgatgatccatgcatagcggcagcagcacgagttggagttgccacccattttcatcttccgatccgtatagtctcgttactgtagatagcttctttgtcattcattcagatctcaacacacacgtcggtctcctgttcatttgattcattcttttacataatgatgcaatgcaattattgagatttcgaatctcgtcttgcgtgtctagtcagcatgcgccgcctttttcgaacccgtgcaaatgcgccaacgcacgcacaagagcaaccaccacgtgccttcccttctttttcttgacaacacatgtgtacgttctcaactgcacatgttcccaagataccaactatcacaggttggttggtgaaagtactacgcacagcgcatcacgaaggcccccccccccc

SEQ ID NO: 203440 - DNA, 1997 bp, Zea Mays
ggcactgctacgagtgagagccgaaaatacccctatataaacagaatctatgagtactaagcagtccctctcatccatccagagaagctagagtccaggtctcactcgcgaccgagagccacagagaaatggggggccctggtcgtccctggcaccggcacgtcttcctcgtcgtgtcgctgcagcttctccttgtggcgccatggcaggacgagacggccgctcgagctctcaatttcaccaggcaggatttccccagggccttcgtctttggtgccggcacgtcagcttatcagtacgaaggggcaaccgatgaagacggaaggagcccaagcatatgggacaactttactcatgcaggtaggatgccggacaaaagcactggcgacctaggggcggacggctaccacaaatacaagggagacgtgcagctgatgagtgacactggcctggaggcctaccgcttctccatttcttggtccaggcttattccaagaggaagaggagccatcaaccccaagggcctcgagtattacaacaacctcatcaatgagctagtaaaacgaggaattgagatacacgtgaccctgtcccacctggattaccctcagatcctggaggacgagtaccacggctggctgagccccaggatggtggacgacttcgaggcgtacgcggacgtgtgcttccgcgagttcggcgaccgggtgaggcactggaccaccatggacgagccgaacgtcaactccatcgccgcctacgacaacggcgccttcccccccggccgctgctccccgccgttcgggttcggcactaactgcaccgccggcggcaactccagcgtcgagccctacgtcgtcacccacaactgcatcctggcgcacgccgccgtcgccgccctctacacccgcagctaccgtgccgaacagcagggcgtcgtcggcatcaacatctacaccttctggaactaccccttctcccccgcccccgccgacgtccaggccacgcagcgctcgctcgacttcatgatcggctggatggtcaacccgttggtgtatggagactaccctcaagtgatgaagaggatagtcgggtcccgccttcccaggttcaccaagcggcagtcggagatggtccgcgggacggcggatttcattggcataaaccactacacctccgtgtacgtcagtgatcgccccaacgacgcagcagccgacaccacggggccccgggactacaatgctgatctgtcggctaccttcagattttctcgcgatgatccagctactggccagggactgcaatgcatgctcgagtatctcagccaaacctacaacaacatccccgtctacgtgcaggaaaacggctacggggcgctcttcaacgactccatccatgaccacgagagagccgagtacttgagtgcctacatgggcagcgcactcgctgcactcaggaacggagccaacgtgaaggggtacttcgtctggtcgttcctggacgtgtttgagctgctggcgggctactactcgcgatacggcctctaccatgtcgattttcaggacccggagctgccgaggacgccaaaactctctgcgctgtggtacagcaagttcttgaagaatgaaatcgacataatagagaacgttgtcagcgatactgacgatgcgcgctcgcatgctgctgaacaatgagttagtttgctagcaagcagcaggcagcagcacacgacatatcacatatgcatgtcgtagtagcggaggaaaagaatgtttcttatccattctttttttttcacaagtccacagaagctcagaattttcagcagttggtcaggcccggaattcagtgttcgtgaatcgtagccataggcaccctctttggctgtagccctgtagtatgcgctacgtacggcaacagttgtcatgagtcactctgtcgctactgacacaataagtaatacagaaaggaactattactcttgcagttgcacgtcg

SEQ ID NO: 203441 - DNA, 2028 bp, Zea Mays
ggcactgctacgagtgagagccgaaaatacccctatataaacagaatctatgagtactaagcagtccctctcatccatccagagaagctagagtccaggtctcactcgcgaccgagagccacagagaaatggggggccctggtcgtccctggcaccggcacgtcttcctcgtcgtgtcgctgcagcttctccttgtggcgccatggcaggacgagacggccgctcgagctctcaatttcaccaggcaggatttccccagggccttcgtctttggtgccggcacgtcagcttatcagtacgaaggggcaaccgatgaagacggaaggagcccaagcatatgggacaactttactcatgcaggtaggatgccggacaaaagcactggcgacctaggggcggacggctaccacaaatacaagggagacgtgcagctgatgagtgacactggcctggaggcctaccgcttctccatttcttggtccaggcttattccaagaggaagaggagccatcaaccccaagggcctcgagtattacaacaacctcatcaatgagctagtaaaacgaggaattgagatacacgtgaccctgtcccacctggattaccctcagatcctggaggacgagtaccacggctggctgagccccaggatggtggacgacttcgaggcgtacgcggacgtgtgcttccgcgagttcggcgaccgggtgaggcactggaccaccatggacgagccgaacgtcaactccatcgccgcctacgacaacggcgccttcccccccggccgctgctccccgccgttcgggttcggcactaactgcaccgccggcggcaactccagcgtcgagccctacgtcgtcacccacaactgcatcctggcgcacgccgccgtcgccgccctctacacccgcagctaccgtgccgaacagcagggcgtcgtcggcatcaacatctacaccttctggaactaccccttctcccccgcccccgccgacgtccaggccacgcagcgctcgctcgacttcatgatcggcgatggtcaacccgttggtgtatggagactaccctcaagtgatgaagaggatagtcgggtcccgccttcccaggttcaccaagcggcagtcggagatggtccgcgggacggcggatttcattggcataaaccactacacctccgtgtacgtcagtgatcgccccaacgacgcagcagccgacaccacggggccccgggactacaatgctgatctgtcggctaccttcagattttctcgcgatgatccagctactggccagttcgtcccaatcaacatgccaagcgacccgcagggactgcaatgcatgctcgagtatctcagccaaacctacaacaacatccccgtctacgtgcaggaaaacggctacggggcgctcttcaacgactccatccatgaccacgagagagccgagtacttgagtgcctacatgggcagcgcactcgctgcactcaggaacggagccaacgtgaaggggtacttcgtctggtcgttcctggacgtgtttgagctgctggcgggctactactcgcgatacggcctctaccatgtcgattttcaggacccggagctgccgaggacgccaaaactctctgcgctgtggtacagcaagttcttgaagaatgaaatcgacataatagagaacgttgtcagcgatactgacgatgcgcgctcgcatgctgctgaacaatgagttagtttgctagcaagcagcaggcagcagcacacgacatatcacatatgcatgtcgtagtagcggaggaaaagaatgtttcttatccattctttttttttcacaagtccacagaagctcagaattttcagcagttggtcaggcccggaattcagtgttcgtgaatcgtagccataggcaccctctttggctgtagccctgtagtatgcgctacgtacggcaacagttgtcatgagtcactctgtcgctactgacacaataagtaatacagaaaggaactattactcttgcagttgcacgtcg

SEQ ID NO: 203442 - DNA, 1413 bp, Zea Mays
ggcactgctacgagtgagagccgaaaatacccctatataaacagaatctatgagtactaagcagtccctctcatccatccagagaagctagagtccaggtctcactcgcgaccgagagccacagagaaatggggggccctggtcgtccctggcaccggcacgtcttcctcgtcgtgtcgctgcagcttctccttgtggcgccatggcaggacgagacggccgctcgagctctcaatttcaccaggcaggatttccccagggccttcgtctttggtgccggcacgtcagcttatcagtacgaaggggcaaccgatgaagacggaaggagcccaagcatatgggacaactttactcatgcaggtaggatgccggacaaaagcactggcgacctaggggcggacggctaccacaaatacaaggatggtcaacccgttggtgtatggagactaccctcaagtgatgaagaggatagtcgggtcccgccttcccaggttcaccaagcggcagtcggagatggtccgcgggacggcggatttcattggcataaaccactacacctccgtgtacgtcagtgatcgccccaacgacgcagcagccgacaccacggggccccgggactacaatgctgatctgtcggctaccttcagattttctcgcgatgatccagctactggccagttcgtcccaatcaacatgccaagcgacccgcagggactgcaatgcatgctcgagtatctcagccaaacctacaacaacatccccgtctacgtgcaggaaaacggctacggggcgctcttcaacgactccatccatgaccacgagagagccgagtacttgagtgcctacatgggcagcgcactcgctgcactcaggaacggagccaacgtgaaggggtacttcgtctggtcgttcctggacgtgtttgagctgctggcgggctactactcgcgatacggcctctaccatgtcgattttcaggacccggagctgccgaggacgccaaaactctctgcgctgtggtacagcaagttcttgaagaatgaaatcgacataatagagaacgttgtcagcgatactgacgatgcgcgctcgcatgctgctgaacaatgagttagtttgctagcaagcagcaggcagcagcacacgacatatcacatatgcatgtcgtagtagcggaggaaaagaatgtttcttatccattctttttttttcacaagtccacagaagctcagaattttcagcagttggtcaggcccggaattcagtgttcgtgaatcgtagccataggcaccctctttggctgtagccctgtagtatgcgctacgtacggcaacagttgtcatgagtcactctgtcgctactgacacaataagtaatacagaaaggaactattactcttgcagttgcacgtcg

SEQ ID NO: 203443 - DNA, 679 bp, Zea Mays
agccgatttcgtgtccctgcagccacggccaccgcccaatctccacttctttatcttctccgaggaaagtaggtcgaggatgccccgcagcggcttctcggggtccttcaggtcgcccaagatcgacgtcgtcatcgacatgggaaaaccccttcctcaaccgcaccggtcgacggcttcctcaagatcggcgcccgtcggcgcctgcaaggtgctgccgagagaccttcgagtgcctccacagggggatgtttcgaagcacaaggttgagcatgccctgaggaagatgtgcaaggagggcgcatattggggcactgttgctggagtttatgtgggcatggtgtacggcgtggaaagggtccgtggccgcagtgactggaagaacgcgatgatcgggggcgccttgtccggcgccctgatctccggcgccagcaacagcgacagaggcaaggtcgtcaaggacgccatcaccgccggcgcggtcgccacagccgtcgagttcatcaactgcattacctagccgagcaaggagcaactgcatttgcagtgccattgtcgtgcaaaatatgaataaagtacttgccatgtccagctcataaaccactccacaccttcagtcttcgtttctgaccggcggttttgctttgtgtgaatgccctgtgagtgagagcaagaattc

SEQ ID NO: 203444 - DNA, 510 bp, Zea Mays
tctacatccaccgccgctgccgtataggtcccgtcccctcgtcgccgcggctgcgctggtggggagcggagcggacggacggagatccgcccgcctcgggctccgctacgccggctgaagtccaagatagaagacggaggtccaaagcaagtggacatggaaaaagttgtgccctcgcttcctcttcatctccttgctgtatgtttggagcttgggcaaggcccggacttgacctatgtgcttcgtggcatccgttttttgcatagtttgtctgatctagcatcccgccatactagactggagcaggttctccttgatgatgtcaaattatccgaacaagtcatggacctgatattctttctactttctattcttgctgaacagaaggagaataacaatgttggtgcttctccgcttgtgcatgcgtcacttgtagcaggtagtcttcatctgttgacaaattacttctcttcccagtggcatgaacttgtccatattctgcttgcacat

SEQ ID NO: 203445 - DNA, 1171 bp, Zea Mays
cacgagtcacgactcacagcaactgaaaactaaagaaaccgctggcggacgcccaccaaaccaaaaaaaaaaacaaaaaacaaaaaaccaaaaaaccccacgcctttcctcgccggcgaaggagaagccgcagcgctgctcccacgccccctaggagcgcgtgcctccattccatgtgcgcccgcccaccggaggataacctttgatcatttcgtttgctggacattggatcaactggtgctgttatacatagaaaggatttcattttaaattctcatctatatttggtggtgccataatcatttttccactagcgtttggcaataatgtcggagagcgagttagcagtaataaaaccagaggtgttgaagacatatatctggcttcagtgctttgatggttccatacaacaagtggaggaggaggttgcaatgttctgccccatgatatgtcaggaaattgtgaaaaatggcacagggtcatcaaaaaatcatgctattgctctcccggaaagagttaatccagccaatttgagtttgattcttgactactgtcgatttcatcagatcactgggcgttcaaacatggagcggaagtcctttgatgaaaagtttgttaggatagaaacagaaagactctgcgaattgacttctgcagccgacagtctacagttaaagccacttgttgatcttactggccgagcgcttgctcgaatcattgaaggaaagacacctgaggaaattcgtgacattttccatttaccagatgatttaacagaggaagagaaattggagcccctaaaaaatataaatgatggtcctgctaggattcgcctactgaaccggttgtatgccaagaagcggaaagagctccaggagcgccataagctgaagaaagagcaaaaagatgagagatctttggatgagttacttagttttattaatggggatggaggtatagctacagttcaggaggcaggaaagctaccaagagtaagaaaaagaataaaaggaaggatcatgttgagaaccccccaaaagctgactctgagcctgtaaatgcgaatccagatatgcaagatgatgccgagtacccttttgaagatgctgacctcgatgatggacttgatcctgcaatgaaagaagagcttgataggtttgtttttaacatg

SEQ ID NO: 203446 - DNA, 2356 bp, Zea Mays
aaaaaacaaaaaacaaaaaaccaaaaaaccccacgcctttcctcgccggcgaaggagaagccgcagcgctgctcccacgccccctaggagcgcgtgcctccattccatgtgcgcccgcccaccggaggtgttgaagacatatatctggcttcagtgctttgatggttccatacaacaagtggaggaggaggttgcaatgttctgccccatgatatgtcaggaaattgtgaaaaatggcacagggtcatcaaaaaatcatgctattgctctcccggaaagagttaatccagccaatttgagtttgattcttgactactgtcgatttcatcagatcactgggcgttcaaacatggagcggaagtcctttgatgaaaagtttgttaggatagaaacagaaagactctgcgaattgacttctgcagccgacagtctacagttaaagccacttgttgatcttactggccgagcgcttgctcgaatcattgaaggaaagacacctgaggaaattcgtgacattttccatttaccagatgatttaacagaggaagagaaattggagcccctaaaaaatataaatgatggtcctgctaggattcgcctactgaaccggttgtatgccaagaagcggaaagagctccaggagcgccataagctgaaggatgttcaagtacagaaagagcaaaaagatgagagatctttggatgagttacttagttttattaatggggatggaggttcaggaggcaggaaagctaccaagagtaagaaaaagaataaaaggaaggatcatgttgagaaccccccaaaagctgactctgagcctgtaaatgcgaatccagatatgcaagatgatgccgagtacccttttgaagatgctgacctcgatgatggacttgatcctgcaatgaaagaagagcttgatagagaagttgaggcctttgcgaagaggttggattcagtttggaaggagtcacatattggtggtaatggttctgcacggagatttcctgggtttaatcacatgtgagtgttaagctggtaggatcagaaggcagaagcagaggagatttgtggacatacagcctggaagagagtaaaaataccaaacagtcgacttgctcctgtgtgtttgataagggcatgtacaaccctgaaatcatggatcggttttgcgaagtacaaaagacatgttaagagactgtataccctgagcctttggatcataaatgtaagtaagaggcaatgtgtgtagaattgtgtagagacagtctcttcgcggaaagagagcctgtctattgtatttttttcaattaaccctcaagagacttcatattgaaagaggttatacatgtcagagccaagcatgcagacatgctattttgttggggaggaggctgcctagttgggatgaagcttagcatggttcaaggaaaaagtgtagttttttttctttggaaagggaggattagaggtctgtcttgtctgtgttgccagggaggaggctgcctagttgggatgaagcttataatgcagtatatagtgtaaaacagtgttttgaatgactatatggctgaactgttggacacagtttgtatcaatgaaatttcgttgattcactgtattgtggtggtgcacataaaaaatgtcctttttttggctgaccttacgtgggttggaatatactataagcacgtgttcttatttataattaagttaaacaacattttatcgtatatatcaataataatagaattggatagatgaatgatagaagttaatttaataggtatttacatgtaaaatgttatagaaaacaaatgaaacattatcatttagaaataatcaaaaaggttttgatgggataaaaaataatgatcagcggacagtaggtagaatatacctaaagtcaatcattgagtgcaacaacaatcttaaacgacacttttccccaagggcatctaaactggacatgttgggaaacctaacctataagcaactaatgtcaaaaacacaaaatctaacaaaaaaagttgtagcgggtcaatggagggcaaggtgtattatcctcacatttatgacattgtcggttgatgtgtcaaacatataaccattgttcaactgtcaaatttcagcagctctcccagtagagcacactaagtatcattccacaagttgagagattcacataagtaatgaggatatatttgctaagatgaagaaaatctggtactccatgctactgatggtcaattaagaaaaatgaacactgaggtgtaaactttaaaaaattaccatccatgcatgagaggtcgagattcatgatgcttctgcaatttacctgatcaagctacaattt

SEQ ID NO: 203447 - DNA, 2828 bp, Zea Mays
aaaaaacaaaaaacaaaaaaccaaaaaaccccacgcctttcctcgccggcgaaggagaagccgcagcgctgctcccacgccccctaggagcgcgtgcctccattccatgtgcgcccgcccaccggagcgcgcgcctgtctgccgttctcctgtttccgcctgcgctgagcgtgaatggttgtaataagccatggctggaggctgcctgggttcgggagccttggttactggaacagatagtcttcttgcaaaccaatctccggctcaattcattagtccatgcgatatttggttgctgggtacgatttcggtggtccggatcatctgtcacagcaaaggtgcaaagagtggcaattaattacaatggcattgccatacatttgtgttagtcatgcataaaacgtattggctatcggctctggacttctaaggataacctttgatcatttcgtttgctggacattggatcaactggtgctgttatacatagaaaggatttcattttaaattctcatctatatttggtggtgccataatcatttttccactagcgtttggcaataatgtcggagagcgagttagcagtaataaaaccagaggtgttgaagacatatatctggcttcagtgctttgatggttccatacaacaagtggaggaggaggttgcaatgttctgccccatgatatgtcaggaaattgtgaaaaatggcacagggtcatcaaaaaatcatgctattgctctcccggaaagagttaatccagccaatttgagtttgattcttgactactgtcgatttcatcagatcactgggcgttcaaacatggagcggaagtcctttgatgaaaagtttgttaggatagaaacagaaagactctgcgaattgacttctgcagccgacagtctacagttaaagccacttgttgatcttactggccgagcgcttgctcgaatcattgaaggaaagacacctgaggaaattcgtgacattttccatttaccagatgatttaacagaggaagagaaattggagcccctaaaaaatataaatgatggtcctgctaggattcgcctactgaaccggttgtatgccaagaagcggaaagagctccaggagcgccataagctgaaggatgttcaagtacagaaagagcaaaaagatgagagatctttggatgagttacttagttttattaatggggatggaggttcaggaggcaggaaagctaccaagagtaagaaaaagaataaaaggaaggatcatgttgagaaccccccaaaagctgactctgagcctgtaaatgcgaatccagatatgcaagatgatgccgagtacccttttgaagatgctgacctcgatgatggacttgatcctgcaatgaaagaagagcttgatagagaagttgaggcctttgcgaagaggttggattcagtttggaaggagtcacatattggtggtaatggttctgcacggagatttcctgggtttaatcacatgtgagtgttaagctggtaggatcagaaggcagaagcagaggagatttgtggacatacagcctggaagagagtaaaaataccaaacagtcgacttgctcctgtgtgtttgataagggcatgtacaaccctgaaatcatggatcggttttgcgaagtacaaaagacatgttaagagactgtataccctgagcctttggatcataaatgtaagtaagaggcaatgtgtgtagaattgtgtagagacagtctcttcgcggaaagagagcctgtctattgtatttttttcaattaaccctcaagagacttcatattgaaagaggttatacatgtcagagccaagcatgcagacatgctattttgttggggaggaggctgcctagttgggatgaagcttagcatggttcaaggaaaaagtgtagttttttttctttggaaagggaggattagaggtctgtcttgtctgtgttgccagggaggaggctgcctagttgggatgaagcttataatgcagtatatagtgtaaaacagtgttttgaatgactatatggctgaactgttggacacagtttgtatcaatgaaatttcgttgattcactgtattgtggtggtgcacataaaaaatgtcctttttttggctgaccttacgtgggttggaatatactataagcacgtgttcttatttataattaagttaaacaacattttatcgtatatatcaataataatagaattggatagatgaatgatagaagttaatttaataggtatttacatgtaaaatgttatagaaaacaaatgaaacattatcatttagaaataatcaaaaaggttttgatgggataaaaaataatgatcagcggacagtaggtagaatatacctaaagtcaatcattgagtgcaacaacaatcttaaacgacacttttccccaagggcatctaaactggacatgttgggaaacctaacctataagcaactaatgtcaaaaacacaaaatctaacaaaaaaagttgtagcgggtcaatggagggcaaggtgtattatcctcacatttatgacattgtcggttgatgtgtcaaacatataaccattgttcaactgtcaaatttcagcagctctcccagtagagcacactaagtatcattccacaagttgagagattcacataagtaatgaggatatatttgctaagatgaagaaaatctggtactccatgctactgatggtcaattaagaaaaatgaacactgaggtgtaaactttaaaaaattaccatccatgcatgagaggtcgagattcatgatgcttctgcaatttacctgatcaagctacaattt

SEQ ID NO: 203448 - DNA, 2500 bp, Zea Mays
ttacaatggcattgccatacatttgtgttagtcatgcataaaacgtattggctatcggctctggacttctaaggataacctttgatcatttcgtttgctggacattggatcaactggtgctgttatacatagaaaggatttcattttaaattctcatctatatttggtggtgccataatcatttttccactagcgtttggcaataatgtcggagagcgagttagcagtaataaaaccagaggtgttgaagacatatatctggcttcagtgctttgatggttccatacaacaagtggaggaggaggttgcaatgttctgccccatgatatgtcaggaaattgtgaaaaatggcacagggtcatcaaaaaatcatgctattgctctcccggaaagagttaatccagccaatttgagtttgattcttgactactgtcgatttcatcagatcactgggcgttcaaacatggagcggaagtcctttgatgaaaagtttgttaggatagaaacagaaagactctgcgaattgacttctgcagccgacagtctacagttaaagccacttgttgatcttactggccgagcgcttgctcgaatcattgaaggaaagacacctgaggaaattcgtgacattttccatttaccagatgatttaacagaggaagagaaattggagcccctaaaaaatataaatgatggtcctgctaggattcgcctactgaaccggttgtatgccaagaagcggaaagagctccaggagcgccataagctgaaggatgttcaagtacagaaagagcaaaaagatgagagatctttggatgagttacttagttttattaatggggatggaggtatagctacagttcaggaggcaggaaagctaccaagagtaagaaaaagaataaaaggaaggatcatgttgagaaccccccaaaagctgactctgagcctgtaaatgcgaatccagatatgcaagatgatgccgagtacccttttgaagatgctgacctcgatgatggacttgatcctgcaatgaaagaagagcttgataggtttgtttttaacatgcagagaagttgaggcctttgcgaagaggttggattcagtttggaaggagtcacatattggtggtaatggttctgcacggagatttcctgggtttaatcacatgtgagtgttaagctggtaggatcagaaggcagaagcagaggagatttgtggacatacagcctggaagagagtaaaaataccaaacagtcgacttgctcctgtgtgtttgataagggcatgtacaaccctgaaatcatggatcggttttgcgaagtacaaaagacatgttaagagactgtataccctgagcctttggatcataaatgtaagtaagaggcaatgtgtgtagaattgtgtagagacagtctcttcgcggaaagagagcctgtctattgtatttttttcaattaaccctcaagagacttcatattgaaagaggttatacatgtcagagccaagcatgcagacatgctattttgttggggaggaggctgcctagttgggatgaagcttagcatggttcaaggaaaaagtgtagttttttttctttggaaagggaggattagaggtctgtcttgtctgtgttgccagggaggaggctgcctagttgggatgaagcttataatgcagtatatagtgtaaaacagtgttttgaatgactatatggctgaactgttggacacagtttgtatcaatgaaatttcgttgattcactgtattgtggtggtgcacataaaaaatgtcctttttttggctgaccttacgtgggttggaatatactataagcacgtgttcttatttataattaagttaaacaacattttatcgtatatatcaataataatagaattggatagatgaatgatagaagttaatttaataggtatttacatgtaaaatgttatagaaaacaaatgaaacattatcatttagaaataatcaaaaaggttttgatgggataaaaaataatgatcagcggacagtaggtagaatatacctaaagtcaatcattgagtgcaacaacaatcttaaacgacacttttccccaagggcatctaaactggacatgttgggaaacctaacctataagcaactaatgtcaaaaacacaaaatctaacaaaaaaagttgtagcgggtcaatggagggcaaggtgtattatcctcacatttatgacattgtcggttgatgtgtcaaacatataaccattgttcaactgtcaaatttcagcagctctcccagtagagcacactaagtatcattccacaagttgagagattcacataagtaatgaggatatatttgctaagatgaagaaaatctggtactccatgctactgatggtcaattaagaaaaatgaacactgaggtgtaaactttaaaaaattaccatccatgcatgagaggtcgagattcatgatgcttctgcaatttacctgatcaagctacaattt

SEQ ID NO: 203449 - DNA, 3537 bp, Zea Mays
tgcttcgctgaatcgtattctcaacagttctcaccgcgacaccgcccatcctctctccgacatcgattcgcgccgagccgccgaccacctgccgccgtctcctccttggtcccagccatggccggcggcgacggcgatcggcatcgcgcgccgaagcggcacaagtcctcgacgccgtcgaaagcggccctggtggacgagagcgccgagttcgactacgctgatgactttgatgacgacgcccacgatgctgatacggaggttaagaagagggattttacgaagctcgagttgaaggtggaccacgcgagccgtccgctctgggcgtgcgccgacggccgcatcttcctcgagaccttctcgccgctctacaagcaggcttacgattttctcatcgccatcgccgagcctgtgtgcaggccagaatctatgcatgaatacaatctaactccccactcattgtatgctgcggtctcagtgggacttgagacaagcactatcatcagtgtcttgagtaaactatctaaaaccaagttgccccgtgaaataattgatttcatccatggatcaactgctaactacggcaaagtcaagcttgtcttgaagaagaaccgatattttgtcgagtctccatttcctgaggtattgagtacccttctgagggatgaagttatatctagagctaggatatctcctgaggattcccttggggcaccttcatttactgttagcaagacatctggccaaatagctagtggacatgaagacctgttaaatggaatggaaattgctgctgcaactgaagacaaggaaacacattcttttgagattgatccttctcaggttgagaatgtcaagcaacggtgcttaccaaatgcattgaactatcccatgctggaggagtatgatttcagaaatgacactgtaaacccagatttggatatggagctaaagccgcaagcacggcctaggccatatcaagaaaagagtctcagtaaaatgtttgggaacggacgagcaaggtctggaattattgtgctaccttgtggtgctggcaagtccttggttggtgtatctgcagcctgtcgtattaagaagagctgtttatgtttggccacaaatgctgtctccgtagatcaatgggcatttcagttcaagctttggtcgaccataaaagatgagaacattagtcgttttacatctgataacaaggagaagtttacagggatggctggtgtggttgttactacatataacatggttgcattcggtggtaaaaggtctgaagattcggagaagatcattgaagaaatccgaaacagagagtggggcttgcttctaatggatgaggtccatgttgtccctgcacatatgttcagaaaagtcatcagcattactaaatctcactgcaagctgggtcttactgctacccttgtgagagaggacgaacgtattactgacctgaattttctaattggaccaaaactgtatgaagcgaattggttggatttagtcaaaggtggatttattgcaaatgtgcagtgtgcagaagtatggtgtcctatgaccaaagagttctttgctgagtatttgaaaaaggaaaattcaaagaagaagcaggtactgtatgtcatgaatccgaacaagttcagggcttgtgaattcctgattcgattccatgagcaacaacgtggagacaagataattgtgtttgctgataatctgtttgcactaactacttatgcgatgaaactgcgcaagccaatgatttttggtgccacaagccatgctgagaggacaagaattctctaccaattcaagaacagtccagaagtcaatacaatttttctttcaaaggtcggtgataactcgattgatatcccagaagctaatgttatcatacaaatatcatctcacgctggttcgagacgtcaagaagctcagcgtctgggccgtattctcagagcaaagggtaaacaccaagataggatggctggaggaaaagaagaatacaatgcttttttctattcccttgtatcaactgacacacaggaaatgtactactcaacaaaaaggcagcagtttcttattgaccagggatatagcttcaaggttatcactagtttgccgccggctgaagaaggacctaatctgagctattacacacttgatgaacaacttgagctcttgagcatggggatgacatgattggtgttgagcgcttagaagaagattctgatggcaaggctcttattagagcacgacgctctgccggatcaatgagtgccttctctggagctggtggaatggtctacatggagtacaggtgaaggagatcctcatcgaagagtcgaacgttcaaccggtgaatagccctgtgacggtttgcggtgacatccatgggcagttccatgacctgatgaagctcttcgcgacggggggccacgtcccagagacgaactatattttcatgggtgattttgtggaccgtggcttcaacagtctggaggttttcaccatcctgttgctactaaaagcgaggtatcctgcacacataacccttctgcgtggaaatcatgaaagtaggcagttgacacaggtgtatggtttctatgatgagtgtcagaggaagtatggcaacgccaatgcatggcggtattgcactgatgtttttgattaccttacgctatcagcaatcattaatggtcaagtcctctgtgttcatggcggtctttctcctgatgtacgtactattgatcagtaagaatgcttatcatcaatgaactagcattgctgactcattttttgaagaatactgagcacatgattctggggttgatttgatacgaacaattgatcgcaattgtgaaattccccatgaaggtcctttctgcgaccttatgtggagtgaccctgaggagatagagacatgggctgttagtccccgtggagcaggttggctgtttggatcgcgcgtcacagcagagttcaactttgttaacggtatcgagctagtttgccgggctcaccagctggtccaggaaggcttaaagtacatgttccaggagaagggccttgtcactgtgtggtctgcacctaattattgctacagatgtggcaatgtcgcttctatcttaagcttcgatgagaagatggaaagggatgtcaagttcttcacagagacagaggagaacaaccagatgcgaggcccaaggaccgcagtcccatatttcctatgacttcaattgtacaattttagaagtctattcgaatctgtaagggctaaagatcaatcagatgtgtttattgttttaggtccagattatagtgcaatctgatgcgtttgatttctgttttcctttaaccacatgtacaatagaccatcgggacagtcatatgttcctgtatctcttcggtgacactgccaaagttttgtttgtgattttgttcccgtgctatccattttggactgtgcttgcgttgtgcagcagaagagtcaggctggttatatcttttatctcatttgagattgttcat

SEQ ID NO: 203450 - DNA, 2933 bp, Zea Mays
tgcttcgctgaatcgtattctcaacagttctcaccgcgacaccgcccatcctctctccgacatcgattcgcgccgagccgccgaccacctgccgccgtctcctccttggtcccagccatggccggcggcgacggcgatcggcatcgcgcgccgaagcggcacaagtcctcgacgccgtcgaaagcggccctggtggacgagagcgccgagttcgactacgctgatgactttgatgacgacgcccacgatgctgatacggaggttaagaagagggattttacgaagctcgagttgaaggtggaccacgcgagccgtccgctctgggcgtgcgccgacggccgcatcttcctcgagaccttctcgccgctctacaagcaggcttacgattttctcatcgccatcgccgagcctgtgtgcaggccagaatctatgcatgaatacaatctaactccccactcattgtatgctgcggtctcagtgggacttgagacaagcactatcatcagtgtcttgagtaaactatctaaaaccaagttgccccgtgaaataattgatttcatccatggatcaactgctaactacggcaaagtcaagcttgtcttgaagaagaaccgatattttgtcgagtctccatttcctgaggtattgagtacccttctgagggatgaagttatatctagagctaggatatctcctgaggattcccttggggcaccttcatttactgttagcaagacatctggccaaatagctagtggacatgaagacctgttaaatggaatggaaattgctgctgcaactgaagacaaggaaacacattcttttgagattgatccttctcaggttgagaatgtcaagcaacggtgcttaccaaatgcattgaactatcccatgctggaggagtatgatttcagaaatgacactgtaaacccagatttggatatggagctaaagccgcaagcacggcctaggccatatcaagaaaagagtctcagtaaaatgtttgggaacggacgagcaaggtctggaattattgtgctaccttgtggtgctggcaagtccttggttggtgtatctgcagcctgtcgtattaagaagagctgtttatgtttggccacaaatgctgtctccgtagatcaatgggcatttcagttcaagctttggtcgaccataaaagatgagaacattagtcgttttacatctgataacaaggagaagtttacagggatggctggtgtggttgttactacatataacatggttgcattcggtggtaaaaggtctgaagattcggagaagatcattgaagaaatccgaaacagagagtggggcttgcttctaatggatgaggtccatgttgtccctgcacatatgttcagaaaagtcatcagcattactaaatctcactgcaagctgggtcttactgctacccttgtgagagaggacgaacgtattactgacctgaattttctaattggaccaaaactgtatgaagcgaattggttggatttagtcaaaggtggatttattgcaaatgtgcagtgtgcagaagtatggtgtcctatgaccaaagagttctttgctgagtatttgaaaaaggaaaattcaaagaagaagcaggtactgtatgtcatgaatccgaacaagttcagggcttgtgaattcctgattcgattccatgagcaacaacgtggagacaagataattgtgtttgctgataatctgtttgcactaactacttatgcgatgaaactgcgcaagccaatgatttttggtgccacaagccatgctgagaggacaagaattctctaccaattcaagaacagtccagaagtcaatacaatttttctttcaaaggtcggtgataactcgattgatatcccagaagctaatgttatcatacaaatatcatctcacgctggttcgagacgtcaagaagctcagcgtctgggccgtattctcagagcaaagggtaaacaccaagataggatggctggaggaaaagaagaatacaatgcttttttctattcccttgtatcaactgacacacaggaaatgtactactcaacaaaaaggcagcagtttcttattgaccagggatatagcttcaaggttatcactagtttgccgccggctgaagaaggacctaatctgagctattacacacttgatgaacaacttgagctcttgagcatgatggccccattcacctctaccaacaggcgctgaatgcaggggatgacatgattggtgttgagcgcttagaagaagattctgatggcaaggctcttattagagcacgacgctctgccggatcaatgagtgccttctctggagctggtggaatggtctacatggagtacagcactgggaagggaaagggtgttcagaagaaacacaaggacccgtcaaagaggcatcatctgttcaagaaacgctatgcgtagcctgttgtgctttgctagaaatgatttggttcatgacaaccttgttttggcatcaaagtcgttggtttaaacacacaagcccatgttatgcacagttgttgctcttggttaggaccatcctaaagcaattgttttctctgtttgagcaaggttactgagctactgtagcgaagaacaattttggtctcaggtttacacatgctgcttaaagttggcatacccggctttcgggcgggacaacaggacgtgtcttcttgaattgccttgtattatacaagtataaacaaacaaacgctaaatcgcaacgcttcttatgtgctgctggttctggcgtgctgtatttcacctgattagtttccgatcatcttgtgtatgatgcgggattgtctatggttcttcctatggttcagttccataatttgtaatggattacgactaacaatgtagtatttgctcggtttttaatcagttttcgatgttaaaaaa

SEQ ID NO: 203451 - DNA, 2850 bp, Zea Mays
tgcttcgctgaatcgtattctcaacagttctcaccgcgacaccgcccatcctctctccgacatcgattcgcgccgagccgccgaccacctgccgccgtctcctccttggtcccagccatggccggcggcgacggcgatcggcatcgcgcgccgaagcggcacaagtcctcgacgccgtcgaaagcggccctggtggacgagagcgccgagttcgactacgctgatgactttgatgacgacgcccacgatgctgatacggaggttaagaagagggattttacgaagctcgagttgaaggtggaccacgcgagccgtccgctctgggcgtgcgccgacggccgcatcttcctcgagaccttctcgccgctctacaagcaggcttacgattttctcatcgccatcgccgagcctgtgtgcaggccagaatctatgcatgaatacaatctaactccccactcattgtatgctgcggtctcagtgggacttgagacaagcactatcatcagtgtcttgagtaaactatctaaaaccaagttgccccgtgaaataattgatttcatccatggatcaactgctaactacggcaaagtcaagcttgtcttgaagaagaaccgatattttgtcgagtctccatttcctgaggattcccttggggcaccttcatttactgttagcaagacatctggccaaatagctagtggacatgaagacctgttaaatggaatggaaattgctgctgcaactgaagacaaggaaacacattcttttgagattgatccttctcaggttgagaatgtcaagcaacggtgcttaccaaatgcattgaactatcccatgctggaggagtatgatttcagaaatgacactgtaaacccagatttggatatggagctaaagccgcaagcacggcctaggccatatcaagaaaagagtctcagtaaaatgtttgggaacggacgagcaaggtctggaattattgtgctaccttgtggtgctggcaagtccttggttggtgtatctgcagcctgtcgtattaagaagagctgtttatgtttggccacaaatgctgtctccgtagatcaatgggcatttcagttcaagctttggtcgaccataaaagatgagaacattagtcgttttacatctgataacaaggagaagtttacagggatggctggtgtggttgttactacatataacatggttgcattcggtggtaaaaggtctgaagattcggagaagatcattgaagaaatccgaaacagagagtggggcttgcttctaatggatgaggtccatgttgtccctgcacatatgttcagaaaagtcatcagcattactaaatctcactgcaagctgggtcttactgctacccttgtgagagaggacgaacgtattactgacctgaattttctaattggaccaaaactgtatgaagcgaattggttggatttagtcaaaggtggatttattgcaaatgtgcagtgtgcagaagtatggtgtcctatgaccaaagagttctttgctgagtatttgaaaaaggaaaattcaaagaagaagcaggtactgtatgtcatgaatccgaacaagttcagggcttgtgaattcctgattcgattccatgagcaacaacgtggagacaagataattgtgtttgctgataatctgtttgcactaactacttatgcgatgaaactgcgcaagccaatgatttttggtgccacaagccatgctgagaggacaagaattctctaccaattcaagaacagtccagaagtcaatacaatttttctttcaaaggtcggtgataactcgattgatatcccagaagctaatgttatcatacaaatatcatctcacgctggttcgagacgtcaagaagctcagcgtctgggccgtattctcagagcaaagggtaaacaccaagataggatggctggaggaaaagaagaatacaatgcttttttctattcccttgtatcaactgacacacaggaaatgtactactcaacaaaaaggcagcagtttcttattgaccagggatatagcttcaaggttatcactagtttgccgccggctgaagaaggacctaatctgagctattacacacttgatgaacaacttgagctcttgagcatggcgctgaatgcaggggatgacatgattggtgttgagcgcttagaagaagattctgatggcaaggctcttattagagcacgacgctctgccggatcaatgagtgccttctctggagctggtggaatggtctacatggagtacagcactgggaagggaaagggtgttcagaagaaacacaaggacccgtcaaagaggcatcatctgttcaagaaacgctatgcgtagcctgttgtgctttgctagaaatgatttggttcatgacaaccttgttttggcatcaaagtcgttggtttaaacacacaagcccatgttatgcacagttgttgctcttggttaggaccatcctaaagcaattgttttctctgtttgagcaaggttactgagctactgtagcgaagaacaattttggtctcaggtttacacatgctgcttaaagttggcatacccggctttcgggcgggacaacaggacgtgtcttcttgaattgccttgtattatacaagtataaacaaacaaacgctaaatcgcaacgcttcttatgtgctgctggttctggcgtgctgtatttcacctgattagtttccgatcatcttgtgtatgatgcgggattgtctatggttcttcctatggttcagttccataatttgtaatggattacgactaacaatgtagtatttgctcggtttttaatcagttttcgatgttaaaaaa

SEQ ID NO: 203452 - DNA, 3626 bp, Zea Mays
accaaaattaaagacggcaactctgcctgcacagcattgaccgccgccttcgctcctccacctccccgctcgctctcctgcctccgcgcgggccgcggatcccttcactcgccacagcaagcgctagaagagggaatggagcccggcctcgcatcccgcgtcgcccgttcagccgctcagccgctttccggctgcctgtcgcggcactcgctctcgccgtggctcaagatccagaaccacatttatcctatgccaagtctctgtcacaaggttcctagcacgggaaaatgccacgcttctatgacaacaagttacatcagggaaacatcagatgtcactgatttggactgggaaaaccttggctttggcctcatcgagactgactttatgtatgttgcaaaatgtggaactgatggaatcttttccaaaggtgaagtcctaccatttggtcctatagcactgagtccttcagctggagtcttaaattatgggcagggattgtttgaaggcctaaaagcatataggaaaactgatgggtccatccttctatttcgtccagaggagaatgctataaggatgctaagcggtgcagagaggatgtgtatgcctgctccaactgttgagcaattcgttgatgctgttaaacaaactgttttggcaaataaaagatgggtgcctcctactggtaaaggttccctatatatcaggccactcctaataggaagcggtgcagttcttggtcttgcgcctgctcctgagtatagctttatcatttttgtatcccctgttgggaattatttcaaggaaggtttatctcctattaatttgatcgttgaggataaatttcaccgtgccagccctggtggaactggaggtactgaaagcacaaaagattgcaaaggggaaaggatattctgatgtcctttatttggatgctgttcatgacaaatatctcgaagaagtctcttcctgcaatatttttgttgtgaaagacaatgttatttctacgcctgccattaaaggaacaatacttcctggtataacgaggaaaagtatcattgaagttgctcagagcaaaggtttcaaggttgaggagcgtctggtgtgtgtagatgagttgattaacgctgatgaagttttctgcacggggactgctgttgtggtgtcacctgtggggagtgttacatatatggggaaaagggtggaatatggcaaccaaggagtcggtgtcgtgtctcagcaactatacaagtcacttacaagcctccagatgggcaatgtggaggactggatgggagacaattcacgtgatgatttaaacagagaaacaaatcggtccaggtgtcagtgtcactggcacagtgggtggtatggtacccagggaaaggcaagtgcgtcgtaccctgtacacgcaggctggcacagtgggtggtatggtaattggtacccagggaaagtctctcccagttccaggctccagcagtcactcagagccagaggagagaattcaaattcgcagcgcagcgccctcattttgtcattacgttgctctgctcctggctcacctcaccagcgatcactaccggagcaggccatgaagcttaagatcaacaagtaggaccggtgggagcggcggcgcaggaggggcgggttcctccgccgcgcccgtggcggcggggtcgcagcagaggtcgcagccgatgtcgcagcactccttctcgcagggcgttgtggggagcggcggcgcgtcgtcgctcctgcactcgcagtcgcagctctcgcaggcctccctcgacgagaatctcctcaccctccacctcgcctcgcccgctcgcgatcagagattcgggttccatgacgacttatcaaagaagatgacatcgttgcctgtcagctcggcttcttgtgtgcgagaagaatctcagctgcaactggcaaaaacatcaagcaaccctgtccatcgatggaacccttctcttcctgacggtagaagtgtgggtcctactgaggatgttgagcgcaaatttcagcatatggcaagttcagtgcataaggtagggatggtgcttgattcagtgcaaaccgacgttatgcagctaaacagagccatgaaggaagccacactagattctggaagcatacagcaaaagattgttctcctagacgctttgctgcagaaaaatcttaagggacaagatgatctcaaagctcttgttgagagcaacaccaaaagcatctccgatcagctgactgttctgaactcctactccaacaaactggatgagatatcctcaaccctttcaatcttgccaaaacaaatagaaacaaatttgaagcaacagcagagtgacaccttccgaatttttagaaaagacatggaggagattgttagagctgttagatctctcaacaataagattgatgcaatccaaatgccaacagaccagagctgcacaaccaatggaaggcccctgatgaaccaactgccagtcgatagaaatgaaaggccccaggtgaaccaaacaccagaggtaacccgggtgagccaaacaccggtagcaaccatggcgaaccaaagaccagtagcaaaaggaaggcacctggtgagccaaacaccagcagcaaatgggaaacctctgacgaaccaaacatcagtagcaaatggaagatccctgatgagccaagtaccagcagcaaatgggaaacctctgacgaaccaaatagcagtgccaaagggaagacccatgatgaggcagaaaacagcagaaggaggaaggccccagatgaaccaaatacctgtagcagatggatggccccatacaaacaaaatacacgcgccggaagtgcggcatcccgtacctttggtgtgccctgcagcaggcccgaggccgaaggtagaggagggaaagctgagagcggttccccaaaagctaactggttgtagatccagggtgacacctaaacaggaagaggcggcgacgaatacaaaggtcgtcgtcggccgggcagcggcaactgagaaggtggtgatattcatcgacgacgactccgacgatggcggcagcgaggcccttgcttcctgcgtgatcctgaggccggcgcccctggggtcaggtgcaggtgagtgcgacctggtgaaggtgggcgcggaggagagccaggagatcctgaggagggccaggaagcggaggagaagagaaatgcaggccattgtggcctgcatgccgcctgagcttgggtactagtagctagctacttctcatatcaatatatcatggatggatggatgcagttcctaatcgagaaaaagggatagttagttgtgtggttttgttgttgcgatggaatgaatcgagcagcatggatggattggttgattattatatcatctataataggggtaaggtgattgtgggtggtggtggatctggcaatctgctgggctggcaaaaaattagtgggaaaaagtgggcctgcactgcatttgcctgacaccgcacgtacggtactcatgatccatcgcaatcgtggtgttttgtttagctgaataataacaacggtggtgttttaattagctgagtagcagctgggagttggtaaccaatccgaggttacacagatgcgcg

SEQ ID NO: 203453 - DNA, 3652 bp, Zea Mays
accaaaattaaagacggcaactctgcctgcacagcattgaccgccgccttcgctcctccacctccccgctcgctctcctgcctccgcgcgggccgcggatcccttcactcgccacagcaagcgctagaagagggaatggagcccggcctcgcatcccgcgtcgcccgttcagccgctcagccgctttccggctgcctgtcgcggcactcgctctcgccgtggctcaagatccagaaccacatttatcctatgccaagtctctgtcacaaggttcctagcacgggaaaatgccacgcttctatgacaacaagttacatggaaacatcagatgtcactgatttggactgggaaaaccttggctttggcctcatcgagactgactttatgtatgttgcaaaatgtggaactgatggaatcttttccaaaggtgaagtcctaccatttggtcctatagcactgagtccttcagctggagtcttaaattatgggcagggattgtttgaaggcctaaaagcatataggaaaactgatgggtccatccttctatttcgtccagaggagaatgctataaggatgctaagcggtgcagagaggatgtgtatgcctgctccaactgttgagcaattcgttgatgctgttaaacaaactgttttggcaaataaaagatgggtgcctcctactggtaaaggttccctatatatcaggccactcctaataggaagcggtgcagttcttggtcttgcgcctgctcctgagtatagctttatcatttttgtatcccctgttgggaattatttcaaggaaggtttatctcctattaatttgatcgttgaggataaatttcaccgtgccagccctggtggaactggaggtgtgaaaaccattggaaactatgcctcggtactgaaagcacaaaagattgcaaaggggaaaggatattctgatgtcctttatttggatgctgttcatgacaaatatctcgaagaagtctcttcctgcaatatttttgttgtgaaagacaatgttatttctacgcctgccattaaaggaacaatacttcctggtataacgaggaaaagtatcattgaagttgctcagagcaaaggtttcaaggttgaggagcgtctggtgtgtgtagatgagttgattaacgctgatgaagttttctgcacggggactgctgttgtggtgtcacctgtggggagtgttacatatatggggaaaagggtggaatatggcaaccaaggagtcggtgtcgtgtctcagcaactatacaagtcacttacaagcctccagatgggcaatgtggaggactggatgggagacaattcacgtgatgatttaaacagagaaacaaatcggtccaggtgtcagtgtcactggcacagtgggtggtatggtacccagggaaaggcaagtgcgtcgtaccctgtacacgcaggctggcacagtgggtggtatggtaattggtacccagggaaagtctctcccagttccaggctccagcagtcactcagagccagaggagagaattcaaattcgcagcgcagcgccctcattttgtcattacgttgctctgctcctggctcacctcaccagcgatcactaccggagcaggccatgaagcttaagatcaacaagtaggaccggtgggagcggcggcgcaggaggggcgggttcctccgccgcgcccgtggcggcggggtcgcagcagaggtcgcagccgatgtcgcagcactccttctcgcagggcgttgtggggagcggcggcgcgtcgtcgctcctgcactcgcagtcgcagctctcgcaggcctccctcgacgagaatctcctcaccctccacctcgcctcgcccgctcgcgatcagagattcgggttccatgacgacttatcaaagaagatgacatcgttgcctgtcagctcggcttcttgtgtgcgagaagaatctcagctgcaactggcaaaaacatcaagcaaccctgtccatcgatggaacccttctcttcctgacggtagaagtgtgggtcctactgaggatgttgagcgcaaatttcagcatatggcaagttcagtgcataaggtagggatggtgcttgattcagtgcaaaccgacgttatgcagctaaacagagccatgaaggaagccacactagattctggaagcatacagcaaaagattgttctcctagacgctttgctgcagaaaaatcttaagggacaagatgatctcaaagctcttgttgagagcaacaccaaaagcatctccgatcagctgactgttctgaactcctactccaacaaactggatgagatatcctcaaccctttcaatcttgccaaaacaaatagaaacaaatttgaagcaacagcagagtgacaccttccgaatttttagaaaagacatggaggagattgttagagctgttagatctctcaacaataagattgatgcaatccaaatgccaacagaccagagctgcacaaccaatggaaggcccctgatgaaccaactgccagtcgatagaaatgaaaggccccaggtgaaccaaacaccagaggtaacccgggtgagccaaacaccggtagcaaccatggcgaaccaaagaccagtagcaaaaggaaggcacctggtgagccaaacaccagcagcaaatgggaaacctctgacgaaccaaacatcagtagcaaatggaagatccctgatgagccaagtaccagcagcaaatgggaaacctctgacgaaccaaatagcagtgccaaagggaagacccatgatgaggcagaaaacagcagaaggaggaaggccccagatgaaccaaatacctgtagcagatggatggccccatacaaacaaaatacacgcgccggaagtgcggcatcccgtacctttggtgtgccctgcagcaggcccgaggccgaaggtagaggagggaaagctgagagcggttccccaaaagctaactggttgtagatccagggtgacacctaaacaggaagaggcggcgacgaatacaaaggtcgtcgtcggccgggcagcggcaactgagaaggtggtgatattcatcgacgacgactccgacgatggcggcagcgaggcccttgcttcctgcgtgatcctgaggccggcgcccctggggtcaggtgcaggtgagtgcgacctggtgaaggtgggcgcggaggagagccaggagatcctgaggagggccaggaagcggaggagaagagaaatgcaggccattgtggcctgcatgccgcctgagcttgggtactagtagctagctacttctcatatcaatatatcatggatggatggatgcagttcctaatcgagaaaaagggatagttagttgtgtggttttgttgttgcgatggaatgaatcgagcagcatggatggattggttgattattatatcatctataataggggtaaggtgattgtgggtggtggtggatctggcaatctgctgggctggcaaaaaattagtgggaaaaagtgggcctgcactgcatttgcctgacaccgcacgtacggtactcatgatccatcgcaatcgtggtgttttgtttagctgaataataacaacggtggtgttttaattagctgagtagcagctgggagttggtaaccaatccgaggttacacagatgcgcg

SEQ ID NO: 203454 - DNA, 3690 bp, Zea Mays
accaaaattaaagacggcaactctgcctgcacagcattgaccgccgccttcgctcctccacctccccgctcgctctcctgcctccgcgcgggccgcggatcccttcactcgccacagcaagcgctagaagagggaatggagcccggcctcgcatcccgcgtcgcccgttcagccgctcagccgctttccggctgcctgtcgcggcactcgctctcgccgtggctcaagatccagaaccacatttatcctatgccaagtctctgtcacaaggttcctagcacgggaaaatgccacgcttctatgacaacaagttacatggaaacatcagatgtcactgatttggactgggaaaaccttggctttggcctcatcgagactgactttatgtatgttgcaaaatgtggaactgatggaatcttttccaaaggtgaagtcctaccatttggtcctatagcactgagtccttcagctggagtcttaaattatgggcagggattgtttgaaggcctaaaagcatataggaaaactgatgggtccatccttctatttcgtccagaggagaatgctataaggatgctaagcggtgcagagaggatgtgtatgcctgctccaactgttgagcaattcgttgatgctgttaaacaaactgttttggcaaataaaagatgggtgcctcctactggtaaaggttccctatatatcaggccactcctaataggaagcggtgcagttcttggtcttgcgcctgctcctgagtatagctttatcatttttgtatcccctgttgggaattatttcaaggaaggtttatctcctattaatttgatcgttgaggataaatttcaccgtgccagccctggtggaactggaggtgtgaaaaccattggaaactatgcctcggtactgaaagcacaaaagattgcaaaggggaaaggatattctgatgtcctttatttggatgctgttcatgacaaatatctcgaagaagtctcttcctgcaatatttttgttgtgaaagacaatgttatttctacgcctgccattaaaggaacaatacttcctggtataacgaggaaaagtatcattgaagttgctcagagcaaaggtttcaaggttgaggagcgtctggtgtgtgtagatgagttgattaacgctgatgaagttttctgcacggggactgctgttgtggtgtcacctgtggggagtgttacatatatggggaaaagggtggaatatggcaaccaaggagtcggtgtcgtgtctcagcaactatacaagtcacttacaagcctccagatgggcaatgtggaggactggatgggagacaattcacgtgatgatttaaacagagaaacaaatcggtccaggtgtcagtgtcactggcacagtgggtggtatggtacccagggaaaggcaagtgcgtcgtaccctgtacacgcaggctggcacagtgggtggtatggtaattggtacccagggaaagtctctcccagttccaggctccagcagtcactcagagccagaggagagaattcaaattcgcagcgcagcgccctcattttgtcattacgttgctctgctcctggctcacctcaccagcgatcactaccggagcaggccatgaagcttaagatcaacaaggcatgcgacctcggctccatctccgtcctccctccccgtaggaccggtgggagcggcggcgcaggaggggcgggttcctccgccgcgcccgtggcggcggggtcgcagcagaggtcgcagccgatgtcgcagcactccttctcgcagggcgttgtggggagcggcggcgcgtcgtcgctcctgcactcgcagtcgcagctctcgcaggcctccctcgacgagaatctcctcaccctccacctcgcctcgcccgctcgcgatcagagattcgggttccatgacgacttatcaaagaagatgacatcgttgcctgtcagctcggcttcttgtgtgcgagaagaatctcagctgcaactggcaaaaacatcaagcaaccctgtccatcgatggaacccttctcttcctgacggtagaagtgtgggtcctactgaggatgttgagcgcaaatttcagcatatggcaagttcagtgcataaggtagggatggtgcttgattcagtgcaaaccgacgttatgcagctaaacagagccatgaaggaagccacactagattctggaagcatacagcaaaagattgttctcctagacgctttgctgcagaaaaatcttaagggacaagatgatctcaaagctcttgttgagagcaacaccaaaagcatctccgatcagctgactgttctgaactcctactccaacaaactggatgagatatcctcaaccctttcaatcttgccaaaacaaatagaaacaaatttgaagcaacagcagagtgacaccttccgaatttttagaaaagacatggaggagattgttagagctgttagatctctcaacaataagattgatgcaatccaaatgccaacagaccagagctgcacaaccaatggaaggcccctgatgaaccaactgccagtcgatagaaatgaaaggccccaggtgaaccaaacaccagaggtaacccgggtgagccaaacaccggtagcaaccatggcgaaccaaagaccagtagcaaaaggaaggcacctggtgagccaaacaccagcagcaaatgggaaacctctgacgaaccaaacatcagtagcaaatggaagatccctgatgagccaagtaccagcagcaaatgggaaacctctgacgaaccaaatagcagtgccaaagggaagacccatgatgaggcagaaaacagcagaaggaggaaggccccagatgaaccaaatacctgtagcagatggatggccccatacaaacaaaatacacgcgccggaagtgcggcatcccgtacctttggtgtgccctgcagcaggcccgaggccgaaggtagaggagggaaagctgagagcggttccccaaaagctaactggttgtagatccagggtgacacctaaacaggaagaggcggcgacgaatacaaaggtcgtcgtcggccgggcagcggcaactgagaaggtggtgatattcatcgacgacgactccgacgatggcggcagcgaggcccttgcttcctgcgtgatcctgaggccggcgcccctggggtcaggtgcaggtgagtgcgacctggtgaaggtgggcgcggaggagagccaggagatcctgaggagggccaggaagcggaggagaagagaaatgcaggccattgtggcctgcatgccgcctgagcttgggtactagtagctagctacttctcatatcaatatatcatggatggatggatgcagttcctaatcgagaaaaagggatagttagttgtgtggttttgttgttgcgatggaatgaatcgagcagcatggatggattggttgattattatatcatctataataggggtaaggtgattgtgggtggtggtggatctggcaatctgctgggctggcaaaaaattagtgggaaaaagtgggcctgcactgcatttgcctgacaccgcacgtacggtactcatgatccatcgcaatcgtggtgttttgtttagctgaataataacaacggtggtgttttaattagctgagtagcagctgggagttggtaaccaatccgaggttacacagatgcgcg

SEQ ID NO: 203455 - DNA, 3959 bp, Zea Mays
accaaaattaaagacggcaactctgcctgcacagcattgaccgccgccttcgctcctccacctccccgctcgctctcctgcctccgcgcgggccgcggatcccttcactcgccacagcaagcgctagaagagggaatggagcccggcctcgcatcccgcgtcgcccgttcagccgctcagccgctttccggctgcctgtcgcggcactcgctctcgccgtggctcaagatccagaaccacatttatcctatgccaagtctctgtcacaaggttcctagcacgggaaaatgccacgcttctatgacaacaagttacatcagggaaacatcagatgtcactgatttggactgggaaaaccttggctttggcctcatcgagactgactttatgtatgttgcaaaatgtggaactgatggaatcttttccaaaggtgaagtcctaccatttggtcctatagcactgagtccttcagctggagtcttaaattatgggcagggattgtttgaaggcctaaaagcatataggaaaactgatgggtccatccttctatttcgtccagaggagaatgctataaggatgctaagcggtgcagagaggatgtgtatgcctgctccaactgttgagcaattcgttgatgctgttaaacaaactgttttggcaaataaaagatgggtgcctcctactggtaaaggttccctatatatcaggccactcctaataggaagcggtgcagttcttggtcttgcgcctgctcctgagtatagctttatcatttttgtatcccctgttgggaattatttcaaggtccgtattgcgtttccttttacttcaaattccaccaaaatttgtaggcactagtcactcatccaaaatgtaaactggagtactgggcttagagcaaatcgttacaacctgtgttctttcctgctcagtggacagtgatacaggatagcttaatggtaatagtgtataatatgaactcgtccttacacgcatctaaaatagtttgtttcaacaatgccggtatatatgttgtttgccactttgcctttgttcattttattctacaggaaggtttatctcctattaatttgatcgttgaggataaatttcaccgtgccagccctggtggaactggaggtgtgaaaaccattggaaactatgcctcggtactgaaagcacaaaagattgcaaaggggaaaggatattctgatgtcctttatttggatgctgttcatgacaaatatctcgaagaagtctcttcctgcaatatttttgttgtgaaagacaatgttatttctacgcctgccattaaaggaacaatacttcctggtataacgaggaaaagtatcattgaagttgctcagagcaaaggtttcaaggttgaggagcgtctggtgtgtgtagatgagttgattaacgctgatgaagttttctgcacggggactgctgttgtggtgtcacctgtggggagtgttacatatatggggaaaagggtggaatatggcaaccaaggagtcggtgtcgtgtctcagcaactatacaagtcacttacaagcctccagatgggcaatgtggaggactggatgggagacaattcacgtgatgatttaaacagagaaacaaatcggtccaggtgtcagtgtcactggcacagtgggtggtatggtacccagggaaaggcaagtgcgtcgtaccctgtacacgcaggctggcacagtgggtggtatggtaattggtacccagggaaagtctctcccagttccaggctccagcagtcactcagagccagaggagagaattcaaattcgcagcgcagcgccctcattttgtcattacgttgctctgctcctggctcacctcaccagcgatcactaccggagcaggccatgaagcttaagatcaacaaggcatgcgacctcggctccatctccgtcctccctccccgtaggaccggtgggagcggcggcgcaggaggggcgggttcctccgccgcgcccgtggcggcggggtcgcagcagaggtcgcagccgatgtcgcagcactccttctcgcagggcgttgtggggagcggcggcgcgtcgtcgctcctgcactcgcagtcgcagctctcgcaggcctccctcgacgagaatctcctcaccctccacctcgcctcgcccgctcgcgatcagagattcgggttccatgacgacttatcaaagaagatgacatcgttgcctgtcagctcggcttcttgtgtgcgagaagaatctcagctgcaactggcaaaaacatcaagcaaccctgtccatcgatggaacccttctcttcctgacggtagaagtgtgggtcctactgaggatgttgagcgcaaatttcagcatatggcaagttcagtgcataaggtagggatggtgcttgattcagtgcaaaccgacgttatgcagctaaacagagccatgaaggaagccacactagattctggaagcatacagcaaaagattgttctcctagacgctttgctgcagaaaaatcttaagggacaagatgatctcaaagctcttgttgagagcaacaccaaaagcatctccgatcagctgactgttctgaactcctactccaacaaactggatgagatatcctcaaccctttcaatcttgccaaaacaaatagaaacaaatttgaagcaacagcagagtgacaccttccgaatttttagaaaagacatggaggagattgttagagctgttagatctctcaacaataagattgatgcaatccaaatgccaacagaccagagctgcacaaccaatggaaggcccctgatgaaccaactgccagtcgatagaaatgaaaggccccaggtgaaccaaacaccagaggtaacccgggtgagccaaacaccggtagcaaccatggcgaaccaaagaccagtagcaaaaggaaggcacctggtgagccaaacaccagcagcaaatgggaaacctctgacgaaccaaacatcagtagcaaatggaagatccctgatgagccaagtaccagcagcaaatgggaaacctctgacgaaccaaatagcagtgccaaagggaagacccatgatgaggcagaaaacagcagaaggaggaaggccccagatgaaccaaatacctgtagcagatggatggccccatacaaacaaaatacacgcgccggaagtgcggcatcccgtacctttggtgtgccctgcagcaggcccgaggccgaaggtagaggagggaaagctgagagcggttccccaaaagctaactggttgtagatccagggtgacacctaaacaggaagaggcggcgacgaatacaaaggtcgtcgtcggccgggcagcggcaactgagaaggtggtgatattcatcgacgacgactccgacgatggcggcagcgaggcccttgcttcctgcgtgatcctgaggccggcgcccctggggtcaggtgcaggtgagtgcgacctggtgaaggtgggcgcggaggagagccaggagatcctgaggagggccaggaagcggaggagaagagaaatgcaggccattgtggcctgcatgccgcctgagcttgggtactagtagctagctacttctcatatcaatatatcatggatggatggatgcagttcctaatcgagaaaaagggatagttagttgtgtggttttgttgttgcgatggaatgaatcgagcagcatggatggattggttgattattatatcatctataataggggtaaggtgattgtgggtggtggtggatctggcaatctgctgggctggcaaaaaattagtgggaaaaagtgggcctgcactgcatttgcctgacaccgcacgtacggtactcatgatccatcgcaatcgtggtgttttgtttagctgaataataacaacggtggtgttttaattagctgagtagcagctgggagttggtaaccaatccgaggttacacagatgcgcg

SEQ ID NO: 203456 - DNA, 646 bp, Zea Mays
atgggccgatggttgggaaaacggttgtggcagattggggaccagcggccacgtggggtggggcctttggcagtagcgcgggtcaaaggaagggccgcgacagcggcacaggttggagaggaggccgctacgctggctagacgggaggcggtggtgctggtgaggccggccgcaccaagcgttgcaccgacgacgagtctgaagccaacaggagcacgagcgttggggatgtggctgtcgttcgtggtggagggaggggtggaatatggcaaccaaggagtcggtgtcgtgtctcagcaactatacaagtcacttacaagcctccagatgggcaatgtggaggactggatgggttggaccatgcaacttaatcagtagcggatcacagatattgccttggcagatcccagattattacagctactgggtgcgatagggttttttttggcagatccatcttgagcatatttgactgtacctgtttcccttgagactaagacgaaagtgatcttactgatcttttgtttcaaatctgtaacgataaaataaaatgtggtttgcaccttgccatgtactgtaagaatggacccaaaaaaaaattcatgctgctgttgcttgatatctgaaactgtttatttgctgcagc

SEQ ID NO: 203457 - DNA, 1707 bp, Zea Mays
ttagctggatgtttgggccaaggaaagagaagttgcaggactaaaggcaagcttgagtacacttacatctgaggtacaacgtttgtataagttatgtgctgagtggaaggaagcagaagattcactgaagaagaaatggaagaaaatcgaagaatttgacgcccgtcgaacagagctggagtgcatttacagtgctcttcagcgggctaatatggatgcatcatcattttgggagcaacaaccattatcagctagaggatatgcatcaagtacaattatccctgcgtgccatactgtggtagacatgtctacgaactcaagggacctcatagagcgagaattagctgcatttagccagagcttggataatagcttgtgcaggttgccagcaaccccgcaggcccttttggaggccgtgggttctaacggcatgacaggatcagaagcacttgcagctgcagagaaacatgcagctctgttaactgcaagagctggtgctagagatccatctgctgtgccatctatatgccgcatctctgctgctcttcagtataattttggtacagaaggcacagattttggcttggcttcagtattaaattcactggagttctgtctaaagccttgtgggtctgaagctagcatattagaggatttatcaaaatctatcaacttcgtgcacacacggagaaatcttgttgaaaatgaccgtgttttgctgaaccgtgcacatcgtgctcaacaagaatatgaaagagtggccaactattgtcttaaattagctggcgaacaagaaaagctggtgagtgaaagatggcttccggagctgagaaatgcagttcaagaagctcggaggtgttttgatgactgccagcgtgttaggggcttggttgatgagtggtacgagcagccagcagccacaattgtcgattgggtaacgatagatggacagagcgtgggtgcctggatcaacctcgtgaagcaactccacatggagatctccagacggacgctggcaatgtcatctgtaggagacgactgaagcaaccagctgtgacccagctgtggctttggatgttcggaggctccgtgtgatgggttcggtttggcaccaagatatcttctatctactcgatagccttttcccattgtagtttatacgcctctctctggtttggtttgtaattagtttttttgtatggtgtcaattgccatgtgttgaatttgtcatttgtcacaaattatcggtgttggtgttgtggctttgctgattgggctgcacgtcccgacgtgccgtcctgctgttagttgtacagggtcgcgcctcacctttgagtgttcaagcagtccgtgaattatctcagttatataatgactgcacgtaatgctaagggtagctgtgatggtgggttttagcaccattatgggcgctactatagagaataaaagttttagcagtgattcaggtggaggcagtaaggttgtcgcttccacccaaaaaatgggaaggagcccattcactggcacaagtgtgacatcactatctttgctcatctaaagcttgtattttattcacgatcaagtttatagagataaacacattcaagtgtaggagtaactgttggtggatataacagtgctgcattctattgatctattctataaacgtaaataatagatgaaggcaaatggttgccctttttattt

SEQ ID NO: 203458 - DNA, 831 bp, Zea Mays
ccgcgcgcgcccgccgctacctgccagccgcacgcccgccgccagcgccccgccgcaaccccgcgcgccggctcgagtacttcgctgtccgctcccattcaactccggcccagctgcgtgctgctccggcaccggcaggcggataagcccagcaggcaagcaggcaggagactaggagaggaggagagctcagcactgcacgcgcgctcccctccccttgttggccaaatcgatcggtccccttcaggcttaaggcttcggagcttgctttacttcaggtgtattttcaggggatgttgcttgagcccaaatggatgacagcagaagtgtgatctgacgtgcgctcagcttcaccaacacactgattcttgaatgcattaagcatagtgcacaagcagttattcatgataagaaatcttttgctcaaatacatagaaggtgctctcaaagacatcgaaggtcttcctttaccgtttcgtcatctgcaatgtgcttatagtatgagagttgcctgctaattcctctaaatatagcattagttcagcttgtagcttcatattacatcaggtaatggatggcatcagaactattctctgtaatgatggtataagagctcacttgctaattcttctgaacattccctgggttcagcttgtaactttagttagatcaatggatatcatctaaactattcttttctttttttcttttgaaacagggcatatctacttagtacctgcatttttttgttgcttgttgatgatactaatactgtctgatataactagttgctttttctctctttggtaagaatctgcaattaaatttgac

SEQ ID NO: 203459 - DNA, 1249 bp, Zea Mays
ccgcgcgcgcccgccgctacctgccagccgcacgcccgccgccagcgccccgccgcaaccccgcgcgccggctcgagtacttcgctgtccgctcccattcaactccggcccagctgcgtgctgctccggcaccggcaggcggataagcccagcaggcaagcaggcaggagactaggagaggaggagagctcagcactgcacgcgcgctcccctccccttgttggccaaatcgatcggtccccttcaggcttaaggcttcggagcttgctttacttcagttggcaggtgtattttcaggggatgttgcttgagcccaaatggatgacagcagaagtgtgatctgacgtgcgctcagcttcaccaacacactgattcttgaatgcattaagcatagtgcacaagcagttattcatgataagaaatcttttgctcaaatgtagctaattagcacttcatacattctggatagaatcgattataccatttcgtcatctgacttgtttgaagaactttggtcttcctttacagacatagaaggtgctctcaaagacatcgaaggtcttcctttaccgtttcgtcatctgcaatgtgcttatagtatgagagttgcctgctaattcctctaaatatagcattagttcagcttgtagcttcatattacatcaggtaatggatggcatcagaactattctctgtaatgatggtataagagctcacttgctaattcttctgaacattccctgggttcagcttgtaactttagttagatcaatggatatcatctaaactattcttttctttttttcttttgaaacagggcatatctacttagtacctgcatttttttgttgcttgttgatgatactaatactgtctgatataactagttgctttttctctctttggtaagaatctgcaattaaatttgacatccattggttatatattttttccttgttcagttaccacacatgttgccatctgaaaaggcattttcagctgttgtatctgctcttggcatctacaacaaagacgggatagtagtttatgatggaaaggggctgttcagtgatgctcgtgtttggtggttctgagatttatcaggaaacattggtaaaggcacttgctaaacattttggtgctagacttcttgtcttggattcacttttgctaccttgggaagagagtggctcttcactcccatcggattaacaaaaaagaggaaggataaggacgcaaagaagacgaa

SEQ ID NO: 203460 - DNA, 1130 bp, Zea Mays
ccgcgcgcgcccgccgctacctgccagccgcacgcccgccgccagcgccccgccgcaaccccgcgcgccggctcgagtacttcgctgtccgctcccattcaactccggcccagctgcgtgctgctccggcaccggcaggcggataagcccagcaggcaagcaggcaggagactaggagaggaggagagctcagcactgcacgcgcgctcccctccccttgttggccaaatcgatcggtccccttcaggcttaaggcttcggagcttgctttacttcagttggcaggtgtattttcaggggatgttgcttgagcccaaatggatgacagcagaagtgtgatctgacacatagaaggtgctctcaaagacatcgaaggtcttcctttaccgtttcgtcatctgcaatgtgcttatagtatgagagttgcctgctaattcctctaaatatagcattagttcagcttgtagcttcatattacatcaggtaatggatggcatcagaactattctctgtaatgatggtataagagctcacttgctaattcttctgaacattccctgggttcagcttgtaactttagttagatcaatggatatcatctaaactattcttttctttttttcttttgaaacagggcatatctacttagtacctgcatttttttgttgcttgttgatgatactaatactgtctgatataactagttgctttttctctctttggtaagaatctgcaattaaatttgacatccattggttatatattttttccttgttcagttaccacacatgttgccatctgaaaaggcattttcagctgttgtatctgctcttggcatctacaacaaagacgggatagtagtttatgatggaaaggggctgttcagtgatgctcgtgtttggtggtaagcttttttattcacaaaaatatgtaaaagaaggagttcatcaagcagtttgctgagatttcatcaataaaccaacgaattttgttatccggtccagcaggttctgagatttatcaggaaacattggtaaaggcacttgctaaacattttggtgctagacttcttgtcttggattcacttttgctaccttggagaggaaggataaggacgcaaagaagacgaa

SEQ ID NO: 203461 - DNA, 3036 bp, Zea Mays
gtcaagagtgccatgatgttctcggagtttgttgaaggcttggcaggcgtgcagaatctatggtgttgcccttggaattcttgcagcaattcaaggcatcagattttctctgatcctcaagagtatgaggcatggcggagtaggaatctgaagcttcttgaggctggtctacttgttcatccactcgttccattgaacaaatcagacagttctgtgcaacggttgcggcaaattatacggggtgcatatgataggccacttgaaactgggaaaaactctgagtcaatgcagggtctacgtacttgtgtcatgtcccttgctggaagatctcatgatggtacttctgatggatgccactgggcagatggcttcccattgaatctccatctgtaccaaacgttggtagaagcttgctttgataatgatgagggcactgtggttgatgagatcgatgaggtgatggagctcttgaagaaaacctgggttattcttggaattaatgagttgctccacaatctttgctttacttgggcattgttcaaccattttgttatgtctggtcaagtagatatcgagctactttctgcagcagagaaccagttagctgaagtggctaaggatgcgaaaaccacaaaagatccaaattactgtaaagtattgagctcaacattaagctcaataatgggctggacagagaaaagacttctggcatatcatgaaaccttcaatacaagtaatattgagtctatgcaaggcattgtctccattggagtgtcagctgcaagggttcttgttgaagatatatcccatgaataccgccgtagaagaaaagaagagactgatgtagctcgaagcagggtagagacatacataaggtcttcactacggacagcttttgctcaaagaatggaagaagcagattcaaaacgatcatcaagaaaccctactccagttctttctatccttgcgaaggacattagtgacctagctacgaaggagaaaaaattgtacagtccaatactgaagacatggcatcctcttgcttctggtgttgctgttgcaacccttcattcttgttatggaaatgagctgaagcagtttgtagctgggcttacagagctgacccctgatacagttgaagtacttaaatcagcagacaaattagagaaggaccttgttaatatagctgtagaagattctgtggatagtgatgatggaggcaagtcactaatcagagagatgccgccatatgaagctgaaaatgcaattgctaatctggtgaaagtgtggataaaagaaagagtagacagactaaagggatgggttgaccggaatttgaagcaagagacctggaatccaggtgccaacagggataattttgctccctcttccgtggagatgcttcgagttattggtgaaacgttggatgcatttttccaattgcctataccaatgcatccggctcttcttcctgatctgacagttgggctcgacagaagcctacagctttatgttgctaaagcaaaatctggctgcggagcacgaaattcttttatgccccaactacccccactaacgcgatgcgaggttggctccaagttattattcaagaaaaaggagaagccacaaaatctgcaggttcgtgtatcacaaaatggagcatcaaacggaaatgatcccttgggccttcctcaactctgtgtgcgcctgaatactcttcagtacatccgtggtgagtttgagaatctagagaagaaaattaaaacgagcttacgaaatgttgagtcagctcaggcagatatcactgatggattgaacatcaagtttgagctttgccaggcagcctgtcaagaaggcattcagcagatttgtgagacgactgcatataaggtgatgttttatgacttgggacatgtcctctgggacaccctttatgttggtgatactgcatcaaacagggttgaggtactgttgagggaacttgaccctgtccttgagacggtatctagtatggtgcacaacaaagtgcggaaccgtgctattactgcactgatgaaagcaacttttgatggtttcttgctggtgcttcttgctggtgggcctttgcgtactttcacccgtcaagactctcagataatagaagatgacttcagggccctcagagatctgtacttagcagatggggatggtttgccagaggaattagttgacaaggcatcctcccaggtcaagaatgtcctgcccctctttcgagcagactctgaaagtctcattgagcgattcaaacgcatgatggttgaatcgaatcggcctgcgtccaagaacaggttaccattgcctccaacaacagggcattggagtccaaatgagcctaacacagtcctgcgagttctgtgctaccggaatgatgagacagctacaaagttcctcaagaaaacttacaacctaccgaagaagatttgacttgtgggatagatcacaaaccatatgtacatgttcctgtcactacaaaaaggtttctctatgcctgtcacattctctggctgaggaccccgaggaaataccccctgtaaagtttccacatcaaaggtttcaagtgatcatcagcaagaaggtttattctgtggtgctgtagagatgtgactgggtgttttcggtggttcgtgtcattgataggttttgcggtgaagggtggatttacttacagctcgatttgttcattatattatatgtttgcctaatccagttcttttgctgaccttgcgctcgtgtaatttggttcattctagtctgcaacagctaaatccagcgtgtgaataagttgtgtactcgcgtgacactgtccggtgcttttgctgtgacaatatgcggggagcatttgtatattttactgcatcgtgcactccatctctctccatatcctcgttggatccgttcttcagtcaatcgatcctgttcaaagtgagaataatacgtggtcgagatgatgaaatgagtgattgttaacacatggttgagattagggatgaaagtggt

SEQ ID NO: 203462 - DNA, 3715 bp, Zea Mays
ctctttgcaatttaacccgcgacatgccatctccctctctatcccacgctgcctcgctggagttgggagggggtttccctctctctctcctcctcatccccctctttctccactagagagccgggacctagcacgagagggagggagggagagagtcacgccgggaggtcaccgtcgccgccgacggccgcgatggctcgcctgttccgcgagtcccgccgcgactcgtcccccttctcctcctcctccaatggcttcctcccgccggcgtccgcttccagcccctcggtctccgcgctcccctcgccgttcccggacctcggggtcgccctctccaccgcggacctccgggaggccgcctacgaggtgctggtcgcggcctcccgcaccacgggcgggaagcccctcacctatatcccccagtcctcgtcggtggccgcgggggccacggcgtccccggcctcctccgcgtcctcggcatcctccgcctcgctccagcgctccctcacctctgccgccgccagcaagatgaagaaggcgctcgggctccgctcgtccgcctcctccaagggtgtcggcagccccgggagtggcgggaaggcggcgcccccgcgtaggcccgccacgtttggggagctcatgcgggtgcagatgcgcatctccgagcccaccgacgccaggatccgcaggggcctcctccgcatcgctgccagccagcttggcaggcgtgcagaatctatggtgttgcccttggaattcttgcagcaattcaaggcatcagattttctctgatcctcaagagtatgaggcatggcggagtaggaatctgaagcttcttgaggctggtctacttgttcatccactcgttccattgaacaaatcagacagttctgtgcaacggttgcggcaaattatacggggtgcatatgataggccacttgaaactgggaaaaactctgagtcaatgcagggtctacgtacttgtgtcatgtcccttgctggaagatctcatgatggtacttctgatggatgccactgggcagatggcttcccattgaatctccatctgtaccaaacgttggtagaagcttgctttgataatgatgagggcactgtggttgatgagatcgatgaggtgatggagctcttgaagaaaacctgggttattcttggaattaatgagttgctccacaatctttgctttacttgggcattgttcaaccattttgttatgtctggtcaagtagatatcgagctactttctgcagcagagaaccagttagctgaagtggctaaggatgcgaaaaccacaaaagatccaaattactgtaaagtattgagctcaacattaagctcaataatgggctggacagagaaaagacttctggcatatcatgaaaccttcaatacaagtaatattgagtctatgcaaggcattgtctccattggagtgtcagctgcaagggttcttgttgaagatatatcccatgaataccgccgtagaagaaaagaagagactgatgtagctcgaagcagggtagagacatacataaggtcttcactacggacagcttttgctcaaagaatggaagaagcagattcaaaacgatcatcaagaaaccctactccagttctttctatccttgcgaaggacattagtgacctagctacgaaggagaaaaaattgtacagtccaatactgaagacatggcatcctcttgcttctggtgttgctgttgcaacccttcattcttgttatggaaatgagctgaagcagtttgtagctgggcttacagagctgacccctgatacagttgaagtacttaaatcagcagacaaattagagaaggaccttgttaatatagctgtagaagattctgtggatagtgatgatggaggcaagtcactaatcagagagatgccgccatatgaagctgaaaatgcaattgctaatctggtgaaagtgtggataaaagaaagagtagacagactaaagggatgggttgaccggaatttgaagcaagagacctggaatccaggtgccaacagggataattttgctccctcttccgtggagatgcttcgagttattggtgaaacgttggatgcatttttccaattgcctataccaatgcatccggctcttcttcctgatctgacagttgggctcgacagaagcctacagctttatgttgctaaagcaaaatctggctgcggagcacgaaattcttttatgccccaactacccccactaacgcgatgcgaggttggctccaagttattattcaagaaaaaggagaagccacaaaatctgcaggttcgtgtatcacaaaatggagcatcaaacggaaatgatcccttgggccttcctcaactctgtgtgcgcctgaatactcttcagtacatccgtggtgagtttgagaatctagagaagaaaattaaaacgagcttacgaaatgttgagtcagctcaggcagatatcactgatggattgaacatcaagtttgagctttgccaggcagcctgtcaagaaggcattcagcagatttgtgagacgactgcatataaggtgatgttttatgacttgggacatgtcctctgggacaccctttatgttggtgatactgcatcaaacagggttgaggtactgttgagggaacttgaccctgtccttgagacggtatctagtatggtgcacaacaaagtgcggaaccgtgctattactgcactgatgaaagcaacttttgatggtttcttgctggtgcttcttgctggtgggcctttgcgtactttcacccgtcaagactctcagataatagaagatgacttcagggccctcagagatctgtacttagcagatggggatggtttgccagaggaattagttgacaaggcatcctcccaggtcaagaatgtcctgcccctctttcgagcagactctgaaagtctcattgagcgattcaaacgcatgatggttgaatcgaatcggcctgcgtccaagaacaggttaccattgcctccaacaacagggcattggagtccaaatgagcctaacacagtcctgcgagttctgtgctaccggaatgatgagacagctacaaagttcctcaagaaaacttacaacctaccgaagaagatttgacttgtgggatagatcacaaaccatatgtacatgttcctgtcactacaaaaaggtttctctatgcctgtcacattctctggctgaggaccccgaggaaataccccctgtaaagtttccacatcaaaggtttcaagtgatcatcagcaagaaggtttattctgtggtgctgtagagatgtgactgggtgttttcggtggttcgtgtcattgataggttttgcggtgaagggtggatttacttacagctcgatttgttcattatattatatgtttgcctaatccagttcttttgctgaccttgcgctcgtgtaatttggttcattctagtctgcaacagctaaatccagcgtgtgaataagttgtgtactcgcgtgacactgtccggtgcttttgctgtgacaatatgcggggagcatttgtatattttactgcatcgtgcactccatctctctccatatcctcgttggatccgttcttcagtcaatcgatcctgttcaaagtgagaataatacgtggtcgagatgatgaaatgagtgattgttaacacatggttgagattagggatgaaagtggt

SEQ ID NO: 203463 - DNA, 1314 bp, Zea Mays
aacgacaccaaaggttcccggtgccgtccaccgaccaccggtgacacggcgcccatagcaagagttcaggaggagcgcggagccgttgctggtggtagcggtgtccgtgaggcgcggcgagatgtctgtgcggataaaggcggtggtggacaggttcgtgatggagctcaaggaggcactggacgcggacatccaggaccgcgtcatgaaggagcgggagatgcagacctacatcgcggagcgcgagcgcgaggtcgccgagagggaggctgcgtggaaggccgagctctcccgccgcgagcgtctccgtgtgctccgcgcagaagagaaccctctccaagtgccaccaagagatgtagctttaaagggagctcaggccgctgttcaatacatggctgaatatgttgccaagaaagccacaaggtcacaaccgatgaagacaaagaagacctgggctcagttctgctttttctcccggcctaacaaaagaaagcacgaccgaatagacaccgcgtcgtgattcactgtgagactgatgaacattaagctgctgtttcctcaactctacacttctgaagagaactatcgggtgcatcgccttcgatcgctaccattgtgttgtatgggtcaacaagatgtgatgcccagaagcttttccttggacaatgctgcagcctgcagcttctaacctgtagaaccaagatggtcaggtttcaccgaacctactcactcttgtttccaccaggccaactcaactctgaatgaccgctggaagagtccaagtcttacttcagcttaagaatctagaagtggtttagtctctcggcctttttcgtatgatcgagagcagctgagaagagaactggaagattgctgaagttcggtttgccctgcagtgcaacttgtcaatattatacgtaatatacatgcatccggtgaaactaagaccttggttattactaggatttgctttcagagatcatttttatttctctatatttgagcgtatgttctttgaaacttctaagttagaactaaaatcctgcaagataccagatgtgctggattgaaaacgactgcagtcgaatcctttttgtgtggcttaatatttatttagtgcattctgagaagtttctgttgtaactagtgtactagaatctttctgaagagattcataaaacacagtattttgcatgtttttctctgataaattgtaacgtgggctattacaagcagctactcggagcatttcaggaaatttcttgttttctgtgtatttttgtatgaaaatggactgagtcgcgtggaattcat

SEQ ID NO: 203464 - DNA, 2652 bp, Zea Mays
ggaatcgagtctgaagcacagagccatcagagactgaccagagccgagaccaaggatcctgtctcctgtgcactccggcggccggaccacggcgagtccgggacgtagaagtcgccccgcccctccggatcgtgttgctcgggaaattgcttccgagtagttcccgacgccgcgggcctctaagccgctgcctccgacagtctcgtgagtccttgactcttgagaatcgagggaacgcatttacggacgcaagactggatctgaagaggcgctgacgaattggagggccgcgcaagcctggggatgggaaggctggtcgtcgcggcggcggtggccgtgtgggcgttcccgattgcggctttggtgaactccgtagtgccagagccctacatggatgagatcttccatatttcacaagcacagcagtattgccgtggagatttctggacatgggatcccatgatcaccacccctcctggcctgtattatgtttcactagcatatattgcttctttctttcctgttgcctggatgtttcgggtagcaaaaacatttgatgttctttgctccacagcagctctcagatcaactaatgttatcttggcaatggtctgcgctgttcttattcatgacctgcttttgtgcatccgaccaggaattggagaaaggaaggcaactgcctacgctattcttgtagcattgtatcctgttcactggttcttcacttttctttattacactgatgttgcatcattagctgcagttcttgcagtgtacctattctgcttgaagaaacagttctggatcagcacaatgtttggtgttttttcaatactttttcgtcagacaaatgtaatatggattatattttttgctgccaatggagctatcacatacgtaaaagacttgtatcccaaggataatgcttctcatgagaacagtgaaccaatacatcagtcaaaaaaagcttctgccagggataacaaaactagtgttcaaagcttgagaagacggcgaatcaatagtcccataaataaggtcattgtttgtgaatctgctaacccttacaacagtcttacagaggaagtgtgtgacatcagcttgaagttatggaactcaaagtgtgaaattttgattgcatttgcaccatttgtagttgtcatggcggcattcgtagcattcataatctggaatggtggtatagtactaggtgctaaggaagctcatgttgtttcgccacactttgcacagtttctgtactttggccttgtgtcagctgctgccctccttccatggcatttcactcccaaccgagtattggatctattccacttgtctggaaagaacaaaacctgtggttctctggcagtattaatgggtcttggtttaagctttgtcgctgtacattttttcaggtttattacctaggtgcttccttcatgacttttttttgtccaagcatgagaactgccacaatgacttcacactaaacctttagatgtttaccagtgatggctaaatgttttgttaaaaccataatgaagcgacaaggacagtagcaaagcagtttcaccaccttaatgcttcattttaagggcagagttagagttgtagtgcaatatatgccacaggaaccttgactctctttttttcttttagttagacaatgatgtttatcttctttatttgttcccaaattataatgaaccgatcatcttttgatgcagcattgcccatccgtatcttcttgctgacaatagacactataccttctatatttggaggaaggttatccaagtaaactggatgatgaagtacatgttgattccactttatgtgtactcatggctctcaatcatcaacatcttagggaaatcacagacaaggatttgggtgttatcatttgtgctgtcagttgcactggtccttgtacctgccccgctggttgaattcagatactacacaattccattcgtgatactggttcttcactctccatcaattggcaatggcaaattgcttgccatgggatcgctttatgcagccgttgacttgtctaccctggtgatgtttctgttccgaccattccgttgggaacatgagcctggaacacaaaggtttatgtggtagtttaggataaagcacgggaagttgggaatagagcaaaaccttcattgtaccgtcgttttggttcgaacttctaacaggacgattaagcatacatgtgtcaggcttatttggatccttgagtgaatttaatggtaggagtcaaaacaatagcgctgagtatcgtcattttctttttgccagcctttatgtattctaggcattctaatcaacgattgcacaagtcaaaaataggcagtggatacattgtttgatcacacggcttttaagggcaacagcaattatatggattgatattgaacaggaagtgcagtgttccttgcgatgagaggtggtgttgtgtgagctaatattcttgtattgttctccaaatcactgtcgtaattgaagaaatgtttgcaccgtcaacagaaactaactgggatcttgtgatggttttaacattagtttcgaatttgggttttggctgtatccaaattgagcatatttatcatgtttgtcgaatatgttggactggtttcttag

SEQ ID NO: 203465 - DNA, 1862 bp, Zea Mays
gtatcttgccatcctgaaggcagcattttggtgttttttcaatactttttcgtcagacaaatgtaatatggattatattttttgctgccaatggagctatcacatacgtaaaagacttgtatcccaaggataatgcttctcatgagaacagtgaaccaatacatcagtcaaaaaaagcttctgccagggataacaaaactagtgttcaaagcttgagaagacggcgaatcaatagtcccataaataaggtcattgtttgtgaatctgctaacccttacaacagtcttacagaggaagtgtgtgacatcagcttgaagttatggaactcaaagtgtgaaattttgattgcatttgcaccatttgtagttgtcatggcggcattcgtagcattcataatctggaatggtggtatagtactaggtgctaaggaagctcatgttgtttcgccacactttgcacagtttctgtactttggccttgtgtcagctgctgccctccttccatggcatttcactcccaaccgagtattggatctattccacttgtctggaaagaacaaaacctgtggttctctggcagtattaatgggtcttggtttaagctttgtcgctgtacattttttcaggtttattacctaggtgcttccttcatgacttttttttgtccaagcatgagaactgccacaatgacttcacactaaacctttagatgtttaccagtgatggctaaatgttttgttaaaaccataatgaagcgacaaggacagtagcaaagcagtttcaccaccttaatgcttcattttaagggcagagttagagttgtagtgcaatatatgccacaggaaccttgactctctttttttcttttagttagacaatgatgtttatcttctttatttgttcccaaattataatgaaccgatcatcttttgatgcagcattgcccatccgtatcttcttgctgacaatagacactataccttctatatttggaggaaggttatccaagtaaactggatgatgaagtacatgttgattccactttatgtgtactcatggctctcaatcatcaacatcttagggaaatcacagacaaggatttgggtgttatcatttgtgctgtcagttgcactggtccttgtacctgccccgctggttgaattcagatactacacaattccattcgtgatactggttcttcactctccatcaattggcaatggcaaattgcttgccatgggatcgctttatgcagccgttgacttgtctaccctggtgatgtttctgttccgaccattccgttgggaacatgagcctggaacacaaaggtttatgtggtagtttaggataaagcacgggaagttgggaatagagcaaaaccttcattgtaccgtcgttttggttcgaacttctaacaggacgattaagcatacatgtgtcaggcttatttggatccttgagtgaatttaatggtaggagtcaaaacaatagcgctgagtatcgtcattttctttttgccagcctttatgtattctaggcattctaatcaacgattgcacaagtcaaaaataggcagtggatacattgtttgatcacacggcttttaagggcaacagcaattatatggattgatattgaacaggaagtgcagtgttccttgcgatgagaggtggtgttgtgtgagctaatattcttgtattgttctccaaatcactgtcgtaattgaagaaatgtttgcaccgtcaacagaaactaactgggatcttgtgatggttttaacattagtttcgaatttgggttttggctgtatccaaattgagcatatttatcatgtttgtcgaatatgttggactggtttcttag

SEQ ID NO: 203466 - DNA, 1824 bp, Zea Mays
cttgccatcctgaaggcagcattttggtgttttttcaatactttttcgtcagacaaatgtaatatggattatattttttgctgccaatggagctatcacatacgtaaaagacttgtatcccaaggataatgcttctcatgagaacagtgaaccaatacatcagtcaaaaaaagcttctgccagggataacaaaactagtgttcaaagcttgagaagacggcgaatcaatagtcccataaataaggtcttacagaggaagtgtgtgacatcagcttgaagttatggaactcaaagtgtgaaattttgattgcatttgcaccatttgtagttgtcatggcggcattcgtagcattcataatctggaatggtggtatagtactaggtgctaaggaagctcatgttgtttcgccacactttgcacagtttctgtactttggccttgtgtcagctgctgccctccttccatggcatttcactcccaaccgagtattggatctattccacttgtctggaaagaacaaaacctgtggttctctggcagtattaatgggtcttggtttaagctttgtcgctgtacattttttcaggtttattacctaggtgcttccttcatgacttttttttgtccaagcatgagaactgccacaatgacttcacactaaacctttagatgtttaccagtgatggctaaatgttttgttaaaaccataatgaagcgacaaggacagtagcaaagcagtttcaccaccttaatgcttcattttaagggcagagttagagttgtagtgcaatatatgccacaggaaccttgactctctttttttcttttagttagacaatgatgtttatcttctttatttgttcccaaattataatgaaccgatcatcttttgatgcagcattgcccatccgtatcttcttgctgacaatagacactataccttctatatttggaggaaggttatccaagtaaactggatgatgaagtacatgttgattccactttatgtgtactcatggctctcaatcatcaacatcttagggaaatcacagacaaggatttgggtgttatcatttgtgctgtcagttgcactggtccttgtacctgccccgctggttgaattcagatactacacaattccattcgtgatactggttcttcactctccatcaattggcaatggcaaattgcttgccatgggatcgctttatgcagccgttgacttgtctaccctggtgatgtttctgttccgaccattccgttgggaacatgagcctggaacacaaaggtttatgtggtagtttaggataaagcacgggaagttgggaatagagcaaaaccttcattgtaccgtcgttttggttcgaacttctaacaggacgattaagcatacatgtgtcaggcttatttggatccttgagtgaatttaatggtaggagtcaaaacaatagcgctgagtatcgtcattttctttttgccagcctttatgtattctaggcattctaatcaacgattgcacaagtcaaaaataggcagtggatacattgtttgatcacacggcttttaagggcaacagcaattatatggattgatattgaacaggaagtgcagtgttccttgcgatgagaggtggtgttgtgtgagctaatattcttgtattgttctccaaatcactgtcgtaattgaagaaatgtttgcaccgtcaacagaaactaactgggatcttgtgatggttttaacattagtttcgaatttgggttttggctgtatccaaattgagcatatttatcatgtttgtcgaatatgttggactggtttcttag

SEQ ID NO: 203467 - DNA, 875 bp, Zea Mays
cgacaccaaaggttcccggtgccgtccaccgaccaccggtgacacggcgcccatagcaagagttcaggaggagcgcggagccgttgctggtggtagcggtgtccgtgaggcgcggcgagatgtctgtgcggataaaggcggtggtggacaggttcgtgatggagctcaaggaggcactggacgcggacatccaggaccgcgtcatgaaggagcgggagatgcagacctacatcgcggagcgcgagcgcgaggtcgccgagagggaggctgcgtggaaggccgagctctcccgccgcgagagtttctttcatgaattgatggcaatgcccttcattttcttctgatgctgaacaagcacattgcacaggagacttcctatccacccctatcccactctatttcaaactacactgcaaaacagtgttttacacggcgatatacaagctctgctaagccgtaagagttattccttgcctttcactctagttgtcaccgaaggcagcgaggggaataaagctggcgtgtttcagttccgtacagagtatagaaaccatagaaaggtgataggccgggtgaagataagaatatataagagttcccacttgtctgcaaagcacatgcactgattcctttgggtagtgctaacccatactacacaaaatgttacattaaatatccactggcttatatttcaaaatttgaatatccattttgacttcttaacacatgaacaatagtacaatatggatatgcaacttcttcatgacttgaggcaataagcaaattcgactgcaagactcaacctttgagcgtagatgcaagtcagccttaattatccgatggtcgatgatgccatttaaaagtgattagtgatg

SEQ ID NO: 203468 - DNA, 2266 bp, Zea Mays
tttggcttctgggagagacccacgacgctccattcccccacgaaatgagactccgcgcgcaaaagccccgtttctcgccgcgcgcgagaaaaccctaccttttcccgccacccgcgcgcatttagtcgagcacatagtccgcaccccacatcaccaccgccaccatcagaacctctacgcaccgggtatcgaacgcatctacgatggagggcgacgacttcacgccggagggcggcaagctccccgagttcaagctagatgcgagacaagcgcagggtttcatctccttcttcaagaagctgccgcaggatccccgggccgttcgtctcttcgatcgcagggattattacactgcccatggcgagaatgctacgtttatcgcaaggacatactaccacacaatgtctgccttacgtcaactaggtagcagctctgatggaatcttaagtgccagcgtgagcaaggctatgtttgagaccattgcccgcaacattttgttggaaaggactgactgtacattggaactctatgagggaagtgggtcaaattggaggttaacaaagtccggaacacctggaaatattggtagttttgaagacattctgtttgcaaacaatgacatggaagattcaccagtgattgttgctttgtttccagcgtgccgggaaagtcagctgtatgtagggcttagttttttggatatgaccaataggaagcttgggttggctgagtttcccgaagatagccgattcactaatgttgaatcagctcttgttgcattaggttgcaaggagtgtcttctcccagcagattgtgaaaaatccattgacctaaacccccttcaagacgtcattagtaactgtaatgttctgttgactgagaaaaagaaggctgacttcaaatccagggatctcgcacaagatcttggtagaataatcaggggttctgttgagcctgtacgtgatctactatctcagtttgactatgctcttggtccccttggagctcttttatcttatgccgagttgctagcagatgacactaactatggaaattacacaattgagaagtacaatttgaactgctacatgcgacttgattctgctgcagttcgagcattaaacattgcagaagggaaaactgatgtaaacaagaacttcagtttgtttggtttgatgaacagaacttgtactgttgggatgggaaaaagattgctgaacagatggctgaaacaacctctattagatgttaatgaaattaataaccgactagacatggttcaggcttttgtagaagacccagaacttcgtcagggactccggcaacaacttaaaaggatatcagatattgatcgtctaacacatagtctccgaaagaaatcagctaatctgcagcctgttgttaagctttatcagtcctgtagcagaatcccatacatcaagggcattcttcagcaatataatggccaattttcaacattgataaggtcaaagtttcttgaaccgttagaagaatggatggcaaagaatcgatttggtcggttttcttctcttgttgagacagctattgatcttgctcagctggagaatggagagtacagaatatctcctctatattcttctgacttgggtgtactaaaggatgagctttctgtggttgaaaaccacataaacaatctgcacgtggatacagctagtgatctggatctttctgttgataagcaactgaagctagaaaaaggatcccttggacatgtgttcagaatgtcaaagaaagaggaacagaaagtcaggaagaaactcactggcagctacttaatcatagaaactcgtaaagatggtgtaaagttcacaaattctaagctgaaaaatctaagtgatcaataccaggcattgtttggtgagtacacaagttgtcagaaaaaggtggttggtgatgtagtgagggtttcaggcacattctcagaggtatttgaaaattttgctgcagttctgtcggagttggatgttttacaaagttttgctgatttggcaactagttgcccagttccttatgttaggccagacatcactgcgtcggatgaaggagatattgttctactgggtagcagacatccttgtctagaggcacaagatggtgttaactttatacccaatgattgcactctggtgagagggaaaagttggtttcagatcatcactggaccaaacatgggaggaaaatccacatttataagacagatgatccaggcacccaaaatcacgat

SEQ ID NO: 203469 - DNA, 681 bp, Zea Mays
agactcctcaatcctcaacccgacgcggcggtgtgcccccctgcttttttttggcctctcctctccgttggcgacgcatacatccggcgagggagcggaagaagtcagtaaattctgtcgctccaatccggacgaggagatgccgcggatccctctgatcaagttccccaagcggaatctgaaagccccatccgcgccagtgccgtcgcaacccgcagatcagcacgcgaccctcatgtcccggttgggggctaaagcagaggcaccatcttctggagggattaaaaattaccgctttagttcagatgtgccttccccaccgtcgcatactgctgtaggaggtcaagcttcactccttcctaagcgtaaacctctgactgaagaagagattgaggctattatggaacatcaataagatcgcatacccggacttattgccttcgacctctgttattgaagtcatgttgatacagaattgggttttttttttctaattctctgcaagtcagttgtggagacattaatttccagtattctgcacatgtaactgaccaaatcgtgaacacattgaggtccttgaggaagaagtgttgatcatggaatgtttttgcatctgattattttgtattgatgtcttgaattcttgccacacctgaagatctgatgatcatgccttttgaa

SEQ ID NO: 203470 - DNA, 3333 bp, Zea Mays
atccccatgcccgcagcgcctcgcctcggctgctctacctctatcccgcgacccgcgagattggaatcgcggagccccgccgccctcctccaaaacggcatcgtctctgctcggggtcacctttcctccctctcacttcctcttcttcatttaggtgtgttagttaagcagaggaggtggctttgcttgttgctcgtgtttctgcgtggatgcgtccaggggtttagcaagtcgctggccatgacggtgctcttcgagatcagggacaagaccttcttcgccgtcgcgattctggctatgcgccatcctaggaaactcgtattggcaggctgtttaactgcactaagaaggctgtttaactacactaagagtcatgacagctctatcgacttatctaggttgggttgcaccaaatctgagctgtcatgacaaaaatcatgatgcaatacaagcagaatatgcttcctgaaagacaaagtaatcacaaagttgaggcagataaaatggttgagcaaaccaatcaatctgaagttagctttgtgaaggctgagcatctgaatggaagatgtctgcattgatgaaggagttcttcctgatcaaaagatttcatcagaaaagcaagtagaccaaaaagtgtctataagctttgattccagggaagagataagtgctgactctacaaaaactgcacatgagttgaaatcgaaaatagttgtcctacctgtcaagtgtgatactcatgacaatattgtggaacagaactcctcatgcaaaaagcgtgatcttgaagataacaatactacagatgtatctaccgagtctaatgatgagggattaaatcccaaacaattaccatttcatgaagttgcacaagattaccaggaggttgatagtgtcatttcggagagcaatgaaaatcaggaccgacttttcactggagatgcaacccatcaggtttcatcgaatgattgttatgaagctggaattagtatcgcgtcagaggccagtaatttatcattttaaaaactggcactacatcttgaaaaaaggataatttatcattttattacgttgtatacggactaataatttatcattatattataccgtatatctactaatattttatcattttattatgttgtatactgagtaatagttatatgtgctagaatttttactcttcgtagcatatgacaacgtttgacttctcttttagggacttgagaaatatgttatgacaaagctgtttaatcgggtattcgcatcagtcccagaagatgtgaagagtgatgaagaactttttgagaattaacttgtacgagaatgaaacatcatggctgactactggccagccactacattcgcgtattactcttccattgtgagtttttgctcttcactatccgatgcccaccaatctaagcagccaaggcatgcatacctaaccttctcgaggacaattcaggaggtttgcttttttcctccctgttttatactggcatactactatatacttcattgatttttttagcagggtaaaaaatataaagatagatttttagaaaataacaaatagttcataaaattatttcagctgatgaaccttttagagttcttttattatataatgccattaattgctaacagggtgcacgtcttctatttctaggtatggtgcataaaaaagtaggaaccacaatgagattgtgatgctgctcagggcacatgccttttgtgtgatgtctgaatgttcatagcccttgtgctcctcatccacccattttaagaatatgctcacgtctcatgattgtgtctttcttcagaatctcagctgttcctcatgtggagaacctccagaggctcacatgtattcctacactcaccgcaacgagaatctgattgttcttgtgaggcacttgctgcctaaatattgtttacctggtgaatcagaaggaaagatttggatgtggacttgatgcttaaggtgtgaacgtgaaagtggggtccccagatcatcacgaagggtgataatgtcagctgaagcacactacctttcatttgggaagttccttgaacttagtttttcaagccactcaaccgctagaaggctgccaatatgcgggcattcactcaatacggattgtctgcgctttttttgggttgggctccaaagttgcaatgttcccgtattcctcagtcgaaatttacaatgcctgcaaaccacagcctactcttgagattcacaaccccgatatgcacaaagatgccccaaggttgctgccctcgtgtttcgtgctctgattgttgagtcttcaatgagagctgattccagttatatagaggtgaacaagcttttgattatttcttttgttaatttggtgcaacatatagaggtgaacaagcttattaaaggaagatccttgtacaatcaagagttcatacaatagatgaaacgatattgtgattctctcaatggtggcttcatgagcaagcaatcattcaccttgttcactaaaatttcagactgtagctcagataaggctttgagcattccttgctacaatgcttccgagagaagggaaaccggcaaaggggaaaagagacgaatagaagggcattggtgccctctcacacacaggccaagtatacatccacatgccacaaggctgaagcttccacatgaacaagagaatggatcgtgatagctattgcaagatgatgcacaagtacataggatcagatgttacataacttgtgacacttccagtcataatttttgagccaatgacaatgcttcagaaaatggctgagctttgttaggtgttccattttagttatctgtctacttcctttaaactggttctggttatatgcgcgcgtatctattattatgtataagcattgttgctactggtccttatcgagaatcgcataaggagacaacttcatgggctaggaggcttaactgacggtttcgaccttgggatgaacatgctgttgggaggagacaaggaagatgatggcggttcaagcaagtcgcatggcaagagcggaaaccgaaagaagcacctgaagaacaacaagaggaagaggcattagccctggactcacactcctgtatcacttcaacatacttgagtgtgtgacatgtcagttattttacagatatgttagttttaccatagtattgttcgatgtgatcctagcatgcccgtgaatgctttggttccctatagagctgttgatgtcttacacaaatgtattacaaaacttttttcataacaatataacacacatttgtacataaattaccgtggtattatacgttcc

SEQ ID NO: 203471 - DNA, 833 bp, Zea Mays
ccgcagacgacacgagtcgtcgagtcgagtcgcaccacttttacgaaccactccgcgagtagccgagcaccccagcgctcaccgacctttctccaaaccgtcgtcgcgcccgccccgtgccgcccgccatggcgccgccggagccggagatgttcgacgtcgtcatattcggggcctcgggcttcaccggcaagtacgtcatccgcgaggccctcaagttcctcaacgcctcctcatccgcctccccgctccgctccctcgcggtcgccggccgcagcagggaccgcatcgcagccgcgctccgctgggccgcggccccggccccgccgcccgaggacgtgcccatcctcgtcgccgacacctccgacccggcctccctcgcggcgctcgcctctcgcgcccgcgtcgtgctctcctgcgcggggcccttccgcctccacggccacgccgtggcggcggcctgcgcggccgcgggcgccgactgcctcgacatctccggggagcccgagttcatggagcgcgtcgagtccgagctccacgagcccgccgccaggagcggctccctcatcatctccgcctgcgggttcgactctgtccccgccgagctcggcttcctgttccactccaggcagtgggagcccccgtccgcgccggccaccgtagaggcgtacgtgagcctgcagtcgaccaagaggatcgtcgggaacatcggcacctacgagtcagctgtgctcggagtggccaacgctggccagctgcaggcgctgcgccggtccagacccaggcgaccccggcccaataacagcctccgtactgtcacatgcaaatgatga

SEQ ID NO: 203472 - DNA, 2650 bp, Zea Mays
tttgaaccaaataaaatatcaaggaatgcattaaagttgaaaatacattgatcacacagccaaactccttgggatatttttaagttccacttcaattttccttgcagtagtctgttttctttgcaacaaaagtgaacatcattcctgacagtactctgttttctttgtatgttctgatataatattacatcattcctgaatttcagaattagataagcaaactttagcctttttcaatttcctgttttattatgttttaaaactccatgtagtcagtacagtaacaattcctgacttatgaaactttattcatcttaattttcgaaattctgttctggattcttgattgcctgatatattgctatatgctcatttgagataagtcagatgccatgttcactttgtagaaacctgcacaagttcctacaggtgtgtaacaaacaaaatgatggtttgtacctttatgagatatgatagtgagcatctgagcgggtggaacgagcctgcaacaaaccgagcttggctcagctcgcccatctgacgagcttgaaaaggcggctcgactcgctcctagcgtcggctcggtccgagcggagcgtgttgcgagcccgagccagctcgttgcgctcgagtttttttccagccgatagttgttcctttctataaattcaccttgttctttctcaacatgtatgtagaaatctatgttgtatttcttaagccaaattagcaaatattttgtcagtaggtgtaataagtccggtcgcacctacaccgatggccatacccaacgtgagtcaagccaagtccattcccctcccttgcttcctcaacttgttgtcttgtggtctgctatttgtctcagagaaggtggtgccatcatcatcagttgtgattatgaattatattctaccgataggcttagataatttttggaacacaacattgctccaaaaagtttttctgaagaaaaggtatcaatctgcagtttggtaagtgagtctgaatctgcagcaccaaggacttcaagaattagtctgaacctgcacttacagttccatgggtcttctcaattattaataatattatttttaatgaataattgaatatatattgagtctgtatcatagattcagtcgccttaacaccctttgctgttttcccacttaagttagttaatgagatgaatggatgtaaattacgtagtgaatgtatgataagtccaggctacatgttaaaagacacacttggctacttgagctctgtattgccatgaagaaatcttactgacgggtgctttcatctgctatttggatccgttgctgatggatcttataaaggttgcggagacaaaaacaaggagcatggaagaggaagtaatcaagctgcagaaatgcttacaggacaaggatgagcaactgtgttcatccacaagtagcacggaacagctacaggagaagcaggtgttgcatcagctaagttagctcggatgtagtgcatgtcattgctgaaagagctgaatgagaaggacagctcactcaaagaccatagacttcgagtgaacaatctaggtgagcagcttgatcttctccagaaggatgtacaagcaagggaggtcacacaaatgcaacttaaagatatagttataaggatcgagaccaacatcatggatgaagttgccaaagcttttgaaattgcgatgttgagagggggaatcggaatattgtctactcactggacgaacaaaaccaagaaccttgaatcacagttaaaaagcaccagagaactgatcaggagctgaagaagagggttctgaagcttgaattttgtctctggtcctgtcatcccctggtgtgttcgccaccgcacctaccgctgttactagctcccttgctcttctcttgctgcgactgggatatagcatcgtggatcttgaacctaggccagaatttaggcaggtctagaaccaccatgatgcctggaacatagtcctattttatctgacaactctttcttgtcctgattcttggcggggtttcggcatcttctgataggaccatgctaacaggatgctcaacttttacgctccaggaacccaaatgaaccttcaacttgcttattctgtgagatctgtgagcaagcgagttgtcctagaacagttggctcctcacaatgggtattcgacgctagccccatccctgccacagacttgggaaaggcacagtgatttttatggtgacatgaagacattcctctttaaattatatctttaagcatccatttttcgccctactggtgcatacaagaatttgcaatgggtatggtgcataaaaaagtaggaaccacaatgagattgtgatgctgcacatggcacatcaaggtgcgcaagatatgtaccgtagaaattatcgtaaagtgcacacagctgtatgtatagatgtttagaagtggccgaagttaggcttgctcaaccggggcaatgatttacttagcctgctgaaatgtactataggtagcattcaagtttgtgaccatcatgcaagtacatgtgggtttgttgaaattgagtggtcatcggagatgtagcaaaatgttccctatcgagagctcgtgtactatatttgttttatgaacttaatttttattacaa

SEQ ID NO: 203473 - DNA, 2053 bp, Zea Mays
agtggcacgggcgcggacactgccgctcgcgatatttgcgagagagagagagagagggcccgagagccgaggacgagtgaagtctggctggcgtgatgctgcttcggagcgcgtcctcgccgctgctcaactgcgggcgcgcgccggctgcggcggcgtcggtcgagcacctcgcggtggtttcgccgttgttgtcaccggcagtggcggcgcctaggcatgggccggtgctgtgccgcgccatgtccgagggggacctcgccgcgccgctcgtgcccaagaaggacgatggacacgggagggcgccgaggctgtccctgtccgcgtccttgtcctcgtccgcctccatcttcgtcgaggaggaggacggcgagggcgaggaggaggaggacctggtcgcggtcgcgggggccggcgtggacgtgccgctgccgctgcgtcggctgctgacgaacacggggctggacgtgtccgccgccgcggcgctggcgttcgtggagcagggcgtcgggggcagcggcgggggcgggaaggcgtgcggcagcagcggcggcaagggtgggatcggggacggcgacggtggcagcaaccgcgccgccacggacgcccactaccggcagatgatcgaggcggacccgggcaactcgctgctcctggtcaactacgccaggttcctcaaggaggtggccggggacgcggcaagggcgcaggagtactgcgagcgcgccatcctcgccagccccggcgacgccgaggcgctgtcgctctacgcgggcctcgtttgggagaccagccgcgacgctggccgcgccgaggactactacagccgcgccgtccaggccgcgcccgacgactgctacgtcctgggctcttacgccgggttcctgtgggacgccgaggaagacgaggaagagaactccgagcccttgccaccgccttcgctgttccagggggcagctcagcgtccttccatcacagcggcctcttagatgatcgtgaactcgatctagatctcaccaccgcctgtgaacgaagctgaatctggaaccctggagagtggagagtgactgggtgataaccgtgcagaaacccccgacgagtgactcacatcgccggcaggctcctcgccgcttgtgaactgaatcacggcacatgtaaaactgaatctggcagagcacacacgcgcctaagcctattagcgtctatagactttgcagggctatgtatagtagatatgtagattgagaccctgctgaacttgtacgtgcagtatgttcctagtcacttgtgtatcattactagtaatgcagtatccctcgtgaaataaacgtcaaaaccccttcctgctgcttcatccgagcagagcatcttccaagaagagcagatatcgaactgcaagaactgatgcactgaatcacaaagctttgcaaaatcgtgtacatatcttacttggacggcaacttaattgactggtagccctggagaataatatgaaattctgcctgtctgccaactacaaatacctggtatgtcaacagaaactaagataaagaatacacggtgtcacttgccactcttcaagctcctggtgctgagactaattctaatacataataccagccagcagtttactgcagaaatagcaaaatgtgataaaggaagctggggcacaactccctcctttcataggagtcggcttgataggttcctatgcagtaagtccaggttcgtcaggtgtaatttgagcgcggatcggctctcgatcaagacccttcgtcggcgacttgttttctagctcttctgcagatggaacagatggtgcaatgtcaactttggttgtttgctctgaaggcagtttaggtagagatttccgttggggcttcttcactgcatttgcagcaggtgctttcttgacaccattttgggagaccctttcatcgagactcagtcgacctgaacgagctggaggatttggattcccttctgtccctcctgaggatgtgttcttggagcgaccaagctttggtgacctagctcttgttgtaggtatcag

SEQ ID NO: 203474 - DNA, 3641 bp, Zea Mays
gagacgtgctctgctgctgcagcctgcagcggctttccttcccccaccatcgcgtgtgagtccacggtgtgatgtcacggagcggtggcggctttcccgatccactgtgcgggagaaatccccgtgcagccttcttccagctcttcctactctttgctactcgtcttcgctgatttctgccttaattccatcccttccctgcctagaacttgctttgcttcaccccatcacagcttttggtgcctcgtcatcggcgacctaaccgccggcgaccagataaactaagccaggcccttcgctccgaaagtcgtctctcgtagagagcacttgctcacctgctcctcgccctcctctgctggcagtggacttgcgcggagtggagatccatccggacctggttcgatttcttcatctcggttgcttctctgtccagtgggtggatcactggattgtgggttgtgctaactgcaggctggcttgtcagcctatcataaggaaagtgaaaaagagacaacaaagcaatttgttgtctcattcttaggagctggcgagcactcggcatggcagatgctagttcgaggactgacacctcgactgttgtagacatggatgataagaatcaaaggattattttacgaaatttcaacttctctctgtgggacatctaatggtacaggtcttggagagatgcatgtaaagtgttagaaaacggacagagtggagccatggtcccggcttctaattcatctgaccggtctgacagatctgacaaacctatggaccagaaggttttacgacggcttgcccaaaatcgtgaggcagcaagaaaaagccggctgaggaaaaaggcatatgtgcaacagctagagagcagtaagctaaaacttgcaagcctggagcaagaactccagaaagctcgacagcagggaatcttcatttctagttctggagatcaaactcatactatgagtggaaatggagctatgaccttcgatttagaatattctcgatggcaagaggaacaaaataagcagataaatgagctgaggactgcagtaaatgctcatgcatgtggaaaacatctgctgaaaggtgcttcttgtggcttgggggtttccgttcgtctgagcttctaaagctccttgtgaatcagcttgagcctctaactgagcagcaattgatggggctgtccaatctgcagcaatcttctcagcaggctgaggatgcattgtcacaaggaatggaagcattgcagcagtccttggcagaaacgctggctgggtcccttggtccatcaggatcttctggaaacgtggcaaactatatgggtcaaatggctatggccatgggaaaacttggcacactcgagaatttccttcgccaggttgcaagacctgctccaagtttcagaacgcaagcttgtggattgaggtgctggattgctgcaaagctgaaactccgcaaggcattgaaaaggcatcacggatggcaacttcaaagaaatctagatgctcgagggaatgataacgttccagattgcttggaggctgcatctctgactgaaaagagaagtcattggaacatgcatcttgcttatggttgtcactctattgggaaatccgttgtcttgagtccgttactttgcatgtgcagatgtgcttatcacagttgtcattattgtcttaatgccttatgatttcgtcagtgctgctgacactggattgcttcatacttttgatagttacattcaatttgcattagcattataagcaaaaaaatgctcaagagaaactttcttcgtcatattatcttacaactactttttactgcaaacttcttggcaatttttgtctttatgctttcatgttgccctgactgtttcccctttatgcagattctggaggtgaaatggccaacacaagctctgatactttggatagttcaactgttcaggaaaaaccagtggttccgggacacatcatctctgaaatcagttctcatgttcaaaaggaagagtctgctgtgtccaaaagacgctctaacaatgaaccatctctttgcattgctgtaattggagctactgaatgttggtatatttgggtattctaggaagaaattgacagatgagggcttaagatctataattgaagccaatttgacctgccgggtggatcaccatgaaaattgtgatgacaagctaattgagttcctcaaaaagacgtattatgtagatgccggacatgacaaccaagaagggatggttagattaaattctaggatgtcacaaatagagggcattggtgctgcaaacagaatattctaccttgctgttccacaagaggcactccttgatgtagcattgccactggctgacggtgcccaaactaagcaaggctggaatagaataattatcgagaaaccatttggctttactggtttgtcctcactgcgggtaacacaatctatgctgtcaaggtttgaggagaagcaaatttacaggattgaccaccttctggggaaggatctgatcgaaaatcttactgtcttgagattttctaacttggtgtttgaacctttgtggagtcgaacttacatacggaatgtgcaggtcattttttctgaagaaacatcaaatgaaatacaagggaggtactttggaaattatgggataatccgtgacatagttcacagccacattcttcaaacaatagctctatttgctatggaaccacctgtaagtcttgatggagaggatatccgagatgaaaaggtgaaggttctcagatcaattcggaaagtgaaccttgatgatgttgttcttggtcaacttaaagatatgtctggtaaagttgacagatacacaaaatccatgataccaacctattttgctgctgctatgtacattgacaatgcacgctgggatggggtaccattttttatcaggacaggcatgggacttatgacgaatagaaattcgaattcagtttcgccatgtccctggtaatatctaccgtgaacgctttggccatgacatagatctcgacacaaacgagctggttctacgcgatcaacctgaagaagcaatcctgttgaaagtcaacaacaaggtcccagggcttgggctccagctggatgcttcagaactgaacctgctttaccgggataggtacaacaccgaggtaccagattcgtatgaacatcttctactggacgtgctagatggagatagtcatttattcatgcgcagcgacgaactggctgccgcatggaatgtgctcactccgataatccatgagatagatcagaacagagtagttcctgagctctacgaggctggggacagagggcctatcaatgcttaccatctcgctgctaaacatggggtgcgatgggatgacgactggtgagtcgatacatggcaaagattctcgatgcgcaacgagattcattaccaatttttgtcgttgtatcgcagtcagatgtacaatatgccttctgtaatcggcctgatcaaggactttcaaggagacatgcctttcaaggagatatgcaaacatggtttctttcctgtcctgtagactgtagcactgttgattcaagttggaaaaagaaaaaaaggagaaaagaaaatatgcttgcga

SEQ ID NO: 203475 - DNA, 1706 bp, Zea Mays
ctccagatttgccctggcacgagcgagctcctcacgccaaattattttacgaaatttcaacttctctctgtgggacatctaatggtacaggtcttggagagatgcatgtaaagtgttagaaaacggacagagtggagccatggtcccggcttctaattcatctgaccggtctgacagatctgacaaacctatggaccagaaggttttacgacggcttgcccaaaatcgtgaggcagcaagaaaaagccggctgaggaaaaaggcatatgtgcaacagctagagagcagtaagctaaaacttgcaagcctggagcaagaactccagaaagctcgacagcagggaatcttcatttctagttctggagatcaaactcatactatgagtggaaatggagctatgaccttcgatttagaatattctcgatggcaagaggaacaaaataagcagataaatgagctgaggactgcagtaaatgctcatgcaagtgatagtgacctccgtcttatagtcgatgggataatggcacattatgacgagatattcaggctgaagggcattgctgcaaaggctgatgtgttccatatactttcaggcatgtggaaaacatctgctgaaaggtgcttcttgtggcttgggggtttccgttcgtctgagcttctaaagctccttgtgaatcagcttgagcctctaactgagcagcaattgatggggctgtccaatctgcagcaatcttctcagcaggctgaggatgcattgtcacaaggaatggaagcattgcagcagtccttggcagaaacgctggctgggtcccttggtccatcaggatcttctggaaacgtggcaaactatatgggtcaaatggctatggccatgggaaaacttggcacactcgagaatttccttcgccaggctgacaatctacgacagcagaccttacatcagatgcaacgtatcctgacaatccgacaagctgctcgtgcgcttcttgcaatccatgactacttttcacgtttgcgcgcactgagttctctttggcttgctaggccacgagagtaacatcacccccgttggggtcactcgatgaactgatctgtgaatgtgggactgctggctgcaaactcgcaaagcatttgcagatgactggaggatcagtcctctctgtacaagttgtattaacatcttctggtctcatattgtgctccagtgttgtacaatttagggaaaagcttggattaacttgtaagttatcatgaatttgttattggcatattgtacaattgtattagcaataaaaatagaagtacataagtgctggaagcctggaaggatatccagaatctatattggttggaaacgagcagcagaagattgttatagattgttatgttgctttgaatattcggttgtaagtgccttttttggggtatatagaacaaagaaagattcaggagagatgtagggattcaccagaggctatcggggattgtgcttctaggagctccctggactatctctagcaagtctcatattaagctctactctgtaaacagtgatacattgaattgaacgtgctacggttatgatggtaacatttgctatgcattttttaggatgaattctgtgacattaaaatttagtacacattttgactgaggattctgtaaacatttctttcacaagttatctaggcaaaattcgaactttt

SEQ ID NO: 203476 - DNA, 1932 bp, Zea Mays
cggctttccttcccccaccatcgcgtgtgagtccacggtgtgatgtcacggagcggtggcggctttcccgatccactgtgcgggagaaatccccgtgcagccttcttccagctcttcctactctttgctactcgtcttcgctgatttctgccttaattccatcccttccctgcctagaacttgctttgcttcaccccatcacagcttttggtgcctcgtcatcggcgacctaaccgccggcgaccagataaactaagccaggcccttcgctccgaaagtcgtctctcgtagagagcacttgctcacctgctcctcgccctcctctgctggcagtggacttgcgcggagtggagatccatccggacctggttcgatttcttcatctcgttagaaaacggacagagtggagccatggtcccggcttctaattcatctgaccggtctgacagatctgacaaacctatggaccagaaggttttacgacggcttgcccaaaatcgtgaggcagcaagaaaaagccggctgaggaaaaaggcatatgtgcaacagctagagagcagtaagctaaaacttgcaagcctggagcaagaactccagaaagctcgacagcagggaatcttcatttctagttctggagatcaaactcatactatgagtggaaatggagctatgaccttcgatttagaatattctcgatggcaagaggaacaaaataagcagataaatgagctgaggactgcagtaaatgctcatgcaagtgatagtgacctccgtcttatagtcgatgggataatggcacattatgacgagatattcaggctgaagggcattgctgcaaaggctgatgtgttccatatactttcaggcatgtggaaaacatctgctgaaagctccttgtgaatcagcttgagcctctaactgagcagcaattgatggggctgtccaatctgcagcaatcttctcagcaggctgaggatgcattgtcacaaggaatggaagcattgcagcagtccttggcagaaacgctggctgggtcccttggtccatcaggatcttctggaaacgtggcaaactatatgggtcaaatggctatggccatgggaaaacttggcacactcgagaatttccttcgccaggctgacaatctacgacagcagaccttacatcagatgcaacgtatcctgacaatccgacaagctgctcgtgcgcttcttgcaatccatgactacttttcacgtttgcgcgcactgagttctctttggcttgctaggccacgagagtaacatcacccccgttggggtcactcgatgaactgatctgtgaatgtgggactgctggctgcaaactcgcaaagcatttgcagatgactggaggatcagtcctctctgtacaagttgtattaacatcttctggtctcatattgtgctccagtgttgtacaatttagggaaaagcttggattaacttgtaagttatcatgaatttgttattggcatattgtacaattgtattagcaataaaaatagaagtacataagtgctggaagcctggaaggatatccagaatctatattggttggaaacgagcagcagaagattgttatagattgttatgttgctttgaatattcggttgtaagtgccttttttggggtatatagaacaaagaaagattcaggagagatgtagggattcaccagaggctatcggggattgtgcttctaggagctccctggactatctctagcaagtctcatattaagctctactctgtaaacagtgatacattgaattgaacgtgctacggttatgatggtaacatttgctatgcattttttaggatgaattctgtgacattaaaatttagtacacattttgactgaggattctgtaaacatttctttcacaagttatctaggcaaaattcgaactttt

SEQ ID NO: 203477 - DNA, 2220 bp, Zea Mays
cctgcagcggctttccttcccccaccatcgcgtgtgagtccacggtgtgatgtcacggagcggtggcggctttcccgatccactgtgcgggagaaatccccgtgcagccttcttccagctcttcctactctttgctactcgtcttcgctgatttctgccttaattccatcccttccctgcctagaacttgctttgcttcaccccatcacagcttttggtgcctcgtcatcggcgacctaaccgccggcgaccagataaactaagccaggcccttcgctccgaaagtcgtctctcgtagagagcacttgctcacctgctcctcgccctcctctgctggcagtggacttgcgcggagtggagatccatccggacctggttcgatttcttcatctcggttgcttctctgtccagtgggtggatcactggattgtgggttgtgctaactgcaggctggcttgtcagcctatcataaggaaagtgaaaaagagacaacaaagcaatttgttgtctcattcttaggagctggcgagcactcggcatggcagatgctagttcgaggactgacacctcgactgttgtagacatggatgataagaatcaaagggtcttggagagatgcatgtaaagtgttagaaaacggacagagtggagccatggtcccggcttctaattcatctgaccggtctgacagatctgacaaacctatggaccagaaggttttacgacggcttgcccaaaatcgtgaggcagcaagaaaaagccggctgaggaaaaaggcatatgtgcaacagctagagagcagtaagctaaaacttgcaagcctggagcaagaactccagaaagctcgacagcagggaatcttcatttctagttctggagatcaaactcatactatgagtggaaatggagctatgaccttcgatttagaatattctcgatggcaagaggaacaaaataagcagataaatgagctgaggactgcagtaaatgctcatgcaagtgatagtgacctccgtcttatagtcgatgggataatggcacattatgacgagatattcaggctgaagggcattgctgcaaaggctgatgtgttccatatactttcaggcatgtggaaaacatctgctgaaaggtgcttcttgtggcttgggggtttccgttcgtctgagcttctaaagctccttgtgaatcagcttgagcctctaactgagcagcaattgatggggctgtccaatctgcagcaatcttctcagcaggctgaggatgcattgtcacaaggaatggaagcattgcagcagtccttggcagaaacgctggctgggtcccttggtccatcaggatcttctggaaacgtggcaaactatatgggtcaaatggctatggccatgggaaaacttggcacactcgagaatttccttcgccaggctgacaatctacgacagcagaccttacatcagatgcaacgtatcctgacaatccgacaagctgctcgtgcgcttcttgcaatccatgactacttttcacgtttgcgcgcactgagttctctttggcttgctaggccacgagagtaacatcacccccgttggggtcactcgatgaactgatctgtgaatgtgggactgctggctgcaaactcgcaaagcatttgcagatgactggaggatcagtcctctctgtacaagttgtattaacatcttctggtctcatattgtgctccagtgttgtacaatttagggaaaagcttggattaacttgtaagttatcatgaatttgttattggcatattgtacaattgtattagcaataaaaatagaagtacataagtgctggaagcctggaaggatatccagaatctatattggttggaaacgagcagcagaagattgttatagattgttatgttgctttgaatattcggttgtaagtgccttttttggggtatatagaacaaagaaagattcaggagagatgtagggattcaccagaggctatcggggattgtgcttctaggagctccctggactatctctagcaagtctcatattaagctctactctgtaaacagtgatacattgaattgaacgtgctacggttatgatggtaacatttgctatgcattttttaggatgaattctgtgacattaaaatttagtacacattttgactgaggattctgtaaacatttctttcacaagttatctaggcaaaattcgaactttt

SEQ ID NO: 203478 - DNA, 2151 bp, Zea Mays
acgtgctctgctgctgcagcctgcagcggctttccttcccccaccatcgcgtgtgagtccacggtgtgatgtcacggagcggtggcggctttcccgatccactgtgcgggagaaatccccgtgcagccttcttccagctcttcctactctttgctactcgtcttcgctgatttctgccttaattccatcccttccctgcctagaacttgctttgcttcaccccatcacagcttttggtgcctcgtcatcggcgacctaaccgccggcgaccagataaactaagccaggcccttcgctccgaaagtcgtctctcgtagagagcacttgctcacctgctcctcgccctcctctgctggcagtggacttgcgcggagtggagatccatccggacctggttcgatttcttcatctcggttgcttctctgtccagtgggtggatcactggattgtgggttgtgctaactgcaggctggcttgtcagcctatcataaggaaagtgaaaaagagacaacaaagcaatttgttgtctcattcttaggagctggcgagcactcggcatggcagatgctagttcgaggactgacacctcgactgttgtagacatggatgataagaatcaaaggttagaaaacggacagagtggagccatggtcccggcttctaattcatctgaccggtctgacagatctgacaaacctatggaccagaaggttttacgacggcttgcccaaaatcgtgaggcagcaagaaaaagccggctgaggaaaaaggcatatgtgcaacagctagagagcagtaagctaaaacttgcaagcctggagcaagaactccagaaagctcgacagcagggaatcttcatttctagttctggagatcaaactcatactatgagtggaaatggagctatgaccttcgatttagaatattctcgatggcaagaggaacaaaataagcagataaatgagctgaggactgcagtaaatgctcatgcaagtgatagtgacctccgtcttatagtcgatgggataatggcacattatgacgagatattcaggctgaagggcattgctgcaaaggctgatgtgttccatatactttcaggcatgtggaaaacatctgctgaaaggtgcttcttgtggcttgggggtttccgttcgtctgagcttctaaagcaatcttctcagcaggctgaggatgcattgtcacaaggaatggaagcattgcagcagtccttggcagaaacgctggctgggtcccttggtccatcaggatcttctggaaacgtggcaaactatatgggtcaaatggctatggccatgggaaaacttggcacactcgagaatttccttcgccaggctgacaatctacgacagcagaccttacatcagatgcaacgtatcctgacaatccgacaagctgctcgtgcgcttcttgcaatccatgactacttttcacgtttgcgcgcactgagttctctttggcttgctaggccacgagagtaacatcacccccgttggggtcactcgatgaactgatctgtgaatgtgggactgctggctgcaaactcgcaaagcatttgcagatgactggaggatcagtcctctctgtacaagttgtattaacatcttctggtctcatattgtgctccagtgttgtacaatttagggaaaagcttggattaacttgtaagttatcatgaatttgttattggcatattgtacaattgtattagcaataaaaatagaagtacataagtgctggaagcctggaaggatatccagaatctatattggttggaaacgagcagcagaagattgttatagattgttatgttgctttgaatattcggttgtaagtgccttttttggggtatatagaacaaagaaagattcaggagagatgtagggattcaccagaggctatcggggattgtgcttctaggagctccctggactatctctagcaagtctcatattaagctctactctgtaaacagtgatacattgaattgaacgtgctacggttatgatggtaacatttgctatgcattttttaggatgaattctgtgacattaaaatttagtacacattttgactgaggattctgtaaacatttctttcacaagttatctaggcaaaattcgaactttt

SEQ ID NO: 203479 - DNA, 2143 bp, Zea Mays
acgtgctctgctgctgcagcctgcagcggctttccttcccccaccatcgcgtgtgagtccacggtgtgatgtcacggagcggtggcggctttcccgatccactgtgcgggagaaatccccgtgcagccttcttccagctcttcctactctttgctactcgtcttcgctgatttctgccttaattccatcccttccctgcctagaacttgctttgcttcaccccatcacagcttttggtgcctcgtcatcggcgacctaaccgccggcgaccagataaactaagccaggcccttcgctccgaaagtcgtctctcgtagagagcacttgctcacctgctcctcgccctcctctgctggcagtggacttgcgcggagtggagatccatccggacctggttcgatttcttcatctcggttgcttctctgtccagtgggtggatcactggattgtgggttgtgctaactgcaggctggcttgtcagcctatcataaggaaagtgaaaaagagacaacaaagcaatttgttgtctcattcttaggagctggcgagcactcggcatggcagatgctagttcgaggactgacacctcgactgttgtagacatggatgataagaatcaaaggttagaaaacggacagagtggagccatggtcccggcttctaattcatctgaccggtctgacagatctgacaaacctatggaccagaaggttttacgacggcttgcccaaaatcgtgaggcagcaagaaaaagccggctgaggaaaaaggcatatgtgcaacagctagagagcagtaagctaaaacttgcaagcctggagcaagaactccagaaagctcgacagcagggaatcttcatttctagttctggagatcaaactcatactatgagtggaaatggagctatgaccttcgatttagaatattctcgatggcaagaggaacaaaataagcagataaatgagctgaggactgcagtaaatgctcatgcaagtgatagtgacctccgtcttatagtcgatgggataatggcacattatgacgagatattcaggctgaagggcattgctgcaaaggctgatgtgttccatatactttcagctccttgtgaatcagcttgagcctctaactgagcagcaattgatggggctgtccaatctgcagcaatcttctcagcaggctgaggatgcattgtcacaaggaatggaagcattgcagcagtccttggcagaaacgctggctgggtcccttggtccatcaggatcttctggaaacgtggcaaactatatgggtcaaatggctatggccatgggaaaacttggcacactcgagaatttccttcgccaggctgacaatctacgacagcagaccttacatcagatgcaacgtatcctgacaatccgacaagctgctcgtgcgcttcttgcaatccatgactacttttcacgtttgcgcgcactgagttctctttggcttgctaggccacgagagtaacatcacccccgttggggtcactcgatgaactgatctgtgaatgtgggactgctggctgcaaactcgcaaagcatttgcagatgactggaggatcagtcctctctgtacaagttgtattaacatcttctggtctcatattgtgctccagtgttgtacaatttagggaaaagcttggattaacttgtaagttatcatgaatttgttattggcatattgtacaattgtattagcaataaaaatagaagtacataagtgctggaagcctggaaggatatccagaatctatattggttggaaacgagcagcagaagattgttatagattgttatgttgctttgaatattcggttgtaagtgccttttttggggtatatagaacaaagaaagattcaggagagatgtagggattcaccagaggctatcggggattgtgcttctaggagctccctggactatctctagcaagtctcatattaagctctactctgtaaacagtgatacattgaattgaacgtgctacggttatgatggtaacatttgctatgcattttttaggatgaattctgtgacattaaaatttagtacacattttgactgaggattctgtaaacatttctttcacaagttatctaggcaaaattcgaactttt

SEQ ID NO: 203480 - DNA, 2102 bp, Zea Mays
acgtgctctgctgctgcagcctgcagcggctttccttcccccaccatcgcgtgtgagtccacggtgtgatgtcacggagcggtggcggctttcccgatccactgtgcgggagaaatccccgtgcagccttcttccagctcttcctactctttgctactcgtcttcgctgatttctgccttaattccatcccttccctgcctagaacttgctttgcttcaccccatcacagcttttggtgcctcgtcatcggcgacctaaccgccggcgaccagataaactaagccaggcccttcgctccgaaagtcgtctctcgtagagagcacttgctcacctgctcctcgccctcctctgctggcagtggacttgcgcggagtggagatccatccggacctggttcgatttcttcatctcggttgcttctctgtccagtgggtggatcactggattgtgggttgtgctaactgcaggctggcttgtcagcctatcataaggaaagtgaaaaagagacaacaaagcaatttgttgtctcattcttaggagctggcgagcactcggcatggcagatgctagttcgaggactgacacctcgactgttgtagacatggatgataagaatcaaaggttagaaaacggacagagtggagccatggtcccggcttctaattcatctgaccggtctgacagatctgacaaacctatggaccagaaggttttacgacggcttgcccaaaatcgtgaggcagcaagaaaaagccggctgaggaaaaaggcatatgtgcaacagctagagagcagtaagctaaaacttgcaagcctggagcaagaactccagaaagctcgacagcagggaatcttcatttctagttctggagatcaaactcatactatgagtggaaatggagctatgaccttcgatttagaatattctcgatggcaagaggaacaaaataagcagataaatgagctgaggactgcagtaaatgctcatgcatgtggaaaacatctgctgaaaggtgcttcttgtggcttgggggtttccgttcgtctgagcttctaaagctccttgtgaatcagcttgagcctctaactgagcagcaattgatggggctgtccaatctgcagcaatcttctcagcaggctgaggatgcattgtcacaaggaatggaagcattgcagcagtccttggcagaaacgctggctgggtcccttggtccatcaggatcttctggaaacgtggcaaactatatgggtcaaatggctatggccatgggaaaacttggcacactcgagaatttccttcgccaggctgacaatctacgacagcagaccttacatcagatgcaacgtatcctgacaatccgacaagctgctcgtgcgcttcttgcaatccatgactacttttcacgtttgcgcgcactgagttctctttggcttgctaggccacgagagtaacatcacccccgttggggtcactcgatgaactgatctgtgaatgtgggactgctggctgcaaactcgcaaagcatttgcagatgactggaggatcagtcctctctgtacaagttgtattaacatcttctggtctcatattgtgctccagtgttgtacaatttagggaaaagcttggattaacttgtaagttatcatgaatttgttattggcatattgtacaattgtattagcaataaaaatagaagtacataagtgctggaagcctggaaggatatccagaatctatattggttggaaacgagcagcagaagattgttatagattgttatgttgctttgaatattcggttgtaagtgccttttttggggtatatagaacaaagaaagattcaggagagatgtagggattcaccagaggctatcggggattgtgcttctaggagctccctggactatctctagcaagtctcatattaagctctactctgtaaacagtgatacattgaattgaacgtgctacggttatgatggtaacatttgctatgcattttttaggatgaattctgtgacattaaaatttagtacacattttgactgaggattctgtaaacatttctttcacaagttatctaggcaaaattcgaactttt

SEQ ID NO: 203481 - DNA, 1934 bp, Zea Mays
gacgtgctctgctgctgcagcctgcagcggctttccttcccccaccatcgcgtgtgagtccacggtgtgatgtcacggagcggtggcggctttcccgatccactgtgcgggagaaatccccgtgcagccttcttccagctcttcctactctttgctactcgtcttcgctgatttctgccttaattccatcccttccctgcctagaacttgctttgcttcaccccatcacagcttttggtgcctcgtcatcggcgacctaaccgccggcgaccagataaactaagccaggcccttcgctccgaaagtcgtctctcgtagagagcacttgctcacctgctcctcgccctcctctgctggcagtggacttgcgcggagtggagatccatccggacctggttcgatttcttcatctcgttagaaaacggacagagtggagccatggtcccggcttctaattcatctgaccggtctgacagatctgacaaacctatggaccagaaggttttacgacggcttgcccaaaatcgtgaggcagcaagaaaaagccggctgaggaaaaaggcatatgtgcaacagctagagagcagtaagctaaaacttgcaagcctggagcaagaactccagaaagctcgacagcagggaatcttcatttctagttctggagatcaaactcatactatgagtggaaatggagctatgaccttcgatttagaatattctcgatggcaagaggaacaaaataagcagataaatgagctgaggactgcagtaaatgctcatgcaagtgatagtgacctccgtcttatagtcgatgggataatggcacattatgacgagatattcaggctgaagggcattgctgcaaaggctgatgtgttccatatactttcagctccttgtgaatcagcttgagcctctaactgagcagcaattgatggggctgtccaatctgcagcaatcttctcagcaggctgaggatgcattgtcacaaggaatggaagcattgcagcagtccttggcagaaacgctggctgggtcccttggtccatcaggatcttctggaaacgtggcaaactatatgggtcaaatggctatggccatgggaaaacttggcacactcgagaatttccttcgccaggctgacaatctacgacagcagaccttacatcagatgcaacgtatcctgacaatccgacaagctgctcgtgcgcttcttgcaatccatgactacttttcacgtttgcgcgcactgagttctctttggcttgctaggccacgagagtaacatcacccccgttggggtcactcgatgaactgatctgtgaatgtgggactgctggctgcaaactcgcaaagcatttgcagatgactggaggatcagtcctctctgtacaagttgtattaacatcttctggtctcatattgtgctccagtgttgtacaatttagggaaaagcttggattaacttgtaagttatcatgaatttgttattggcatattgtacaattgtattagcaataaaaatagaagtacataagtgctggaagcctggaaggatatccagaatctatattggttggaaacgagcagcagaagattgttatagattgttatgttgctttgaatattcggttgtaagtgccttttttggggtatatagaacaaagaaagattcaggagagatgtagggattcaccagaggctatcggggattgtgcttctaggagctccctggactatctctagcaagtctcatattaagctctactctgtaaacagtgatacattgaattgaacgtgctacggttatgatggtaacatttgctatgcattttttaggatgaattctgtgacattaaaatttagtacacattttgactgaggattctgtaaacatttctttcacaagttatctaggcaaaattcgaactttt

SEQ ID NO: 203482 - DNA, 2246 bp, Zea Mays
gagacgtgctctgctgctgcagcctgcagcggctttccttcccccaccatcgcgtgtgagtccacggtgtgatgtcacggagcggtggcggctttcccgatccactgtgcgggagaaatccccgtgcagccttcttccagctcttcctactctttgctactcgtcttcgctgatttctgccttaattccatcccttccctgcctagaacttgctttgcttcaccccatcacagcttttggtgcctcgtcatcggcgacctaaccgccggcgaccagataaactaagccaggcccttcgctccgaaagtcgtctctcgtagagagcacttgctcacctgctcctcgccctcctctgctggcagtggacttgcgcggagtggagatccatccggacctggttcgatttcttcatctcggttgcttctctgtccagtgggtggatcactggattgtgggttgtgctaactgcaggctggcttgtcagcctatcataaggaaagtgaaaaagagacaacaaagcaatttgttgtctcattcttaggagctggcgagcactcggcatggcagatgctagttcgaggactgacacctcgactgttgtagacatggatgataagaatcaaaggattattttacgaaatttcaacttctctctgtgggacatctaatggtacaggtcttggagagatgcatgtaaagtgttagaaaacggacagagtggagccatggtcccggcttctaattcatctgaccggtctgacagatctgacaaacctatggaccagaaggttttacgacggcttgcccaaaatcgtgaggcagcaagaaaaagccggctgaggaaaaaggcatatgtgcaacagctagagagcagtaagctaaaacttgcaagcctggagcaagaactccagaaagctcgacagcagggaatcttcatttctagttctggagatcaaactcatactatgagtggaaatggagctatgaccttcgatttagaatattctcgatggcaagaggaacaaaataagcagataaatgagctgaggactgcagtaaatgctcatgcaagtgatagtgacctccgtcttatagtcgatgggataatggcacattatgacgagatattcaggctgaagggcattgctgcaaaggctgatgtgttccatatactttcaggcatgtggaaaacatctgctgaaagctccttgtgaatcagcttgagcctctaactgagcagcaattgatggggctgtccaatctgcagcaatcttctcagcaggctgaggatgcattgtcacaaggaatggaagcattgcagcagtccttggcagaaacgctggctgggtcccttggtccatcaggatcttctggaaacgtggcaaactatatgggtcaaatggctatggccatgggaaaacttggcacactcgagaatttccttcgccaggctgacaatctacgacagcagaccttacatcagatgcaacgtatcctgacaatccgacaagctgctcgtgcgcttcttgcaatccatgactacttttcacgtttgcgcgcactgagttctctttggcttgctaggccacgagagtaacatcacccccgttggggtcactcgatgaactgatctgtgaatgtgggactgctggctgcaaactcgcaaagcatttgcagatgactggaggatcagtcctctctgtacaagttgtattaacatcttctggtctcatattgtgctccagtgttgtacaatttagggaaaagcttggattaacttgtaagttatcatgaatttgttattggcatattgtacaattgtattagcaataaaaatagaagtacataagtgctggaagcctggaaggatatccagaatctatattggttggaaacgagcagcagaagattgttatagattgttatgttgctttgaatattcggttgtaagtgccttttttggggtatatagaacaaagaaagattcaggagagatgtagggattcaccagaggctatcggggattgtgcttctaggagctccctggactatctctagcaagtctcatattaagctctactctgtaaacagtgatacattgaattgaacgtgctacggttatgatggtaacatttgctatgcattttttaggatgaattctgtgacattaaaatttagtacacattttgactgaggattctgtaaacatttctttcacaagttatctaggcaaaattcgaactttt

SEQ ID NO: 203483 - DNA, 3992 bp, Zea Mays
gacgtcttcccttccccaccgcgcccctgcccccactctcccacttcagatctcctcgtccactccgtcgccgtcgtcttcctctctcccctcccgccggccgatgcatcccaaaccctagccctccggcgcaaaaccctagatcccgcccccgcctgcatggatccctcatccggatccacgtcccgccacgggcgtctcctcatctcgccgtcgctatccaccccgaccttctccacccactccccgtccccctcatcggccgcgtcccccgcgccgcaccgcaactccacatcctctccgaagcccctcgtatctttcccctcaccctcttccgccaacaggccccgatcctcctacgtcggcgctggaccgcgcgctgccaccgcagcggcctcggcctcgggtccggcgttcgcccacaacgcgcgccttgcggcggccctggtccctgccgcggccttccttctcgaccttggcgggctccccgtcttcgccgtcctcgccatcggcctagcggcggcataccttctcgacgcgctccagctgcgccagggctccttcttcaccgtctgggcggcgctgctcgcggccgatgtcgcttttttcttctccgcctccctatcgtccgcggccgctgcctcgctgccgctgaccgtcctcgcgctgcttctctgcgctgagacctccttcctcattggcgtctgggcgtcgctgcagttccgatggatccagctcgagaacccgactattgttgctgccctggagcggctgctctttgcctgtgtgcccattgccgcccccgccctcttcacgtgggctctcgtgtctgcggtcggcatggccaatgcatcctactattttgccacgttctgcatggtgttctactggctgttctctataccccgtcggtccagcttcaatagccggaagcaggatgctccaatgctggacagtgatggcattcttggtcccttggagagctgtgtgcattctctgtatgtgctgttcgtgccggtgttgttccatgccgtgtcccatcgtgcaacactcttcacatcgttggccagtgtgtgtgaattgttgttgctgttcttcataccgttcttgttccagctgtatgcatccactcgtggtgcactgtggtggatcaccagggatgcacgcaccatggaccagataagaattgtgaatgggttcgtcgcactggtcgtggtggtgctttgccttgaggtgagagttgtgttccactcgtttggaaggtacattcatgctccaccaccgctgaattacctgcttgtaactgtcacaatgcttggtggcgctttgggtcttgcagcacatgctgcgggcaaggttggggatgctgctagttctgtggcttttacaggattggcagtgctagtcagtggagcaggagctgtagtcattggattccccatggtgctgggtacctgaatacttacacccttataatccctctacttttcatgtcatcctcaccacaatatctcaatgatgttgcttagtacttgaattatggctgtggcgctgtgcgaagctagtgagttccttggcagagttcctgccactgccgatgatttctggctattatgttgcaaggttctttactaagaaaagcttgtcatcatactttacctttgtggcacttgcaagcttgatggtcctttggtttgtggtgcacaattattgggatctgaatatttggattgctggcatgccattgaagtccttcacaaagtatgttgttgcagctgtcatcatggcaatggctgttcctggtttggcacttcttccaacaaaacttcggtttcttctggaacttggtcttattggtcatacattgttgctatgctacattgagaaccgattgtttaactatgcctccatgtattattatggatttgaagaggatatcatctatcctaattatatggtttttattacaacctttttgggcttggctcttgtaaggagattatatgttgatcagagactagggcccaaagctgcttggatcttaacttgtctatattcatcaaagttagcaatgctgtttatgacatcaagatcagttatatggttctcagctgttttgctacttgctgttaccccacctttacttctttacagagacaagtccaaaggagcttctaagatgaaggtctggcaagcttattttcatgcatctgtcatagcattttctgcctggctctgccgggaaacaatttttgaagctttacagtggtggaatggaagacctccttcagatggtctgttactgggttcatatattcttttgacaggagttgcatgcattccaatagtcgctctccatttccctcatgctcagtcagcgaagagattcctggtccttattgtggcaacaggccttctcttcgttgttatgcagcctcctattaagctatcatgggtataccggtcggattttatcacagcggcacatttatctgatgatgacatttcaatatatgggtttgtagcatctaagccctcatggccgtcatggctgctcattgcaactgtggtacttacactagcagcagttacatccatcatcccagtgaagtatgtcgttgagttaaggacttcatatgcagtggctgtggggattacactaggcatctacatctctgttcagtacttcttccaggcagttgttctgtatcctcttcttgttgcaacaattgtctctgcagcagtctttgtcgtattcacacatcttccttctgaatcaagcacaagggttttgccatgggtgttctctttcttggtagctttgttcccagtcacctatctgctcgaaggacacttaagagccaaaagttttgcagatgaggatgaagcagagaagttcaccaacatgttggctatagaaggggctagaatgtcacttttgggtctctatgctgccatcttcatgattattgcattagaaatcaagtttgagctgactttgctattgcgtgaaaaggctgcagacagaggtatgcatggtccatctagtcggagtgctgccttcccacccaaagcaaggctgctccagcaacgaagagctcatgctgcaccaacattcaccatcaagcggttggcagcagaggcagcatggatgcctgctataggcaatgtttctactgtgctgtgttttggcatctgcctggttctaaatctaacactcactggtggctcgaaccgtgctattttcttcctggcgccaatccttctgcttctgaaccaggattcagatatcttcgcagggtttggtgataggcagcgctatttcccagtaacagtttctatttctggctatttattgttgacagcgttgtataggatatgggaggagacttggcctggcaatggaggatgggctcttgatatcgggggcccgggctggctgtttgctgtgaagaactttgctcttcttgtgctcactttgccgaatcacatactcttcaaccgcttcatgtgggattatgtcagacagacagatgccaagctactgctgacgctacctctcaacttgccttcgattataatgacagacatacttactattcgggtgttaggattgctaggagctatgtactctcttgcccagtacatgatatcaaggcgcataagaattgctgggatgagatacatttgaaataggtcatgtaactttctgaggctgtcactatacatcaagttctttcaaaactcaggaacagatacttcattgcctgatcctctcgcagcaaaattgtgctatgtagcagagagaaacaagtgtcgaacgactttgctttttttgtactgaatgattgcatactgagtgtaggctaaaggtgttgtcgcatatatagatgtattttaacagcacagatgatgccatcaccttgggtcgtttatgttgaacttttgacggcgcaaagttttgcattcacctgagcagaagactttgatgt

SEQ ID NO: 203484 - DNA, 3739 bp, Zea Mays
gacgtcttcccttccccaccgcgcccctgcccccactctcccacttcagatctcctcgtccactccgtcgccgtcgtcttcctctctcccctcccgccggccgatgcatcccaaaccctagccctccggcgcaaaaccctagatcccgcccccgcctgcatggatccctcatccggatccacgtcccgccacgggcgtctcctcatctcgccgtcgctatccaccccgaccttctccacccactccccgtccccctcatcggccgcgtcccccgcgccgcaccgcaactccacatcctctccgaagcccctcgtatctttcccctcaccctcttccgccaacaggccccgatcctcctacgtcggcgctggaccgcgcgctgccaccgcagcggcctcggcctcgggtccggcgttcgcccacaacgcgcgccttgcggcggccctggtccctgccgcggccttccttctcgaccttggcgggctccccgtcttcgccgtcctcgccatcggcctagcggcggcataccttctcgacgcgctccagctgcgccagggctccttcttcaccgtctgggcggcgctgctcgcggccgatgtcgcttttttcttctccgcctccctatcgtccgcggccgctgcctcgctgccgctgaccgtcctcgcgctgcttctctgcgctgagacctccttcctcattggcgtctgggcgtcgctgcagttccgatggatccagctcgagaacccgactattgttgctgccctggagcggctgctctttgcctgtgtgcccattgccgcccccgccctcttcacgtgggctctcgtgtctgcggtcggcatggccaatgcatcctactattttgccacgttctgcatggtgttctactggctgttctctataccccgtcggtccagcttcaatagccggaagcaggatgctccaatgctggacagtgatggcattcttggtcccttggagagctgtgtgcattctctgtatgtgctgttcgtgccggtgttgttccatgccgtgtcccatcgtgcaacactcttcacatcgttggccagtgtgtgtgaattgttgttgctgttcttcataccgttcttgttccagctgtatgcatccactcgtggtgcactgtggtggatcaccagggatgcacgcaccatggaccagataagaattgtgaatgggttcgtcgcactggtcgtggtggtgctttgccttgagcacatgctgcgggcaaggttggggatgctgctagttctgtggcttttacaggattggcagtgctagtcagtggagcaggagctgtagtcattggattccccatggtgttcctgccactgccgatgatttctggctattatgttgcaaggttctttactaagaaaagcttgtcatcatactttacctttgtggcacttgcaagcttgatggtcctttggtttgtggtgcacaattattgggatctgaatatttggattgctggcatgccattgaagtccttcacaaagtatgttgttgcagctgtcatcatggcaatggctgttcctggtttggcacttcttccaacaaaacttcggtttcttctggaacttggtcttattggtcatacattgttgctatgctacattgagaaccgattgtttaactatgcctccatgtattattatggatttgaagaggatatcatctatcctaattatatggtttttattacaacctttttgggcttggctcttgtaaggagattatatgttgatcagagactagggcccaaagctgcttggatcttaacttgtctatattcatcaaagttagcaatgctgtttatgacatcaagatcagttatatggttctcagctgttttgctacttgctgttaccccacctttacttctttacagagacaagtccaaaggagcttctaagatgaaggtctggcaagcttattttcatgcatctgtcatagcattttctgcctggctctgccgggaaacaatttttgaagctttacagtggtggaatggaagacctccttcagatggagttgcatgcattccaatagtcgctctccatttccctcatgctcagtcagcgaagagattcctggtccttattgtggcaacaggccttctcttcgttgttatgcagcctcctattaagctatcatgggtataccggtcggattttatcacagcggcacatttatctgatgatgacatttcaatatatgggtttgtagcatctaagccctcatggccgtcatggctgctcattgcaactgtggtacttacactagcagcagttacatccatcatcccagtgaagtatgtcgttgagttaaggacttcatatgcagtggctgtggggattacactaggcatctacatctctgttcagtacttcttccaggcagttgttctgtatcctcttcttgttgcaacaattgtctctgcagcagtctttgtcgtattcacacatcttccttctgaatcaagcacaagggttttgccatgggtgttctctttcttggtagctttgttcccagtcacctatctgctcgaaggacacttaagagccaaaagttttgcagatgaggatgaagcagagaagttcaccaacatgttggctatagaaggggctagaatgtcacttttgggtctctatgctgccatcttcatgattattgcattagaaatcaagtttgagctgactttgctattgcgtgaaaaggctgcagacagaggtatgcatggtccatctagtcggagtgctgccttcccacccaaagcaaggctgctccagcaacgaagagctcatgctgcaccaacattcaccatcaagcggttggcagcagaggcagcatggatgcctgctataggcaatgtttctactgtgctgtgttttggcatctgcctggttctaaatctaacactcactggtggctcgaaccgtgctattttcttcctggcgccaatccttctgcttctgaaccaggattcagatatcttcgcagggtttggtgataggcagcgctatttcccagtaacagtttctatttctggctatttattgttgacagcgttgtataggatatgggaggagacttggcctggcaatggaggatgggctcttgatatcgggggcccgggctggctgtttgctgtgaagaactttgctcttcttgtgctcactttgccgaatcacatactcttcaaccgcttcatgtgggattatgtcagacagacagatgccaagctactgctgacgctacctctcaacttgccttcgattataatgacagacatacttactattcgggtgttaggattgctaggagctatgtactctcttgcccagtacatgatatcaaggcgcataagaattgctgggatgagatacatttgaaataggctgtcactatacatcaagttctttcaaaactcaggaacagatacttcattgcctgatcctctcgcagcaaaattgtgctatgtagcagagagaaacaagtgtcgaacgactttgctttttttgtactgaatgattgcatactgagtgtaggctaaaggtgttgtcgcatatatagatgtattttaacagcacagatgatgccatcaccttgggtcgtttatgttgaacttttgacggcgcaaagttttgcattcacctgagcagaagactttgatgtaactgttgatttcgttttttttttttccataaaattaaga

SEQ ID NO: 203485 - DNA, 2443 bp, Zea Mays
cttgaattatggctgtggcgctgtgcgaagctattcctgccactgccgatgatttctggctattatgttgcaaggttctttactaagaaaagcttgtcatcatactttacctttgtggcacttgcaagcttgatggtcctttggtttgtggtgcacaattattgggatctgaatatttggattgctggcatgccattgaagtccttcacaaagtatgttgttgcagctgtcatcatggcaatggctgttcctggtttggcacttcttccaacaaaacttcggtttcttctggaacttggtcttattggtcatacattgttgctatgctacattgagaaccgattgtttaactatgcctccatgtattattatggatttgaagaggatatcatctatcctaattatatggtttttattacaacctttttgggcttggctcttgtaaggagattatatgttgatcagagactagggcccaaagctgcttggatcttaacttgtctatattcatcaaagttagcaatgctgtttatgacatcaagatcagttatatggttctcagctgttttgctacttgctgttaccccacctttacttctttacagagacaagtccaaaggagcttctaagatgaaggtctggcaagcttattttcatgcatctgtcatagcattttctgcctggctctgccgggaaacaatttttgaagctttacagtggtggaatggaagacctccttcagatggtctgttactgggttcatatattcttttgacaggagttgcatgcattccaatagtcgctctccatttccctcatgctcagtcagcgaagagattcctggtccttattgtggcaacaggccttctcttcgttgttatgcagcctcctattaagctatcatgggtataccggtcggattttatcacagcggcacatttatctgatgatgacatttcaatatatgggtttgtagcatctaagccctcatggccgtcatggctgctcattgcaactgtggtacttacactagcagcagttacatccatcatcccagtgaagtatgtcgttgagttaaggacttcatatgcagtggctgtggggattacactaggcatctacatctctgttcagtacttcttccaggcagttgttctgtatcctcttcttgttgcaacaattgtctctgcagcagtctttgtcgtattcacacatcttccttctgaatcaagcacaagggttttgccatgggtgttctctttcttggtagctttgttcccagtcacctatctgctcgaaggacacttaagagccaaaagttttgcagatgaggatgaagcagagaagttcaccaacatgttggctatagaaggggctagaatgtcacttttgggtctctatgctgccatcttcatgattattgcattagaaatcaagtttgagctgactttgctattgcgtgaaaaggctgcagacagaggtatgcatggtccatctagtcggagtgctgccttcccacccaaagcaaggctgctccagcaacgaagagctcatgctgcaccaacattcaccatcaagcggttggcagcagaggcagcatggatgcctgctataggcaatgtttctactgtgctgtgttttggcatctgcctggttctaaatctaacactcactggtggctcgaaccgtgctattttcttcctggcgccaatccttctgcttctgaaccaggattcagatatcttcgcagggtttggtgataggcagcgctatttcccagtaacagtttctatttctggctatttattgttgacagcgttgtataggatatgggaggagacttggcctggcaatggaggatgggctcttgatatcgggggcccgggctggctgtttgctgtgaagaactttgctcttcttgtgctcactttgccgaatcacatactcttcaaccgcttcatgtgggattatgtcagacagacagatgccaagctactgctgacgctacctctcaacttgccttcgattataatgacagacatacttactattcgggtgttaggattgctaggagctatgtactctcttgcccagtacatgatatcaaggcgcataagaattgctgggatgagatacatttgaaataggtcatgtaactttctgaggctgtcactatacatcaagttctttcaaaactcaggaacagatacttcattgcctgatcctctcgcagcaaaattgtgctatgtagcagagagaaacaagtgtcgaacgactttgctttttttgtactgaatgattgcatactgagtgtaggctaaaggtgttgtcgcatatatagatgtattttaacagcacagatgatgccatcaccttgggtcgtttatgttgaacttttgacggcgcaaagttttgcattcacctgagcagaagactttgatgt

SEQ ID NO: 203486 - DNA, 2469 bp, Zea Mays
atcacgtagagttgtggaatagcagacttttgttcagcagagagatgttcctttacatgttcctgccactgccgatgatttctggctattatgttgcaaggttctttactaagaaaagcttgtcatcatactttacctttgtggcacttgcaagcttgatggtcctttggtttgtggtgcacaattattgggatctgaatatttggattgctggcatgccattgaagtccttcacaaagtatgttgttgcagctgtcatcatggcaatggctgttcctggtttggcacttcttccaacaaaacttcggtttcttctggaacttggtcttattggtcatacattgttgctatgctacattgagaaccgattgtttaactatgcctccatgtattattatggatttgaagaggatatcatctatcctaattatatggtttttattacaacctttttgggcttggctcttgtaaggagattatatgttgatcagagactagggcccaaagctgcttggatcttaacttgtctatattcatcaaagttagcaatgctgtttatgacatcaagatcagttatatggttctcagctgttttgctacttgctgttaccccacctttacttctttacagagacaagtccaaaggagcttctaagatgaaggtctggcaagcttattttcatgcatctgtcatagcattttctgcctggctctgccgggaaacaatttttgaagctttacagtggtggaatggaagacctccttcagatggtctgttactgggttcatatattcttttgacaggagttgcatgcattccaatagtcgctctccatttccctcatgctcagtcagcgaagagattcctggtccttattgtggcaacaggccttctcttcgttgttatgcagcctcctattaagctatcatgggtataccggtcggattttatcacagcggcacatttatctgatgatgacatttcaatatatgggtttgtagcatctaagccctcatggccgtcatggctgctcattgcaactgtggtacttacactagcagcagttacatccatcatcccagtgaagtatgtcgttgagttaaggacttcatatgcagtggctgtggggattacactaggcatctacatctctgttcagtacttcttccaggcagttgttctgtatcctcttcttgttgcaacaattgtctctgcagcagtctttgtcgtattcacacatcttccttctgaatcaagcacaagggttttgccatgggtgttctctttcttggtagctttgttcccagtcacctatctgctcgaaggacacttaagagccaaaagttttgcagatgaggatgaagcagagaagttcaccaacatgttggctatagaaggggctagaatgtcacttttgggtctctatgctgccatcttcatgattattgcattagaaatcaagtttgagctgactttgctattgcgtgaaaaggctgcagacagaggtatgcatggtccatctagtcggagtgctgccttcccacccaaagcaaggctgctccagcaacgaagagctcatgctgcaccaacattcaccatcaagcggttggcagcagaggcagcatggatgcctgctataggcaatgtttctactgtgctgtgttttggcatctgcctggttctaaatctaacactcactggtggctcgaaccgtgctattttcttcctggcgccaatccttctgcttctgaaccaggattcagatatcttcgcagggtttggtgataggcagcgctatttcccagtaacagtttctatttctggctatttattgttgacagcgttgtataggatatgggaggagacttggcctggcaatggaggatgggctcttgatatcgggggcccgggctggctgtttgctgtgaagaactttgctcttcttgtgctcactttgccgaatcacatactcttcaaccgcttcatgtgggattatgtcagacagacagatgccaagctactgctgacgctacctctcaacttgccttcgattataatgacagacatacttactattcgggtgttaggattgctaggagctatgtactctcttgcccagtacatgatatcaaggcgcataagaattgctgggatgagatacatttgaaataggtcatgtaactttctgaggctgtcactatacatcaagttctttcaaaactcaggaacagatacttcattgcctgatcctctcgcagcaaaattgtgctatgtagcagagagaaacaagtgtcgaacgactttgctttttttgtactgaatgattgcatactgagtgtaggctaaaggtgttgtcgcatatatagatgtattttaacagcacagatgatgccatcaccttgggtcgtttatgttgaacttttgacggcgcaaagttttgcattcacctgagcagaagactttgatgt

SEQ ID NO: 203487 - DNA, 2284 bp, Zea Mays
aaacagatagcctttcgtctctttcagcttcagaggccaccagcgcctggacgctcgcgccccggcctcgccgccatggcttcctccctggccgccctccactcagccgccgccagccacctcccacaccctcgacgtcagaggaccgccgccctcgcgcgcgcctctcctctcctccgcctgccgcttcgcctccgctcccgccgggtccccgggtcgccgccaagttggcgaccggcgccgctggcggcacggcaaccggcagggcgaggcggagcgtaggcgtcgacgtcgccgccctcgccgcggcgctgcgcgacgccagaacggccgacgacgtggagtcctcggtgaacgccttcttgagcgacgacgaggcccggctcctgccgctccaggtgtacacgtgcgtgatccgggggctcggcaagggcaacagcccggacgccgcgttcgccgtcgtcgagcacctcaagcggagaggggtggtgccgaaccagttcgtgtacaactgcctcctcggcgccgtcaagagctgcggcgagctcggccgggtccaggccgtcctcgacgacatggaggcgcagggggtgcccccgaacatcgtcaccttcaacacgctgatgtcgatccacgtccagcagggcagggtggaggacgccctcagggtgtacgccgacgtccaggggcgcgggctcgtgccgaccgccgcgacctactccacggtgatgtccgcctacaagaaggcgggggacgcgtccgcggctatccagctcttcgccctgctcagggagaggtacaggaacggggagctggtggggagccgtggtgacccggagcaggagctcgtcaagctcgagaagctgaccgtccgggcgtgctacctgtcgatgcggcggtcgctcgtcggggggaagaatccggtcggcgaggcgctgaaggtcctcctggacatggacgaagcaggtgtccggccggagcggagcgactacgagcggctcgtctgggcgtgcacccgggacgagcactacgccatcggcaaggagctgtaccagaggattcgcgacggtggcgacgagatcagcctgtccgtctgtaaccacctgatctggctaatgggcaaggcgaagaaatggtgggcggctctcgagatctacgaggacctgctggacaaagggccgaagccgaacaacctgtcccacgagctgatcatgtcgcacttcaacgtcctcctggacgccgccaagcgaaggggcatctggaggtggggcgtcaggctgctggacaagatgcaggagaagggcctgaagcccggaggcaaggagtggaacgcggtcctcctcgcgtgctcaagggcctccgagacgtctgcggctgtggacgtcttcaagaagatggtggagcgagggctgaagccggacgtggtctcctacggagcgttgctgagcgcgctcgagaaaggcaggctctacgacgaggcactgagggtctgggaacacatgcgcaggctcggcatcgaacccaacctctacgcgtacacgatcctggcgtcgatctacatcggcaagggcgaccacgccatggcggacgctgttcttcacgacatgctgtcgaagcggatcgcgccgaccgtcgtcaccttcaacgcgataatcagcgcgtgcgcgaggagcggttcgggtgggaacgccttcgagtggttccacaggatgaagatgaagggcattgagccgaatgagatcacgtaccaggtgttgattgaggctcttgtgcaggatgggaagccaagacttgcctatgagatgtacatgaaggcttgcggccagggtcttcagcttcctgcaaagtcgtatgacaccgtgctggaggcgtgtagggcttatggttccgtagtagatgtagctactctgggtcctcgaccttcgaaaggggtggaagtggaacccatcaggatagagaatagcttctcccgtttctctcagttcaaggatgtgcatggcagctctcatcgttttgcaggcgttggaatgtatgggttttacggatacagaatggcaaggtaaacaaaccaagcatgtaacctactatcaatccccctctccctcttgtaatcaccctcccaaacccaatgccacatttttaaaacatttgactcgtgtatttgtaagctcactaagttgcgaaaaaaaaatactagtgcactgccctttatgttagtgtggaccaaaaaagcgatgcaactttttggtgcgcatgtgttctttggaccaaccttttaaacaag

SEQ ID NO: 203488 - DNA, 3393 bp, Zea Mays
gtgccgtcctgcactctttccccgagggccgaggccctggcgggtggcctcctgctgggggaacagtggcacctaaagcagcagcctgccgcagctgccttgcagcggccgcgcacggtggccagtagcgtgcaacagcagcgcagagcgcagcgccgtgccactccgcaacgacgcagcagtagcagcgccccacaccctggtgcggcggtgccccacggcaaaaggaaacagcccgtccaatccatcccctcaccccattgcctctccctctccctcacccgcacctcaccactcctcggcctcacttcttcacaagttcacatcagcagcagctcacgaaacaggagcgtcataaagacatggtcgtcgcaggatagcctcagacccagcgacgcagcggcagcgacccaggaagcaacagcgaccggcatcgatcgcggcagccgaggcggggggacgggaggagggagggagcggtcgccgcaggagcagagcggcacggcatggggtcctgagtgactgactgactgacgactgagtgtctgactgagaaggagatggctggagcgcgacggccccggagccattaatggggcgctcatcctcctcgtcctcccactcctcgcctcccccccgccaggtcgcggtcggctccgctttttaaccggcttgtcctggagcggggcgaacggcgaacctcacgggcgccggaacacgaaccggaaccctagtggtggtggtggtggcgcgccccatgggcatcgacctcaacatggcggacggcgagagccaggagcgccgcccgccgccggcggtgtgccgggagctgtggcacgcgtgcgcggggcccgtggttgcgctaccgcggcggggcagcctggtcgtgtacctgccgcaaggccacctagccgcggccggcggcggcaacgtcgctgtggacctgccgccgcacgtggcgtgccgcgtcgcggatgtcgagttatgcgcggatgcggcgacggacgaggtgtacgcgcggctggcgctggtcgcggagggcgaggcatttgggagaaatctgcgtggtggtggagtcgatggggacgatgacatggaggattttgatgttgaaaggaagtcccggatgttgcacatgttctgcaaaacgcttacagcctctgacacaagcacacatggagggttctctgttcctcgtcgtgctgctgaggactgtttcccgcctctggattataatcagctcaggccttctcaagagctggttgccaaggatttgcatggagccaagtggaaatttcgtcatatatataggggtcagcctcgtaggcatctcttgactactggatggagttcatttgtcaataaaaagaaactggtttctggggatgcggtcttatttctccgaggtgatgatggtgaactaaggctgggcgtacggagggccattcagcttaaaaatgaggccctttttgacgatttcagttgcgacagtacaaaacggcatacattgttggctgtagctgattccttgaagcacaaaagtgtttttcacatttcttacaatccaagagctactgcttcagaatatattataccacaccataagttcctgaagagcctaaatcttccattctgtattggagcaaggatcaacttacagtgccataatgaagatgttagtgaaaggcgatctggaatggttgttcatgtcagtgaaatagatcccatgaaatggccaggctcgaagtggagaagcctgctggtaagatgggaggatggtgttgaatgtaacggccaagatagagtatctccatgggagattgagatagctggtggctctgtctctgttgctcattctgtgtccgcatctagctctaaaagaaccaagttgtgtcctcagggaaatttggacgttccaacaatgtggaatgggaatggttgtactgactccgtggaaactggaaagtttcccagggtcttgcaaggtcaagatttgatgagttttaggactcgtcatgttccgtctgctcctcaaactgttgaggctgcaaaacttcaatcttctggtgctagtaggttcctcagtaatgcacgtggctgcgcattgggtggtccaacaagcagactcgcagtgcataactctgattttacctaccaatctgtaggcttcaatgaatctattggattctcagaggtcttgcaaggtcaagaaatttctcgggcagttcctatgttccaaggaatgatgtctgaggcttgttcactaaaaggaggatatgggctgcatagttatatgcgtaccccagttgctgttactggattgtcagccacaactcaagagtgttctctcacactatctactccgccaggagcacaagttccttctgtctaccctgataatatttttaaccgaactgtggttcgacagcttggactggcaagcaagtttgatggtggagctacaaatgcccagcagtctgtcccatttgataggccgagggaaatttggagcaagccacagcatgaaatatctgatcaaacgaaaatggatcactttgagactagaagagcttcagcacctggagatgatgctgctaagcatgggtctggtggagaggtggttcgcaaaactagctgcagactttttggtttctcgttgactgagaagatcttgccagcagatgatgatggcatcaaggaagtgacctatgagcctgagtgccagaatccacggatgctggacctgttcgggtacaactgctcagccccaagtgctgctcttccagctctgtgtgctgccccctttggaatgtgatgctacttcaataacgctgctgagtatttccatgtactcttagaagttttactttcctaatacccaagtgtatgtcataagctgccttttgacatcattccccctgttggtctgcctcaagcgaagcagtcatttgcacaagtaaacaaaggatcgttgatgatccacttctcgccatgcctcaccctatcgctaagatattgtaattagtcttaggatacgaagaggcagtacattgtaactgactaacttctgtggctgatccttcagaaaagttgtgcgatgaagcaaacaattttctttagaagttcttcgctggcagattttagattcatgtggggaggtttgtcagctcagctttaatgtactggttatgtatctttaaatcagctgctgtacgactttttttttagctccaagccctggttgcagtcgcctaggccgtgtgattgtatcagtatgtaagacatgctatattttaatattcttatcgatatttattctgatgcattgtgtgtgaatattctgttcttcatcgcatgcaatgcaagtcatgtcttctgttggcttggtaggag

SEQ ID NO: 203489 - DNA, 3111 bp, Zea Mays
cctggtgcggcggtgccccacggcaaaaggaaacagcccgtccaatccatcccctcaccccattgcctctccctctccctcacccgcacctcaccactcctcggcctcacttcttcacaagttcacatcagcagcagctcacgaaacaggagcgtcataaagacatggtcgtcgcaggatagcctcagacccagcgacgcagcggcagcgacccaggaagcaacagcgaccggcatcgatcgcggcagccgaggcggggggacgggaggagggagggagcggtcgccgcaggagcagagcggcacggcatggggtcctgagtgactgactgactgacgactgagtgtctgactgagaaggagatggctggagcgcgacggccccggagccattaatggggcgctcatcctcctcgtcctcccactcctcgcctcccccccgccaggtcgcggtcggctccgctttttaaccggcttgtcctggagcggggcgaacggcgaacctcacgggcgccggaacacgaaccggaaccctagtggtggtggtggtggcgcgccccatgggcatcgacctcaacatggcggacggcgagagccaggagcgccgcccgccgccggcggtgtgccgggagctgtggcacgcgtgcgcggggcccgtggttgcgctaccgcggcggggcagcctggtcgtgtacctgccgcaaggccacctagccgcggccggcggcggcaacgtcgctgtggacctgccgccgcacgtggcgtgccgcgtcgcggatgtcgagttatgcgcggatgcggcgacggacgaggtgtacgcgcggctggcgctggtcgcggagggcgaggcatttgggagaaatctgcgtggtggtggagtcgatggggacgatgacatggaggattttgatgttgaaaggaagtcccggatgttgcacatgttctgcaaaacgcttacagcctctgacacaagcacacatggagggttctctgttcctcgtcgtgctgctgaggactgtttcccgcctctggattataatcagctcaggccttctcaagagctggttgccaaggatttgcatggagccaagtggaaatttcgtcatatatataggggtcagcctcgtaggcatctcttgactactggatggagttcatttgtcaataaaaagaaactggtttctggggatgcggtcttatttctccgaggtgatgatggtgaactaaggctgggcgtacggagggccattcagcttaaaaatgaggccctttttgacgatttcagttgcgacagtacaaaacggcatacattgttggctgtagctgattccttgaagcacaaaagtgtttttcacatttcttacaatccaagagctactgcttcagaatatattataccacaccataagttcctgaagagcctaaatcttccattctgtattggagcaaggatcaacttacagtgccataatgaagatgttagtgaaaggcgatctggaatggttgttcatgtcagtgaaatagatcccatgaaatggccaggctcgaagtggagaagcctgctggtaagatgggaggatggtgttgaatgtaacggccaagatagagtatctccatgggagattgagatagctggtggctctgtctctgttgctcattctgtgtccgcatctagctctaaaagaaccaagttgtgtcctcagggaaatttggacgttccaacaatgtatgttacagggaatgggaatggttgtactgactccgtggaaactggaaagtttcccagggtcttgcaaggtcaagatttgatgagttttaggactcgtcatgttccgtctgctcctcaaactgttgaggctgcaaaacttcaatcttctggtgctagcttcaatgaatctattggattctcagaggtcttgcaaggtcaagaaatttctcgggcagttcctatgttccaaggaatgatgtctgaggcttgttcactaaaaggaggatatgggctgcatagttatatgcgtaccccagttgctgttactggattgtcagccacaactcaagagtgttctctcacactatctactccgccaggagcacaagttccttctgtctaccctgataatatttttaaccgaactgtggttcgacagcttggactggcaagcaagtttgatggtggagctacaaatgcccagcagtctgtcccatttgataggccgagggaaatttggagcaagccacagcatgaaatatctgatcaaacgaaaatggatcactttgagactagaagagcttcagcacctggagatgatgctgctaagcatgggtctggtggagaggtggttcgcaaaactagctgcagactttttggtttctcgttgactgagaagatcttgccagcagatgatgatggcatcaaggaagtgacctatgagcctgagtgccagaatccacggatgctggacctgttcgggtacaactgctcagccccaagtgctgctcttccagctctgtgtgctgccccctttggaatgtgatgctacttcaataacgctgctgagtatttccatgtactcttagaagttttactttcctaatacccaagtgtatgtcataagctgccttttgacatcattccccctgttggtctgcctcaagcgaagcagtcatttgcacaagtaaacaaaggatcgttgatgatccacttctcgccatgcctcaccctatcgctaagatattgtaattagtcttaggatacgaagaggcagtacattgtaactgactaacttctgtggctgatccttcagaaaagttgtgcgatgaagcaaacaattttctttagaagttcttcgctggcagattttagattcatgtggggaggtttgtcagctcagctttaatgtactggttatgtatctttaaatcagctgctgtacgactttttttttagctccaagccctggttgcagtcgcctaggccgtgtgattgtatcagtatgtaagacatgctatattttaatattcttatcgatatttattctgatgcattgtgtgtgaatattctgttcttcatcgcatgcaatgcaagtcatgtcttctgttggcttggtaggag

SEQ ID NO: 203490 - DNA, 2128 bp, Zea Mays
caggcctggtgcagcagtgctgagagctgtctcactctgagtcatcaggtcagcctcgtaggcatctcttgactactggatggagttcatttgtcaataaaaagaaactggtttctggggatgcggtcttatttctccgaggtgatgatggtgaactaaggctgggcgtacggagggccattcagcttaaaaatgaggccctttttgacgatttcagttgcgacagtacaaaacggcatacattgttggctgtagctgattccttgaagcacaaaagtgtttttcacatttcttacaatccaagagctactgcttcagaatatattataccacaccataagttcctgaagagcctaaatcttccattctgtattggagcaaggatcaacttacagtgccataatgaagatgttagtgaaaggcgatctggaatggttgttcatgtcagtgaaatagatcccatgaaatggccaggctcgaagtggagaagcctgctggtaagatgggaggatggtgttgaatgtaacggccaagatagagtatctccatgggagattgagatagctggtggctctgtctctgttgctcattctgtgtccgcatctagctctaaaagaaccaagttgtgtcctcagggaaatttggacgttccaacaatgtggaatgggaatggttgtactgactccgtggaaactggaaagtttcccagggtcttgcaaggtcaagatttgatgagttttaggactcgtcatgttccgtctgctcctcaaactgttgaggctgcaaaacttcaatcttctggtgctagtaggttcctcagtaatgcacgtggctgcgcattgggtggtccaacaagcagactcgcagtgcataactctgattttacctaccaatctgtaggcttcaatgaatctattggattctcagaggtcttgcaaggtcaagaaatttctcgggcagttcctatgttccaaggaatgatgtctgaggcttgttcactaaaaggaggatatgggctgcatagttatatgcgtaccccagttgctgttactggattgtcagccacaactcaagagtgttctctcacactatctactccgccaggagcacaagttccttctgtctaccctgataatatttttaaccgaactgtggttcgacagcttggactggcaagcaagtttgatggtggagctacaaatgcccagcagtctgtcccatttgataggccgagggaaatttggagcaagccacagcatgaaatatctgatcaaacgaaaatggatcactttgagactagaagagcttcagcacctggagatgatgctgctaagcatgggtctggtggagaggtggttcgcaaaactagctgcagactttttggtttctcgttgactgagaagatcttgccagcagatgatgatggcatcaaggaagtgacctatgagcctgagtgccagaatccacggatgctggacctgttcgggtacaactgctcagccccaagtgctgctcttccagctctgtgtgctgccccctttggaatgtgatgctacttcaataacgctgctgagtatttccatgtactcttagaagttttactttcctaatacccaagtgtatgtcataagctgccttttgacatcattccccctgttggtctgcctcaagcgaagcagtcatttgcacaagtaaacaaaggatcgttgatgatccacttctcgccatgcctcaccctatcgctaagatattgtaattagtcttaggatacgaagaggcagtacattgtaactgactaacttctgtggctgatccttcagaaaagttgtgcgatgaagcaaacaattttctttagaagttcttcgctggcagattttagattcatgtggggaggtttgtcagctcagctttaatgtactggttatgtatctttaaatcagctgctgtacgactttttttttagctccaagccctggttgcagtcgcctaggccgtgtgattgtatcagtatgtaagacatgctatattttaatattcttatcgatatttattctgatgcattgtgtgtgaatattctgttcttcatcgcatgcaatgcaagtcatgtcttctgttggcttggtaggag

SEQ ID NO: 203491 - DNA, 3387 bp, Zea Mays
ctctgctggctgtcttttcttcttttgccttctttcttggtggccccatccgactccgcctgctcttcctcggcgccccatccatctgccttgcgtctgctccctctccaccaaaccctagccggccaacagagcttattgaaggccggctaggcgagagcagcatccaccgccgcgctctcatggcggcgcccaaaccgatctgggtgcgccaggctgaggaggccaagctcaagtccgaggcggagaccgctgccgccgccaaggccgccttcgaggccaccttcaaggccctcgctgccgcacccggcgacgacgacaaggacgccgaccccgccccgccctccccggccgaacccgcctcccccgagtccgatgacgatgccccggccccgccaggcccggtcgacccgtccaagtgctccgccgctggccccggcatcgggggcggctccgccggaactccctccaccttcaccgtcgtcgccaaggaccgccacagccggaggctcaccgccggcggggcgctcgtgcgcgtgcgtgtctcgcctgctgctgcagtcggcggggacgatctcgagggtgctgtcaaggacaacggggacggatcctacacggtcacctacgtcgtccccaagcgcggcaactacatggtacacgtcgatctcgacggcgcccccgtcatggggagccccttccccgtcttcttcagcggctccaccgtcacaccatcagccgctttccccaccgcgctacccgcagtcagctctgcctaccccaacatggtcaaccagaccatgcctaatatgcccaattacacaggcgcgccctccagtgccttccccagcctcctcggggccatgcctggttcctcagctggttcctcgagtggagtcatgctgcctggggttggtgcttcattgggggagatatgccgggactacatgaatgggaggtgcacaaaggtggagactgactgtaagttcacccacccaccgcaacagctgctgatgtcgatgcttgcagccacgagttctgtcagtgctcttgggcatgcgccgttggcgccctctgcggctgctatggcagctgcacaggccatcatggctgctcaggcactgcaggcacatgctgcgcaagccaaggccgcaggtggggcttcaggctcagtacacaaagctgatgaagctgatgccctgaagagaacagttcaaattagcaacctgagtccacttcttactgtggattatgttaagcagctatttggattgtgtggtaaagttgttgattgtaccatcacagattcaaaacacattgcttatgttgaatactccaaacctgaagaagcgactgcagcgttggagttcaataacaagaatgttggtggtcgtccattgaatgtggagatggctaaatctcttccttctaaagcaaataataacttgcctatgatgatgcagcaagccattcagctgcaacagatgcaattccagcaggcactaatgatgcaacagtcaatagcaacccaacaggctgctgcacgtgctgccaccatgaaatctgccactgaagcagctgcagcaagggctgctgagataagcaggaagttgaaggcggagggctttggtgcggacaacatggaagaaaagcatgccaaagggaagtcaagatcaccatcgccctctactcgtagatcaaaatctcggtcgagatcacctatcaaataccgtaggagcaggcggtcccgctcctactctcccccagttagacgctcaagggagcagcgatcacgatcaccatcaaaatctcgccactcaaagtacggtagtgatcgatcgcatagggatgataaggacaggtatagcaggtccgggagaagggagagtgaacgatctcgtgatcatcattcatctagttcaaggaggaacagaagtaaaagtagaagtccaaggcataagaagccctccagagttgattctaggtcacccaagaaacaaagagaggaaagtttaagcccatcaaaatcaaggtcagcaagggctggttcaagatcaccacgccatcataagggaagcaaatcatcgccaactcgtgaccgtcattctcgccatagcaggcattcaaggtccagatctcctggcagaaagcaccgtcacagtgataaaagggacagcagaaagtctgagattcaggacgacaaaagaagatctcatagaggtagcagacacgacaaagatgaaagttcagtaaaggacgaaggggaaagatctcatagaagcaatagaggtgacaaagatgaaaggtctgtaaaggatccagtggaagataaagggatggatactaaagttgttgcacataagaggagctcaacagtatctgaagatgaaattctgaacaacaatagtagtaaccataagaaatatagacatgaagttggtttggaagttgatggaaatgatgtgtgctctgctgcagctgacattgataggaaacatgaaactggagtagatggctctttggggggcgctgcagaatcagctatgtgatggctgctgtatcattgagtttgctgtttacagatggattgatgatgatggagaatgctgaactggtgtttattatctccttttctgatttaggagttttatttgcagggcatgaagatcttcggagaacttgagtgctgttcggagtgctcatctgatatattaaaatgctcatgattccatgaagagttcttggagcacatttctgggatgtcggttgaagatacaagggagtatacacttcctcaagtaaagtttttcaagggggttgacattggagtatgttttgagggaagtcagtgcatacttcattttgtgaatgaggactatgttgcggatgctcaaccggtgaggattacatgttctatcaggagtgaagacttgtgcacgagagctgcaagtgaacctttctgcatgtggatgcttatttatatcaacatgtgtctcccggataatatagcttgccgcttgcgagttgggatatgagcgctaatctaagcttggagtgattcaccaaaccgctctaagattaaggaaatatagggatattcaaacaacaaatggagttaatccaggtcgtgcctgtgggaaaaacatccatagacttcaatttgttagggaaaaatattttctaaaataagggtgaaatacactgttttttctctttcttttttgctcagaaagaataaaattgagtaaggaggtgctaaattctgtgccctggttcttttccctaaattttcagatttgtttttgaggtaactttacgaaatctggtcgatgtgaattgcaaatgtataaatttgacgtgataaatgacgggaatcaaaatcgagtgtaa

SEQ ID NO: 203492 - DNA, 3541 bp, Zea Mays
cttttcttcttttgccttctttcttggtggccccatccgactccgcctgctcttcctcggcgccccatccatctgccttgcgtctgctccctctccaccaaaccctagccggccaacagagcttattgaaggccggctaggcgagagcagcatccaccgccgcgctctcatggcggcgcccaaaccgatctgggtgcgccaggctgaggaggccaagctcaagtccgaggcggagaccgctgccgccgccaaggccgccttcgaggccaccttcaaggccctcgctgccgcacccggcgacgacgacaaggacgccgaccccgccccgccctccccggccgaacccgcctcccccgagtccgatgacgatgccccggccccgccaggcccggtcgacccgtccaagtgctccgccgctggccccggcatcgggggcggctccgccggaactccctccaccttcaccgtcgtcgccaaggaccgccacagccggaggctcaccgccggcggggcgctcgtgcgcgtgcgtgtctcgcctgctgctgcagtcggcggggacgatctcgagggtgctgtcaaggacaacggggacggatcctacacggtcacctacgtcgtccccaagcgcggcaactacatggcgcgccctccagtgccttccccagcctcctcggggccatgcctggttcctcagctggttcctcgagtggagtcatgctgcctggggttggtgcttcattgggggagatatgccgggactacatgaatgggaggtgcacaaaggtggagactgactgtaagttcacccacccaccgcaacagctgctgatgtcgatgcttgcagccacgagttctgtcagtgctcttgggcatgcgccgttggcgccctctgcggctgctatggcagctgcacaggccatcatggctgctcaggcactgcaggcacatgctgcgcaagccaaggccgcaggtggggcttcaggctcagtacacaaagctgatgaagctgatgccctgaagagaacagttcaaattagcaacctgagtccacttcttactgtggattatgttaagcagctatttggattgtgtggtaaagttgttgattgtaccatcacagattcaaaacacattgcttatgttgaatactccaaacctgaagaagcgactgcagcgttggagttcaataacaagaatgttggtggtcgtccattgaatgtggagatggctaaatctcttccttctaaagcaaataataacttgcctatgatgatgcagcaagccattcagctgcaacagatgcaattccagcaggcactaatgatgcaacagtcaatagcaacccaacaggctgctgcacgtgctgccaccatgaaatctgccactgaagcagctgcagcaagggctgctgagataagcaggaagttgaaggcggagggctttggtgcggacaacatggaagaaaagcatgccaaagggaagtcaagatcaccatcgccctctactcgtagatcaaaatctcggtcgagatcacctatcaaataccgtaggagcaggcggtcccgctcctactctcccccagttagacgctcaagggagcagcgatcacgatcaccatcaaaatctcgccactcaaagtacggtagtgatcgatcgcatagggatgataaggacaggtatagcaggtccgggagaagggagagtgaacgatctcgtgatcatcattcatctagttcaaggaggaacagaagtaaaagtagaagtccaaggcataagaagccctccagagttgattctaggtcacccaagaaacaaagagaggaaagtttaagcccatcaaaatcaaggtcagcaagggctggttcaagatcaccacgccatcataagggaagcaaatcatcgccaactcgtgaccgtcattctcgccatagcaggcattcaaggtccagatctcctggcagaaagcaccgtcacagtgataaaagggacagcagaaagtctgagattcaggacgacaaaagaagatctcatagaggtagcagacacgacaaagatgaaagttcagtaaaggacgaaggggaaagatctcatagaagcaatagaggtgacaaagatgaaaggtctgtaaaggatccagtggaagataaagggatggatactaaagttgttgcacataagaggagctcaacagtatctgaagatgaaattctgaacaacaatagtagtaaccataagaaatatagacatgaagttggtttggaagttgatggaaatgatgtgtgctctgctgcagctgacattgataggaaacatgaaactggagtagatggctctttggggggcgctgcagaatcagctatgtgatggctgctgtatcattgagtttgctgtttacagatggattgatgatgatggagaatgctgaactggtgtttattatctccttttctgatttaggagttttatttgcagggcatgaagatcttcggagaacttgagtgctgttcggagtgctcatctgatatattaaaatgctcatgattccatgaagagttcttggagcacatttctgggatgtcggttgaagatacaagggagtatacacttcctcaagtttttcaagggggttgacattggagtatgttttgagggaagtcagtgcatacttcattttgtgaatgaggtatgagtccatggatgtggtaaataatgctatcctcatggttagagtagcacccttaggacttgtttggatgtctatacattatcatctaaacaaggcctcaaatgccttagcacagttcttaagtccccaatccttgtatttggtattaataatacaatatgtttgtttgggttacctccccccccccccccccccccaaaaaaaattgcatctgggagtagacttcagctgatgttttagcttttgcaggcctggtatcttgaaaaggaacgtttcatgttcttgctgttccttttcccccactccccaactctgtttggtttggttttggttctcaggactatgttgcggatgctcaaccggtgaggattacatgttctatcaggagtgaagacttgtgcacgagagctgcaagtgaacctttctgcatgtggatgcttatttatatcaacatgtgtctcccggataatatagcttgccgcttgcgagttgggatatgagcgctaatctaagcttggagtgattcaccaaaccgctctaagattaaggaaatatagggatattcaaacaacaaatggagttaatccaggtcgtgcctgtgggaaaaacatccatagacttcaatttgttagggaaaaatattttctaaaataagggtgaaatacactgttttttctctttcttttttgctcagaaagaataaaattgagtaaggaggtgctaaattctgtgccctggttcttttccctaaattttcagatttgtttttgaggtaactttacgaaatctggtcgatgtgaattgcaaatgtataaatttgacgtgataaatgacgggaatcaaaatcgagtgtaa

SEQ ID NO: 203493 - DNA, 1781 bp, Zea Mays
aaatgttgaaacattcgaccatcgacctatcaataccagacaaacttggctaccttactgattttaagatcaccatcgccctctactcgtagatcaaaatctcggtcgagatcacctatcaaataccgtaggagcaggcggtcccgctcctactctcccccagttagacgctcaagggagcagcgatcacgatcaccatcaaaatctcgccactcaaagtacggtagtgatcgatcgcatagggatgataaggacaggtatagcaggtccgggagaagggagagtgaacgatctcgtgatcatcattcatctagttcaaggaggaacagaagtaaaagtagaagtccaaggcataagaagccctccagagttgattctaggtcacccaagaaacaaagagaggaaagtttaagcccatcaaaatcaaggtcagcaagggctggttcaagatcaccacgccatcataagggaagcaaatcatcgccaactcgtgaccgtcattctcgccatagcaggcattcaaggtccagatctcctggcagaaagcaccgtcacagtgataaaagggacagcagaaagtctgagattcaggacgacaaaagaagatctcatagaggtagcagacacgacaaagatgaaagttcagtaaaggacgaaggggaaagatctcatagaagcaatagaggtgacaaagatgaaaggtctgtaaaggatccagtggaagataaagggatggatactaaagttgttgcacataagaggagctcaacagtatctgaagatgaaattctgaacaacaatagtagtaaccataagaaatatagacatgaagttggtttggaagttgatggaaatgatgtgtgctctgctgcagctgacattgataggaaacatgaaactggagtagatggctctttggggggcgctgcagaatcagctatgtgatggctgctgtatcattgagtttgctgtttacagatggattgatgatgatggagaatgctgaactggtgtttattatctccttttctgatttaggagttttatttgcagggcatgaagatcttcggagaacttgagtgctgttcggagtgctcatctgatatattaaaatgctcatgattccatgaagagttcttggagcacatttctgggatgtcggttgaagatacaagggagtatacacttcctcaagtttttcaagggggttgacattggagtatgttttgagggaagtcagtgcatacttcattttgtgaatgaggactatgttgcggatgctcaaccggtgaggattacatgttctatcaggagtgaagacttgtgcacgagagctgcaagtgaacctttctgcatgtggatgcttatttatatcaacatgtgtctcccggataatatagcttgccgcttgcgagttgggatatgagcgctaatctaagcttggagtgattcaccaaaccgctctaagattaaggaaatatagggatattcaaacaacaaatggagttaatccaggtcgtgcctgtgggaaaaacatccatagacttcaatttgttagggaaaaatattttctaaaataagggtgaaatacactgttttttctctttcttttttgctcagaaagaataaaattgagtaaggaggtgctaaattctgtgccctggttcttttccctaaattttcagatttgtttttgaggtaactttacgaaatctggtcgatgtgaattgcaaatgtataaatttgacgtgataaatgacgggaatcaaaatcgagtgtaa

SEQ ID NO: 203494 - DNA, 2349 bp, Zea Mays
gaaacattcgaccatcgacctatcaataccagacaaacttggctaccttactgattttaagatcaccatcgccctctactcgtagatcaaaatctcggtcgagatcacctatcaaataccgtaggagcaggcggtcccgctcctactctcccccagttagacgctcaagggagcagcgatcacgatcaccatcaaaatctcgccactcaaagtacggtagtgatcgatcgcatagggatgataaggacaggtatagcaggtccgggagaagggagagtgaacgatctcgtgatcatcattcatctagttcaaggaggaacagaagtaaaagtagaagtccaaggcataagaagccctccagagttgattctaggtcacccaagaaacaaagagaggaaagtttaagcccatcaaaatcaaggtcagcaagggctggttcaagatcaccacgccatcataagggaagcaaatcatcgccaactcgtgaccgtcattctcgccatagcaggcattcaaggtccagatctcctggcagaaagcaccgtcacagtgataaaagggacagcagaaagtctgagattcaggacgacaaaagaagatctcatagaggtagcagacacgacaaagatgaaagttcagtaaaggacgaaggggaaagatctcatagaagcaatagaggtgacaaagatgaaaggtctgtaaaggatccagtggaagataaagggatggatactaaagttgttgcacataagaggagctcaacagtatctgaagatgaaattctgaacaacaatagtagtaaccataagaaatatagacatgaagttggtttggaagttgatggaaatgatgtgtgctctgctgcagctgacattgataggaaacatgaaactggagtagatggctctttggggggcgctgcagaatcagctatgtgatggctgctgtatcattgagtttgctgtttacagatggattgatgatgatggagaatgctgaactggtgtttattatctccttttctgatttaggagttttatttgcagggcatgaagatcttcggagaacttgagtgctgttcggagtgctcatctgatatattaaaatgtattcctcattaacttgagattcgctccttggagcaaacttctaaatgtaaagctggtgttgtaaggcgatttcatacagtgaggtagaaaccaaccatgtatttgtcgtttcaggctcatgattccatgaagagttcttggagcacatttctgggatgtcggttgaagatacaagggagtatacacttcctcaagtaaagtacacatatacaagactaataaacaactcatcttctaggcacttgcatttgaatcggaatgctttggctagtaaaatggtccaaatatgcttgtctacatacttctgatgcacttaatttgcttgaagttctgtttttatatcttgtatcaggaatggttcaaaaagtttgacttgctataccaatacttgtactttatcttttgacagtcacaatgaattgtgatgtaggttttatccatcttgtctactgctttttgaccagtctacctaaagttggtgcccttggtagctccagagataagctgtgaatcttgaaagttgaaacaattgcattgttacaaatttttttttttaaattttttgcttcactattgtttctgcttttgtctgcattgttcgctgcaccttaccatgctgtgacggttgttgtcatgctggaaaacctgtgcaggtttttcaagggggttgacattggagtatgttttgagggaagtcagtgcatacttcattttgtgaatgaggactatgttgcggatgctcaaccggtgaggattacatgttctatcaggagtgaagacttgtgcacgagagctgcaagtgaacctttctgcatgtggatgcttatttatatcaacatgtgtctcccggataatatagcttgccgcttgcgagttgggatatgagcgctaatctaagcttggagtgattcaccaaaccgctctaagattaaggaaatatagggatattcaaacaacaaatggagttaatccaggtcgtgcctgtgggaaaaacatccatagacttcaatttgttagggaaaaatattttctaaaataagggtgaaatacactgttttttctctttcttttttgctcagaaagaataaaattgagtaaggaggtgctaaattctgtgccctggttcttttccctaaattttcagatttgtttttgaggtaactttacgaaatctggtcgatgtgaattgcaaatgtataaatttgacgtgataaatgacgggaatcaaaatcgagtgtaa

SEQ ID NO: 203495 - DNA, 1751 bp, Zea Mays
gaatatgctatagtcttccctcttttgtatacatagagatcaccatcgccctctactcgtagatcaaaatctcggtcgagatcacctatcaaataccgtaggagcaggcggtcccgctcctactctcccccagttagacgctcaagggagcagcgatcacgatcaccatcaaaatctcgccactcaaagtacggtagtgatcgatcgcatagggatgataaggacaggtatagcaggtccgggagaagggagagtgaacgatctcgtgatcatcattcatctagttcaaggaggaacagaagtaaaagtagaagtccaaggcataagaagccctccagagttgattctaggtcacccaagaaacaaagagaggaaagtttaagcccatcaaaatcaaggtcagcaagggctggttcaagatcaccacgccatcataagggaagcaaatcatcgccaactcgtgaccgtcattctcgccatagcaggcattcaaggtccagatctcctggcagaaagcaccgtcacagtgataaaagggacagcagaaagtctgagattcaggacgacaaaagaagatctcatagaggtagcagacacgacaaagatgaaagttcagtaaaggacgaaggggaaagatctcatagaagcaatagaggtgacaaagatgaaaggtctgtaaaggatccagtggaagataaagggatggatactaaagttgttgcacataagaggagctcaacagtatctgaagatgaaattctgaacaacaatagtagtaaccataagaaatatagacatgaagttggtttggaagttgatggaaatgatgtgtgctctgctgcagctgacattgataggaaacatgaaactggagtagatggctctttggggggcgctgcagaatcagctatgtgatggctgctgtatcattgagtttgctgtttacagatggattgatgatgatggagaatgctgaactggtgtttattatctccttttctgatttaggagttttatttgcagggcatgaagatcttcggagaacttgagtgctgttcggagtgctcatctgatatattaaaatgctcatgattccatgaagagttcttggagcacatttctgggatgtcggttgaagatacaagggagtatacacttcctcaagtttttcaagggggttgacattggagtatgttttgagggaagtcagtgcatacttcattttgtgaatgaggactatgttgcggatgctcaaccggtgaggattacatgttctatcaggagtgaagacttgtgcacgagagctgcaagtgaacctttctgcatgtggatgcttatttatatcaacatgtgtctcccggataatatagcttgccgcttgcgagttgggatatgagcgctaatctaagcttggagtgattcaccaaaccgctctaagattaaggaaatatagggatattcaaacaacaaatggagttaatccaggtcgtgcctgtgggaaaaacatccatagacttcaatttgttagggaaaaatattttctaaaataagggtgaaatacactgttttttctctttcttttttgctcagaaagaataaaattgagtaaggaggtgctaaattctgtgccctggttcttttccctaaattttcagatttgtttttgaggtaactttacgaaatctggtcgatgtgaattgcaaatgtataaatttgacgtgataaatgacgggaatcaaaatcgagtgtaa

SEQ ID NO: 203496 - DNA, 2208 bp, Zea Mays
atatgctatagtcttccctcttttgtatacatagagatcaccatcgccctctactcgtagatcaaaatctcggtcgagatcacctatcaaataccgtaggagcaggcggtcccgctcctactctcccccagttagacgctcaagggagcagcgatcacgatcaccatcaaaatctcgccactcaaagtacggtagtgatcgatcgcatagggatgataaggacaggtatagcaggtccgggagaagggagagtgaacgatctcgtgatcatcattcatctagttcaaggaggaacagaagtaaaagtagaagtccaaggcataagaagccctccagagttgattctaggtcacccaagaaacaaagagaggaaagtttaagcccatcaaaatcaaggtcagcaagggctggttcaagatcaccacgccatcataagggaagcaaatcatcgccaactcgtgaccgtcattctcgccatagcaggcattcaaggtccagatctcctggcagaaagcaccgtcacagtgataaaagggacagcagaaagtctgagattcaggacgacaaaagaagatctcatagaggtagcagacacgacaaagatgaaagttcagtaaaggacgaaggggaaagatctcatagaagcaatagaggtgacaaagatgaaaggtctgtaaaggatccagtggaagataaagggatggatactaaagttgttgcacataagaggagctcaacagtatctgaagatgaaattctgaacaacaatagtagtaaccataagaaatatagacatgaagttggtttggaagttgatggaaatgatgtgtgctctgctgcagctgacattgataggaaacatgaaactggagtagatggctctttggggggcgctgcagaatcagctatgtgatggctgctgtatcattgagtttgctgtttacagatggattgatgatgatggagaatgctgaactggtgtttattatctccttttctgatttaggagttttatttgcagggcatgaagatcttcggagaacttgagtgctgttcggagtgctcatctgatatattaaaatgctcatgattccatgaagagttcttggagcacatttctgggatgtcggttgaagatacaagggagtatacacttcctcaagtaaagtacacatatacaagactaataaacaactcatcttctaggcacttgcatttgaatcggaatgctttggctagtaaaatggtccaaatatgcttgtctacatacttctgatgcacttaatttgcttgaagttctgtttttatatcttgtatcaggaatggttcaaaaagtttgacttgctataccaatacttgtactttatcttttgacagtcacaatgaattgtgatgtaggttttatccatcttgtctactgctttttgaccagtctacctaaagttggtgcccttggtagctccagagataagctgtgaatcttgaaagttgaaacaattgcattgttacaaatttttttttttaaattttttgcttcactattgtttctgcttttgtctgcattgttcgctgcaccttaccatgctgtgacggttgttgtcatgctggaaaacctgtgcaggtttttcaagggggttgacattggagtatgttttgagggaagtcagtgcatacttcattttgtgaatgaggactatgttgcggatgctcaaccggtgaggattacatgttctatcaggagtgaagacttgtgcacgagagctgcaagtgaacctttctgcatgtggatgcttatttatatcaacatgtgtctcccggataatatagcttgccgcttgcgagttgggatatgagcgctaatctaagcttggagtgattcaccaaaccgctctaagattaaggaaatatagggatattcaaacaacaaatggagttaatccaggtcgtgcctgtgggaaaaacatccatagacttcaatttgttagggaaaaatattttctaaaataagggtgaaatacactgttttttctctttcttttttgctcagaaagaataaaattgagtaaggaggtgctaaattctgtgccctggttcttttccctaaattttcagatttgtttttgaggtaactttacgaaatctggtcgatgtgaattgcaaatgtataaatttgacgtgataaatgacgggaatcaaaatcgagtgtaa

SEQ ID NO: 203497 - DNA, 2410 bp, Zea Mays
gaaatcaagaggatactctagctcaatagctctgccgcagagacttgctttgcttgacgttcactaggtgcaccaagaagccaaagccaatggcgactctacctctgctcctgcacctgctatgggaggcctctccgtgggcccgtgcaggcgcggcgacggccgccgtggtgctggtgtggctagcggcctggacgcttgagtgggcgtggtggacgccacggcggctagacagagccctacgggcccagggcctcaagggcaccaggtaccgcctcctcaccggcgacgtgagggagaacgctcggctcaaccgagaagcccgcacgaagccactgccgcttgggagtcacgacatcatcccacgcgtgctacccatgttccacaacgcggtgaaggagaatgggacaaattcattcacttggtttggcccgattccgagggtgataattccagacccggaattaatgagagaggttttgtctaacaagtttggccactttggcaaaccactgtttagccgtgttggcaagttactagccaatgggctcgctaatcatgaaggcgagaaatgggcaaaacacaggagaattctcaaccctgcattccaccatgagaaaataaagcggatgctgcctgtatttgctacctgttgtgccgatatgattaacagatgggaaaattcaatgtcttccaaggaaccttctgagatggacgtctggcctgagttccaaaatcttactggagatgttatctcaagaactgcttttggtagcaactatcaggagggcaggaacatcttccagctacaaggagagcaggctgaacgccttatacaatcttttcaaacaatatttatcccaggctactggtttgttcttttccttataaatagtagcaatttgttcatgagactcgttgcgtaggaatatttacgtatccatgttttaataatgacttgatatcatttttagtaaaggcgaaagggtctctaacgtaatggttaaggctttcgaataacacctccagcacctaggttcgatctctcaaaggggcgaatttctggcttggttaaaaaaatcatctcgttgtgccccacccgctcccgggttacgtcctgcgcgccaccctccggtgacggcccgctagtgatgggggccagggttcgaagattttctcggctgggaccatgtttcggtctcttcttaatataatacagggagaatggtctttccctccccggccgagttttttttatcatttctagtaaaggatgagatacaaaaagacttctccacatccaataaaattttgaacaccatctacattttacttctacttcagttgtcgaagctgagtcgggggataaagactagggaagttctgcggcaggaatcaagaatctgttttgttataacactgttgaacatatgcaggctcttgcccaccaaaaataacagaaggatgaaagaaattgatcgggagatccgtaaaattctgcatggaataatcaggaaaagagagagggcttttatagatagtgaaggaactaatgatgacttgttaggcttattggttgagtcaaacatgagggaatcaaatgggaatgcaaaactcggaatgactaccgaagatataatcgaggaatgcaagttattttactttgcaggtatggagacaacatcagtcctgcttacatggacgttaattctgctaagcatgcaccctgaatggcaagagcaggcaagagaagaagttttaaaccactttggaatgggtacaccagactttgataacttgaaccgcctgaagattgtaaccatgattttatatgaggtccttaggttgtacccaccagtagttttcctatccagaagaacctacaaggaaatggagctcggtggcatcaaatatccttcaggcgtgagccttctactgcccatcatcttcattcaccatgatcccaacatctggggaaaagacgcaagcgagttcaatccacagaggttcgaggatggcatttccaatgcgaccaagcatcaggccgccttctttccatttggatggggtcccaggatctgcataggccagaacttcgcgttgctggaagcaaagatggcactgagtaccatcctccaacgcttctcctttgagctctcatcatcctacactcatgcgccatacaccgtgataactttgcatcctcagcatggtgctcaaatcaggtttaaatttagctttgatatgaataatgagaaccaagtgtgtatgaatggagtaggggtgtaatcggatcggatacgaacggatattgcttgtaccatatttgtttcatattttctgtttggattcagataacatcaagttgtgtcggataagatttgaatagatattgatatcttaaatatcc

SEQ ID NO: 203498 - DNA, 1714 bp, Zea Mays
gaatcggaggcggccaggctccctcctcctccctgcaaatcctgcagacaccaccgctcgtttttctctccgggacaggagaaaaggggagagagaggtgaggcgcggtgtccgcccgatctgctctgccccgacgcagctgttacgacctcctcagtctcaggagcaagatgggtgccggcggcaggatgaccgagaaggagcgggagaagcaggagcagctcgcccgagctaccggtggcgccgcgatgcagcggtcgccggtggagaagcctccgttcactctgggtcagatcaagaaggccatcccgccacactgcttcgagcgctcggtgctcaagtccttctcgtacgtggtccacgacctggggtgcgtgtgcaccggcgtgtgggtcatcgcgcacgagtgcggccaccacgccttctcggactactcgctcctggacgacgtggtcggcctggtgctgcactcgtcgctcatggtgccctacttctcgtggaagtacagccaccggcgccaccactccaacacggggtccctggagcgcgacgaggtgttcgtgcccaagaagaaggaggcgctgccgtggtacaccccgtacgtgtacaacaaccccggtcggccgggtggtgcacatcgtggtgcagctcaccctcgggtggccgctgtacctggcgaccaacgcgtcggggcggccgtacccgcgcttcgcctgccacttcgacccctacggccccatctacaacgaccgggagcgcgcccagatcttcgtctcggacgccggcgtcgtggccgtggcgttcgggctgtacaagctggcggcggcgttcggggtctggtgggtggtgcgcgtgtacgccgtgccgctgctgatcgtgaacgcgtggctggtgctcatcacctacctgcagcacacccacccgtcgctcccccactacgactcgagcgagtgggactggctgcgcggcgcgctggccaccatggaccgcgactacggcatcctcaaccgcgtgttccacaacatcacggacacgcacgtcgcgcaccacctcttctccaccatgccgcactaccacgccatggaggccaccaaggcgatcaggcccatcctcggggactactaccacttcgacccgacccctgttgccaaggcgacctggcgcgaggccagggagtgcatctacgtcgagcccgaggaccgcaagggcgtcttctggtacaacaagaagttctagccgccgccgctcgcagagctgagaggacgctaccataggaatgggagcaggaaccaggaggaggagacggtactcgccccaaagtctccgtcaacctatctaatcgttagtcgtcagtcttttagacgggaagagagatcatttgggcacagagacgaaggcttactgcagtgccatcgctagagctgccatcaagtacaagtaggcaaattcgtcaacttagtgtgtcccatgttgtttttcttagtcgtccgctgctgtaggctttccggcggcggtcgtttgtgtggttggcatccgtggccatgcctgtgcgtgcgtggccgcgcttgtcgtgtgcgtctgtcgtcgcgttggcgtcgtctcttcgtgctccccgtgtgttgttgtaaaacaagaagatgttttctggtgtctttggcggaataacagatcgtccgaacgacaacctttttttgggtagctgtagtggttttcc

SEQ ID NO: 203499 - DNA, 678 bp, Zea Mays
attctttccggtatttgggtgctttgcaacgattgcaacaaggtctcagaggtgaactttcacgtgattggccacaagtgcagccactgcagatcgtacaacacccgaacaacatcgcgccctgcagatttatccggaagcagctcaccttcaacagactcatccgacaacaacatatagagaagaaaccattgacagagccaatatgattgaagaaccggaggaggaaacattgtttcggggcgtgcgtgcttgccaaacttgaagactcccagccgtttattggccctcatcttgtctagattcagttcattccatgagtctttgctgttgtggcaacttccagcttgcgcatcgctgggtcaacaacccacatggccggcgtagctgtccctttgaatcttgttcgcagccgtgattttatcactgtggatgaaacgtaatcacatacttactgtaatctactatggttgaagatgtgtgcccccctgactcatgccttgtgtgcttgtgctgaactgtttatgaattcccatgctgttccgtaacactatattgccatttgtgtttccttatctgtcaagtaccgccaagtgtgcggtgaaattgtaattatttgcaatgaatagaatcttatatctatacctaataataaagactcaacatttctacggtgtt

SEQ ID NO: 203500 - DNA, 1112 bp, Zea Mays
acgacaaccttctatctatgaattatatgtcatgtctctttaattatctctatatcaatgtctacctatgtgatataagataccgtagcaacgcacgtgcacctaattagtgaatttggaagtgtgactttataaaaacaaatgagttatatgttcaagataatgttagtagtcatactatttaaagtccttttactttcttatttggatgagtcttttttcacatatcttccttcttaatgtaccattcatggttctattgatagctcaaggtcatgagaatgttgccgctgagtactacaaacagcaggtggagatgttagagggttttagtgagatggacgcatttacagatcgtgctttcctacctgtaatgtccaaggaagaacacgaaaaagttgtcaggagtgaatcattagccatatggctgtctaatattgcaaatatggttctctttgctgcaaaagtgtatgcttcaaaactcaattggaaaagcgtatgcagccgctggtgagttcttttttgccataacctgtacttccaaaaatgatggttgatgttgatatctagatctgttgtccagaatgttctgtactcttttctgcgaaaatgatttacttatcttttacgtaatctgaattattgtctctgcattttgaatagaatgagcattgctttccatgtttctttctgaggcaaacaataaagatctgaattgataggaaatcaataaacttactcaacactgtgtgctcactactcagtaattcctacttactggaatataaattacctgtctataaatactaattgttgagttcacgattgaagtcatagaaccatggaccctttttatccagtcacctctgtttgaattttctttaagttaatgatgaacttgttatgacttccaatctgacatttgcttttgagatgcgttgtcacttgttggggcaacttccatgtgtcaaacttttttttgtcatgccttttttcatattcttttttctttcaactttactgggattttctgatagatcacctcttagttatattgttgatttgtgatccttccaaaaccatactatcaactaaaaatgatcagttcatcc

SEQ ID NO: 203501 - DNA, 1269 bp, Zea Mays
cgacaaccttctatctatgaattatatgtcatgtctctttaattatctctatatcaatgtctacctatgtgatataagataccgtagcaacgcacgtgcacctaattagtgaatttggaagtgtgactttataaaaacaaatgagttatatgttcaagataatgttagtagtcatactatttaaagtccttttactttcttatttggatgagtcttttttcacatatcttccttcttaatgtaccattcatggttctattgatagctcaaggtcatgagaatgttgccgctgagtactacaaacagcaggtggagatgttagagggttttagtgagatggacgcatttacagatcgtgctttcctacctgtaatgtccaagtgacgacaccaatagatatctggccactttattgacctgcaggaagaacacgaaaaagttgtcaggagtgaatcattagccatatggctgtctaatattgcaaatatggttctctttgctgcaaaagtgtatgcttcagtaaggagtggttcacttgctattatcgcatcaactttggattctcttctagacttgttgtcatgatatatcttgtggtttactgccttttcaatgcaaacgccaaatccctatagaaactcaattggaaaagcgtatgcagccgctggtgagttcttttttgccataacctgtacttccaaaaatgatggttgatgttgatatctagatctgttgtccagaatgttctgtactcttttctgcgaaaatgatttacttatcttttacgtaatctgaattattgtctctgcattttgaatagaatgagcattgctttccatgtttctttctgaggcaaacaataaagatctgaattgataggaaatcaataaacttactcaacactgtgtgctcactactcagtaattcctacttactggaatataaattacctgtctataaatactaattgttgagttcacgattgaagtcatagaaccatggaccctttttatccagtcacctctgtttgaattttctttaagttaatgatgaacttgttatgacttccaatctgacatttgcttttgagatgcgttgtcacttgttggggcaacttccatgtgtcaaacttttttttgtcatgccttttttcatattcttttttctttcaactttactgggattttctgatagatcacctcttagttatattgttgatttgtgatccttccaaaaccatactatcaactaaaaatgatcagttcatcc

SEQ ID NO: 203502 - DNA, 6228 bp, Zea Mays
aaggcctccacggagggtatacactatggtccaaggttgatatttcttacagcgtgagaccactaaatttgctgttgtccagctcatcccatcgcaggaccaacagataaagcctcccagctcactcgtccccaaaacagtccacacttgattttcttttcagtagagctgaggagaatctagatccttcactgtgtacctcgtccataattccctttacacacacaagtgagatcagcagggagaggatcttcttcagttactcaaacccaacactgaatcagctttatcaaccatttctgccctattgcacagctctttgtttgatcccctttatctcacaaattcacttagcaacaaactcatcatccttaactaaatttagtcaccaactacagccctaccaacttggtatagcaccccaaggctgcaactataaagaacacaagttatgggcaccaaactagagcccaaaagcactgaaaagtgcagtttcagcttaactgaaacaacccaaaacagtctgtcagagggagtttagatgcattctactccacagtttgcaaggcactaggtccatctcacttaaggaaacttttacctttttatttggtctctaatttcactatatgattctcagcccaaatcttaatagaatggtcacactagcgccacaaactaggtatcaagcactgaaattttggtttcagttgactgttcagtcacaaccactctgacagagaagattgggagatactttactcctaggtttatgtagaaccaagtctaactctctttatgaaacttgttctctgtactatgggctccaactttgctatggaaaatttagtcccaagccacttggattgatcacaaatgagctccaaagttgagccaaacacacaatgtctgtgtgcataaataagactaagtctgaattcagatttagcacattgaatctttgaactactgttactgtctgttccaactggttttagtggcattacccttaatcaaatctgcacaccgaagtatgggcttccactttggtacagcactcatagcccagaattacatggatcatcccttaaggagtatcccaaatctgcttcagactgaaaaatcagcaggactgaatttttatctaagtctgattttccaaactgaacactgcatctttaggctcctttttctacaagttccatatagatttagagcttcaatacttaataaaagttgttctcctatagttaatctacaagtttactatagcaaccttttgccaaaagctcccagattaaaacatacaggggtccagaaataggtagagcaaactgtttttagttgaaccaaaactgtattaaatctgaaatctgcaaattactccaaatttctcttcaaaacttgaaaatctcaacacatgaaaattgttcacttttctaagctccataactttggtatatggacttttagcaaaacatagctagatcttaaaatccacttttgggctagtttagagttgaaattggacttgacctgcttcaagtgtttcatcaatttattgcatcctactaaaaacaaggttaaccttaagctcaaacccaactttggtgtatgtagctcatgtccaaatttccattggtttaaaagtggtgcacttaaacttgattgcaaacagggtttttaatcttccctggctcccaacaacataacacaccatatttgagttgaatttttgacctagtaaaatgcattctagggatatcaagcaagatgatgcggatgcgtatgatgtcatgccaaagttttagttctcgtaacactaggggtgttacactaccagagatggtctgtgatgacatgccctcgctctctgccctctgctttgcgcgcttggttggatgctcacttgattcctactgaccacggggatggtgatcgactgatcgttaacatcacttgattcctctatttttatattgattcctactgaagatggacaatataaaaacctaaaatggaccaattctttctttgagggctacagccctactctggtgtaacttatacttgttctagcacttggccctctgatctggtgaataagttatgcagaagaaaatttatgttttattttatatttaactgtactttgttgcagcttgtaggtactgatcagagggccaggtgctatccacgaacgatagtgtaatgtctaggaacgatagctgatttggaaaacctgcaaagtctattcacaacagtgatatataatggtcacctattatgaagaaatagtgaatgggagaagggttgagttttggagccggtgcatgcaaatcatataccaggtttatgctataatgttttccttatgaagaattaaatatttgtgtgtttgcacagcgaggtcatattttcatattgattttctgtacctgggactttggagaggggaacacgttccaaaaccggagcgtttcatcactagcaccagtaactatggtctgttggtatcagcagtgagaacaaatatgccaggtatgtgtgtctgtgagtgtgcgtgtaacagaactcagaaacagatcaccaaaactcacctagccatcaggggaaatagctaagtacaatactctgtatgtatgccatgtcaaagtggcaagctgcaaataccaaaggagacttgaactaacacaagcaagtatagcataatatttcagaataataatcattcatcatacatgtatgaatcttgaacgttttttttcaatttttctaatttagcatttgcgaccatttgcccagtgagtgtataatgtaatttaattcaacaaataatcactaatataacatgaaaattaatagttttttgttcggtttctctgtacacattacgccattgttgccccagttcatactattttctatcttctctttaccttctcactatcatatcatccgattgcaattagacaatcaaacctaatcatttaatctatattgtctaaaatacatgttgcaagcatggcatgaagtagtatcacattctatagagttacaggttcaattcatcattgctgaggatatgcatcagtatttatgaactcgacattaatatatatttagcctttattactgtatctgaggtctggtctgtttccatgaaggtctgaacaagtgaacatgaattcgttgggttccttaagtaccctgttttggtcattattttttccttttcgatgaaattgtcggtacaacaggctgtggccaacagttaagcatttgtgtcatcgcgatttatcaggtggaacgtgacaaggatgggtgtggctggattacaacgggattgaagtcgattggcaggagatgatgctactcagcaattgttcccttactgtaactgcttacaaaggtattgatatggtgagatattgttacttttgaatacctcactgtgttacttctgaaagccaagtgaggaggaatctataccttattgtgttcccttttttctttgtattttatttggtttttgcaagttgtgcaattgtggtgtcgcatttttttagttaacggaagaaatcttgcatctaattgtgcatacgtggactctcaattgtccttgatgatccggatggtgtttctgttactatattacaactaaaaaagttaaatcaagtttactccaatttaattctaatctttatatttccatagttatgtgatgtagtgtctatctaactttaagatcttctaatatggtttatcctagactctgaaccatgagatatgtatatgtttttcttaatcgtgtgcaacgtttccttttgtttggccaatgctgaggcccaacactgtgtactatgttgtggatctcgaggggataatatgattatatgtcgttgcaacacacaaacattgcactattaaaatatatgagagaaattaaactcctcccgtgtgtctcatacaaaaaaaatcatctgttataggtcgttgcctcactgattaagtttttgtttcctttatttgcttgagttgatcagtctacagtttgtcctttgcctaatattttggttccacagttgttttgtgcatccaaaagcagtacatcgatttttaggattgctgcatgcatcctaacataaccactgtgaaaagtagtccacttgtttattggtaactggtttgctacttttgattaccctacaaagggataaaattgattatgatgattataagtgtatgggattgtagataatgttgataagaaaagatgagggataccacatacttgttttttagtgttggtcttttccttttgcatgatcatctaactatgttagtcgtctactgctcgtgggagccggcgaggtgcttgctagactcggtggaagtggagtttagttacgatgccgatatcagcctcgtgtccgtcgacctgctcatgccggactaggagttgtactgatggaggatggagattatggtgtaggccgtgacacgcgtgcgcaggagtcggtgtcggtgcttttctttggactgattaattctgagctggacgaccattgacatttgtgatgtgtacgagatgtattgtggcgtctcgttgtataattggtactgggagtatgttttgctatgtccgtatttatatatcatgtgtgctatgaatgttgtataatactagataataagaccaactccagcagcttacccatatccatattcaaactatacaaacaatacaatctacagtgcaaaaggtgtttttgtgaccatatgggtgaactattgtacattgcacctatatgatcactaaaaaacactgttttgcatcgttttatattgtagattgcattatttatagagtgttgtttgaatatgggtatgagtataggtaagctggtggagatgatctaaaggatgatctccttcaataggaatctcttttctaaataataaatgtttttaataggaatctcttattcatttcgatcttgtattattaactttggagttgcctatttcgattaatagtgacaatgagccaaattttggttgttcgaaatggtagacttcgatatttattatgattgttatgttgatgcttgatagcatcactaaataatgacatgtgcgtgcacaagtgccctctgttgcaacgcacgggcatatacctagtattggtcatatgcttcttgttgtattatgtggtgataatacataattagtgtgtgcttccgatgatatgaatcaattggtatctattgtgtttgtcctgtaatagattttcatgtggttctggtgctttaaattggtatcttaatggtgaatagtggtaggttgatattcctgtggtatatccatttaattggtttttaactctgattctgtgcatttgtgtgttatacgcatcacggtttaattattgacacaatgtatcccatgggtgctaaggtgtagttatgcttcgaattagcctaagtatgtgcaatttggcatataaggccaaagttaagattttaatgtaagcacatatttagggggaacattctataaacttagaattcaaaatttgtgctttaaatcttattcttgtgtaagctttaattgtgttgtcatcgatcccaaaaggggggagattgaaagctctcttgtgggttttggtgtttagatgacaacccaattaaaggaccaacaagtgtgctaagtgttgaacaggtgcttaatgcaaagctaacaaggttcaacacaagtgaacggtataatggacatcacaggtaagatggacagactctatgtgtgtaactcagagacaaccgatcaagccaaggatggaggcaagaagagcttcgaggtaccgagtgcacgggagaaggtcaaggagacgaggaacccaaagccaggggtgaagaagaagacttgcaaagtcaaggttgatcgagttaagaagagttatggtgcatcaaggatcactacataaggacatgacttacaaccaatgaggtaacatctacagttatgtggtgtaagtcataaggctcaagatcaagctcgggaagtgaacaagggggttggagctcagatatgttaatctagatcaagtcaagttgacttgatggtttagagtccaacatcgacctcaaacatgccaaattgggtaaaacgatgaaaaaggttaagtatgtaaggtttgagtgttcaaccattttgcatacacctctt

SEQ ID NO: 203503 - DNA, 6086 bp, Zea Mays
aaggcctccacggagggtatacactatggtccaaggttgatatttcttacagcgtgagaccactaaatttgctgttgtccagctcatcccatcgcaggaccaacagataaagcctcccagctcactcgtccccaaaacagtccacacttgattttcttttcagtagagctgaggagaatctagatccttcactgtgtacctcgtccataattccctttacacacacaagtgagatcagcagggagaggatcttcttcagttactcaaacccaacactgaatcagctttatcaaccatttctgccctattgcacagctctttgtttgatcccctttatctcacaaattcacttagcaacaaactcatcatccttaactaaatttagtcaccaactacagccctaccaacttggtatagcaccccaaggctgcaactataaagaacacaagttatgggcaccaaactagagcccaaaagcactgaaaagtgcagtttcagcttaactgaaacaacccaaaacagtctgtcagagggagtttagatgcattctactccacagtttgcaaggcactaggtccatctcacttaaggaaacttttacctttttatttggtctctaatttcactatatgattctcagcccaaatcttaatagaatggtcacactagcgccacaaactaggtatcaagcactgaaattttggtttcagttgactgttcagtcacaaccactctgacagagaagattgggagatactttactcctaggtttatgtagaaccaagtctaactctctttatgaaacttgttctctgtactatgggctccaactttgctatggaaaatttagtcccaagccacttggattgatcacaaatgagctccaaagttgagccaaacacacaatgtctgtgtgcataaataagactaagtctgaattcagatttagcacattgaatctttgaactactgttactgtctgttccaactggttttagtggcattacccttaatcaaatctgcacaccgaagtatgggcttccactttggtacagcactcatagcccagaattacatggatcatcccttaaggagtatcccaaatctgcttcagactgaaaaatcagcaggactgaatttttatctaagtctgattttccaaactgaacactgcatctttaggctcctttttctacaagttccatatagatttagagcttcaatacttaataaaagttgttctcctatagttaatctacaagtttactatagcaaccttttgccaaaagctcccagattaaaacatacaggggtccagaaataggtagagcaaactgtttttagttgaaccaaaactgtattaaatctgaaatctgcaaattactccaaatttctcttcaaaacttgaaaatctcaacacatgaaaattgttcacttttctaagctccataactttggtatatggacttttagcaaaacatagctagatcttaaaatccacttttgggctagtttagagttgaaattggacttgacctgcttcaagtgtttcatcaatttattgcatcctactaaaaacaaggttaaccttaagctcaaacccaactttggtgtatgtagctcatgtccaaatttccattggtttaaaagtggtgcacttaaacttgattgcaaacagggtttttaatcttccctggctcccaacaacataacacaccatatttgagttgaatttttgacctagtaaaatgcattctagggatatcaagcaagatgatgcggatgcgtatgatgtcatgccaaagttttagttctcgtaacactaggggtgttacactaccagagatggtctgtgatgacatgccctcgctctctgccctctgctttgcgcgcttggttggatgctcacttgattcctactgaccacggggatggtgatcgactgatcgttaacatcacttgattcctctatttttatattgattcctactgaagatggacaatataaaaacctaaaatggaccaattctttctttgagggctacagccctactctggtgtaacttatacttgttctagcacttggccctctgatctggtgaataagttatgcagaagaaaatttatgttttattttatatttaactgtactttgttgcagcttgtaggtactgatcagagggccaggtgctatccacgaacgatagtgtaatgtctaggaacgatagctgatttggaaaacctgcaaagtctattcacaacagcgaggtcatattttcatattgattttctgtacctgggactttggagaggggaacacgttccaaaaccggagcgtttcatcactagcaccagtaactatggtctgttggtatcagcagtgagaacaaatatgccaggtatgtgtgtctgtgagtgtgcgtgtaacagaactcagaaacagatcaccaaaactcacctagccatcaggggaaatagctaagtacaatactctgtatgtatgccatgtcaaagtggcaagctgcaaataccaaaggagacttgaactaacacaagcaagtatagcataatatttcagaataataatcattcatcatacatgtatgaatcttgaacgttttttttcaatttttctaatttagcatttgcgaccatttgcccagtgagtgtataatgtaatttaattcaacaaataatcactaatataacatgaaaattaatagttttttgttcggtttctctgtacacattacgccattgttgccccagttcatactattttctatcttctctttaccttctcactatcatatcatccgattgcaattagacaatcaaacctaatcatttaatctatattgtctaaaatacatgttgcaagcatggcatgaagtagtatcacattctatagagttacaggttcaattcatcattgctgaggatatgcatcagtatttatgaactcgacattaatatatatttagcctttattactgtatctgaggtctggtctgtttccatgaaggtctgaacaagtgaacatgaattcgttgggttccttaagtaccctgttttggtcattattttttccttttcgatgaaattgtcggtacaacaggctgtggccaacagttaagcatttgtgtcatcgcgatttatcaggtggaacgtgacaaggatgggtgtggctggattacaacgggattgaagtcgattggcaggagatgatgctactcagcaattgttcccttactgtaactgcttacaaaggtattgatatggtgagatattgttacttttgaatacctcactgtgttacttctgaaagccaagtgaggaggaatctataccttattgtgttcccttttttctttgtattttatttggtttttgcaagttgtgcaattgtggtgtcgcatttttttagttaacggaagaaatcttgcatctaattgtgcatacgtggactctcaattgtccttgatgatccggatggtgtttctgttactatattacaactaaaaaagttaaatcaagtttactccaatttaattctaatctttatatttccatagttatgtgatgtagtgtctatctaactttaagatcttctaatatggtttatcctagactctgaaccatgagatatgtatatgtttttcttaatcgtgtgcaacgtttccttttgtttggccaatgctgaggcccaacactgtgtactatgttgtggatctcgaggggataatatgattatatgtcgttgcaacacacaaacattgcactattaaaatatatgagagaaattaaactcctcccgtgtgtctcatacaaaaaaaatcatctgttataggtcgttgcctcactgattaagtttttgtttcctttatttgcttgagttgatcagtctacagtttgtcctttgcctaatattttggttccacagttgttttgtgcatccaaaagcagtacatcgatttttaggattgctgcatgcatcctaacataaccactgtgaaaagtagtccacttgtttattggtaactggtttgctacttttgattaccctacaaagggataaaattgattatgatgattataagtgtatgggattgtagataatgttgataagaaaagatgagggataccacatacttgttttttagtgttggtcttttccttttgcatgatcatctaactatgttagtcgtctactgctcgtgggagccggcgaggtgcttgctagactcggtggaagtggagtttagttacgatgccgatatcagcctcgtgtccgtcgacctgctcatgccggactaggagttgtactgatggaggatggagattatggtgtaggccgtgacacgcgtgcgcaggagtcggtgtcggtgcttttctttggactgattaattctgagctggacgaccattgacatttgtgatgtgtacgagatgtattgtggcgtctcgttgtataattggtactgggagtatgttttgctatgtccgtatttatatatcatgtgtgctatgaatgttgtataatactagataataagaccaactccagcagcttacccatatccatattcaaactatacaaacaatacaatctacagtgcaaaaggtgtttttgtgaccatatgggtgaactattgtacattgcacctatatgatcactaaaaaacactgttttgcatcgttttatattgtagattgcattatttatagagtgttgtttgaatatgggtatgagtataggtaagctggtggagatgatctaaaggatgatctccttcaataggaatctcttttctaaataataaatgtttttaataggaatctcttattcatttcgatcttgtattattaactttggagttgcctatttcgattaatagtgacaatgagccaaattttggttgttcgaaatggtagacttcgatatttattatgattgttatgttgatgcttgatagcatcactaaataatgacatgtgcgtgcacaagtgccctctgttgcaacgcacgggcatatacctagtattggtcatatgcttcttgttgtattatgtggtgataatacataattagtgtgtgcttccgatgatatgaatcaattggtatctattgtgtttgtcctgtaatagattttcatgtggttctggtgctttaaattggtatcttaatggtgaatagtggtaggttgatattcctgtggtatatccatttaattggtttttaactctgattctgtgcatttgtgtgttatacgcatcacggtttaattattgacacaatgtatcccatgggtgctaaggtgtagttatgcttcgaattagcctaagtatgtgcaatttggcatataaggccaaagttaagattttaatgtaagcacatatttagggggaacattctataaacttagaattcaaaatttgtgctttaaatcttattcttgtgtaagctttaattgtgttgtcatcgatcccaaaaggggggagattgaaagctctcttgtgggttttggtgtttagatgacaacccaattaaaggaccaacaagtgtgctaagtgttgaacaggtgcttaatgcaaagctaacaaggttcaacacaagtgaacggtataatggacatcacaggtaagatggacagactctatgtgtgtaactcagagacaaccgatcaagccaaggatggaggcaagaagagcttcgaggtaccgagtgcacgggagaaggtcaaggagacgaggaacccaaagccaggggtgaagaagaagacttgcaaagtcaaggttgatcgagttaagaagagttatggtgcatcaaggatcactacataaggacatgacttacaaccaatgaggtaacatctacagttatgtggtgtaagtcataaggctcaagatcaagctcgggaagtgaacaagggggttggagctcagatatgttaatctagatcaagtcaagttgacttgatggtttagagtccaacatcgacctcaaacatgccaaattgggtaaaacgatgaaaaaggttaagtatgtaaggtttgagtgttcaaccattttgcatacacctctt

SEQ ID NO: 203504 - DNA, 803 bp, Zea Mays
ggctcatcaattaaagacgtcatcgcttagcaggagcacaaagtgcagaagcagagccagtcctaactgcttagccaggaaagaagcagagcgtgcttagccatgtactcatccagctgccatgtgatgtccgagaagccaaacggttccaaggcggtgacgctgctgctcaggctgtccacgctggttctgtcgctcatctcggcggtcgtcatggccaccgccaccagcgactgcaccatctacggccacggcggcgccgccaaggtcactatcatgttcaagaactaccggcccttcgttttcctggtagttttgaacatcgcggcggcggtgctggaggcagcagccatctacctacaggtcgtgaagggcgacgacggcgacgaggcgcccaagcttccccggatcatcctggttgtcctcgacgtcgtggtgctcgcgctggtcaacgcggcgacgggcgcggtggtcgcggcggtcatcgcctacggccccgagatcgacgcgtgcaccgtcgcaggtggtggccgattccgcgagcaggtgcgcaggtccgagctcctgtcgatcgccgcgagcatctccgctgtgtccgccgccgtcgctaaggacgtgccgctgcccttctccgtgtggcccctctcgtcggaatcaggcgactactactgatcttggttattatttgtcaggtgatgttgagtactgtgagtgtgaaggctttctgccagcgaaattccaatttatgtcaactgaatgccactacgataagctatccttcgaaaaaatttcagcacaaatca

SEQ ID NO: 203505 - DNA, 1000 bp, Zea Mays
tgaggtactcctttcagacgaagtaccgactttaccttgtcctggactttataaatggggccatctcttcttccagctttaccaccagggtttatttagggaggagcttgcacgcatctacactgctgaaattgtatctgcagtcgcccacctccatgccaacggtattatgcatagagatttgaagcctgagaacatcttactggatgctgatggtcataaattgttcagggccgaggtcatgataaggctgcagactggtggagtgtgggagtccttctttttgaaatgcttacaggaaagccaccgtttgttggtggaaacagagacaagattcagcagaagatagtaaaggagaagataaagctgccaacatatttatctagtgaagttcactcaatgttgaaaggattattgcacaaagaagctggcagacggctgggaagcggaccaggcggcagtgacgaaatcaagaaccacaagtggttcaagtctgtaaactggaagaggctggaggcccggcagatcgagccaagcttccggccgaatgttgctggcaagacctgcattgcgaactttgacgagtgctggacgaacatgcccgtgcttgattctccggtggccagccctgttgcggccaacagcaactttgtggggttcagttatgtgaggcccgcaccgttcctccagaagccgagtccacttggctaaagaactacttccgtgatctgatatctaacccggagttcaaataactatctttgagtctgaatcctatgtatttcttcaagacattagtgatgggaatctaaccttattgttgtgttgtgggtaggccagccaagcgcctattgcttgagaacaacagcttggcaagtgacaatgtgcaatattgccagaagttcttattgaagcgccataataattctcctacgtcaatttgaacttgctcggtctattcaattgtggccttataatgcaatttcattctctggtctag

SEQ ID NO: 203506 - DNA, 3431 bp, Zea Mays
aaaatgtttcctcatgagtggaccgacactttgtagaaattcgctcaatagcccggctgacgtcactaattcaccctctctttccggccgccgccacgggctctccatggaacggctcaaatcggcggtgccgcccgacctccggcgggccgtcggcgagggcacggccgccgatctagctaacaccacctctcgcctgttcgccttcttcgacagccttcctctcttccaccaggttatgcaagaactgaccgaccccgagcttgcgttgtgtcgcaaagacaaggtgaaggctgtagagttgaagggccacggcaacgcgtgcttctctaggagggagttcgggaaagctctcaggttctattcgcaggcattgcgccatgtcccaattaattcgggtggcatggatgtgaacttggtatcttcattatatgtcaatcgagcctccaccatgcataaattaggtctgttcgaagaatctctaagggactgtgacagggccataaccatttctcctaattattctaaggcttggtacaggaagggaatggtaaaaacagcgctcaagaattattcatctgcaatacatgatttagaggtggcattgagccaggaagtgacttcttcggggaagagtaacatagaacaagagctgaagttgattttagagaagcatgaaagtgtcaatgaagctgggacatcaaactgtgatagcaaggatagagatttgcctcttgcaggacaacctcataaaattgttatagagagtatttcaacaccaaacaaaggtagaggaatgatttctacagatgatatccccccagcttcgttgattcatgttgaggaccctcttgctgcgattatcatgaaatcttcccgtgaaacacactgccacttttgcttcagtgaaactccagccgatgttgtattctgtccttcatgtacaataccaatttattgttcaaaaaggtgccaggagcaatcagcaggtcatatttctcgtgatgaagatactaatcttggatattcaacgaatgttgcaaacctgagtataacttcgagttgcaagtctccaagatctaagctatttgctgaacataggcatgaatgtggaggtgcccactgggcagctgttttaccagctgatgtagttttagctggacgaataatagcacacagcatagtaaaaaggatgccgtctgggaagagctttgctttctctggcccaaatttggatctagttcaccattatgatcaacattctcctgccaacaagttggaatcacatatatatgcaattgtcctattgttatgcctccaaaatcattatagatcagaccttttgtggacagaagattctttatcacaggtatatatggcgtttatcttcagacattattgttctgatatacctggttaatgagtatgatctgaaattgatggcgatttcagctcaagattttttataaattttcacaatgctaattgttatcaaatgtcttggtccatactgttttggtggagataaccagtctccttggggattgccagtttcatgttccttagtaatcttaatctcatctctacaataccagtgtttgtcgaacttccttctgtatagtccctttgaacttccttctgtatagtcctctttacacacttttacttgttctgatacttagaaagccattttttaacatgcaagaatttgtatcattacatttaaaaaaggacacaataaaagctctttcacttgtaaattaggtgaacacatcaaaccaaacaaaataggcagaaaagcagaaccaacgaggattattgttatataatcaaatcttaaatgactaaatagcctctagatcaatagccatcctgcaatgcaagtctgcaactgtgtctaacatgttacctaaagcccactggttacactcatggtggtcagacaagaaatcagacaagcttggaactcaagcttcagtcagatatgcctaagctggttcttttgatatttcaaatcaaagtcaattcaattgctattgtctgtatgaggtcgatggacagaggcccagagcacacaataaatagaggtttttatgtagctgaaggtgcaaaaatgtgtagtgtggagcaggtcagggttgcacaagctctttatgtatctggtagcctgttcaatcactcatgtcagcccaatgtgcacgcatattttctttcacgtgcgttcgtgctgagaactactgaatttataaagtccgggagcccagttgaactgtcatatggtccacaggttggcgagatgcatatttcagagagacagaagtcacttcaagagaattactacttcagttgtcaatgttcaagttgttcagagctaaacctatcagaccttgttatgaattcattctgttgtccacaaagcaactgccttggtgccatatcggaatcaacttactacaggtccaaagagaatttcgtgaatgtttcccttggaggatcttatgtctgcaaactatcattgcccgatgtatcgaaggttgatatggatatggagaatgtcgccaaatctctcttgcaaaatagtggtgtcagtctgaacatagatcatggatgttgcatgagttgtagatcctgtattgatctgtcgtctgctctggctacatcacacagggaagaatctaccatcgataggttgaagaaacatacattcctagacaagactctcatcacagaggcattacaatctctaaaacaactcaagaagttgaggcacccatatagcaaggctctcgcgcaggccgaagacacaatcgcagaggcctttgcgaaggtcggagaccaagaactagcacgaaagcactgtgaagcatcaattcagatcctcgagaagctgtaccacccaaaacacatcatcattgctcacgagcttattaagcttgtttcgattctgctgtccctgggagatggggcaagcgccgcagccacattcgctcaagcagaggcaatattctctctttactacggatctcatgtggagaaggttttgacatacatgggtgccctgaagaaagctgtcattgacgtgtagcgtgctgacaatcctcacgcgggaatggccaacacggttctgcagaatcatctcaccttttgcgcttcttcgaggagttaatgtaggggaaaacccaaaaaatatttacaaagcagtgtggtattgcttgtagtttagtttgttctagaaaacacaaactagctcaaccaaacttcctggctaatgagtttggtggatgttctgagtgcctatgttaatgacttgtttcataaatttttttcgtatatactcgttgccttacaaactcggtcggtagaggaaagatcgctcccacggtattatattaagaagaagctcaattgaagcctcaaccaagaaaggtcat

SEQ ID NO: 203507 - DNA, 2807 bp, Zea Mays
aaaatgtttcctcatgagtggaccgacactttgtagaaattcgctcaatagcccggctgacgtcactaattcaccctctctttccggccgccgccacgggctctccatggaacggctcaaatcggcggtgccgcccgacctccggcgggccgtcggcgagggcacggccgccgatctagctaacaccacctctcgcctgttcgccttcttcgacagccttcctctcttccaccaggttatgcaagaactgaccgaccccgagcttgcgttgtgtcgcaaagacaaggtgaaggctgtagagttgaagggccacggcaacgcgtgcttctctaggagggagttcgggaaagctctcaggttctattcgcaggcattgcgccatgtcccaattaattcgggtggcatggatgtgaacttggtatcttcattatatgtcaatcgagcctccaccatgcataaattaggtctgttcgaagaatctctaagggactgtgacagggccataaccatttctcctaattattctaaggcttggtacaggaagggaatggtaaaaacagcgctcaagaattattcatctgcaatacatgatttagaggtggcattgagccaggaagtgacttcttcggggaagagtaacatagaacaagagctgaagttgattttagagaagcatgaaagtgtcaatgaagctgggacatcaaactgtgatagcaaggatagagatttgcctcttgcaggacaacctcataaaattgttatagagagtatttcaacaccaaacaaaggtagaggaatgatttctacagatgatatccccccagcttcgttgattcatgttgaggaccctcttgctgcgattatcatgaaatcttcccgtgaaacacactgccacttttgcttcagtgaaactccagccgatgttgtattctgtccttcatgtacaataccaatttattgttcaaaaaggtgccaggagcaatcagcaggtcatatttctcgtgatgaagatactaatcttggatattcaacgaatgttgcaaacctgagtataacttcgagttgcaagtctccaagatctaagctatttgctgaacataggcatgaatgtggaggtgcccactgggcagctgttttaccagctgatgtagttttagctggacgaataatagcacacagcatagtaaaaaggatgccgtctgggaagagctttgctttctctggcccaaatttggatctagttcaccattatgatcaacattctcctgccaacaagttggaatcacatatatatgcaattgtcctattgttatgcctccaaaatcattatagatcagaccttttgtggacagaagattctttatcacagctggttcttttgatatttcaaatcaaagtcaattcaattgctattgtctgtatgaggtcgatggacagaggcccagagcacacaataaatagaggtttttatgtagctgaaggtgcaaaaatgtgtagtgtggagcaggtcagggttgcacaagctctttatgtatctggtagcctgttcaatcactcatgtcagcccaatgtgcacgcatattttctttcacgtgcgttcgtgctgagaactactgaatttataaagtccgggagcccagttgaactgtcatatggtccacaggttggcgagatgcatatttcagagagacagaagtcacttcaagagaattactacttcagttgtcaatgttcaagttgttcagagctaaacctatcagaccttgttatgaattcattctgttgtccacaaagcaactgccttggtgccatatcggaatcaacttactacaggtccaaagagaatttcgtgaatgtttcccttggaggatcttatgtctgcaaactatcattgcccgatgtatcgaaggttgatatggatatggagaatgtcgccaaatctctcttgcaaaatagtggtgtcagtctgaacatagatcatggatgttgcatgagttgtagatcctgtattgatctgtcgtctgctctggctacatcacacagggaagaatctaccatcgataggttgaagaaacatacattcctagacaagactctcatcacagaggcattacaatctctaaaacaactcaagaagttgaggcacccatatagcaaggctctcgcgcaggccgaagacacaatcgcagaggcctttgcgaaggtcggagaccaagaactagcacgaaagcactgtgaagcatcaattcagatcctcgagaagctgtaccacccaaaacacatcatcattgctcacgagcttattaagcttgtttcgattctgctgtccctgggagatggggcaagcgccgcagccacattcgctcaagcagaggcaatattctctctttactacggatctcatgtggagaaggttttgacatacatgggtgccctgaagaaagctgtcattgacgtgtagcgtgctgacaatcctcacgcgggaatggccaacacggttctgcagaatcatctcaccttttgcgcttcttcgaggagttaatgtaggggaaaacccaaaaaatatttacaaagcagtgtggtattgcttgtagtttagtttgttctagaaaacacaaactagctcaaccaaacttcctggctaatgagtttggtggatgttctgagtgcctatgttaatgacttgtttcataaatttttttcgtatatactcgttgccttacaaactcggtcggtagaggaaagatcgctcccacggtattatattaagaagaagctcaattgaagcctcaaccaagaaaggtcat

SEQ ID NO: 203508 - DNA, 2721 bp, Zea Mays
ccgacactttgtagaaattcgctcaatagcccggctgacgtcactaattcaccctctctttccggccgccgccacgggctctccatggaacggctcaaatcggcggtgccgcccgacctccggcgggccgtcggcgagggcacggccgccgatctagctaacaccacctctcgcctgttcgccttcttcgacagccttcctctcttccaccaggttatgcaagaactgaccgaccccgagcttgcgttgtgtcgcaaagacaaggtgaaggctgtagagttgaagggccacggcaacgcgtgcttctctaggagggagttcgggaaagctctcaggttctattcgcaggcattgcgccatgtcccaattaattcgggtggcatggatgtgaacttggtatcttcattatatgtcaatcgagcctccaccatgcataaattaggtctgttcgaagaatctctaagggactgtgacagggccataaccatttctcctaattattctaaggcttggtacaggaagggaatggtaaaaacagcgctcaagaattattcatctgcaatacatgatttagaggtggcattgagccaggaagtgacttcttcggggaagagtaacatagaacaagagctgaagttgattttagagaagcatgaaagtgtcaatgaagctgggacatcaaactgtgatagcaaggatagagatttgcctcttgcaggacaacctcataaaattgttatagagagtatttcaacaccaaacaaaggtagaggaatgatttctacagatgatatccccccagcttcgttgattcatgttgaggaccctcttgctgcgattatcatgaaatcttcccgtgaaacacactgccacttttgcttcagtgaaactccagccgatgttgtattctgtccttcatgtacaataccaatttattgttcaaaaaggtgccaggagcaatcagcaggtcatatttctcgtgatgaagatactaatcttggatattcaacgaatgttgcaaacctgagtataacttcgagttgcaagtctccaagatctaagctatttgctgaacataggcatgaatgtggaggtgcccactgggcagctgttttaccagctgatgtagttttagctggacgaataatagcacacagcatagtaaaaaggatgccgtctgggaagagctttgctttctctggcccaaatttggatctagttcaccattatgatcaacattctcctgccaacaagttggaatcacatatatatgcaattgtcctattgttatgcctccaaaatcattatagatcagaccttttgtggacagaagattctttatcacagctggttcttttgatatttcaaatcaaagtcaattcaattgctattgtctgtatgaggtcgatggacagaggcccagagcacacaataaatagaggtttttatgtagctgaaggtgcaaaaatgtgtagtgtggagcaggtcagggttgcacaagctctttatgtatctggtagcctgttcaatcactcatgtcagcccaatgtgcacgcatattttctttcacgtgcgttcgtgctgagaactactgaatttataaagtccgggagcccagttgaactgtcatatggtccacaggttggcgagatgcatatttcagagagacagaagtcacttcaagagaattactacttcagttgtcaatgttcaagttgttcagagctaaacctatcagaccttgttatgaattcattctgttgtccacaaagcaactgccttggtgccatatcggaatcaacttactacaggatgtatcgaaggttgatatggatatggagaatgtcgccaaatctctcttgcaaaatagtggtgtcagtctgaacatagatcatggatgttgcatgagttgtagatcctgtattgatctgtcgtctgctctggctacatcacacagggaagaatctaccatcgataggttgaagaaacatacattcctagacaagactctcatcacagaggcattacaatctctaaaacaactcaagaagttgaggcacccatatagcaaggctctcgcgcaggccgaagacacaatcgcagaggcctttgcgaaggtcggagaccaagaactagcacgaaagcactgtgaagcatcaattcagatcctcgagaagctgtaccacccaaaacacatcatcattgctcacgagcttattaagcttgtttcgattctgctgtccctgggagatggggcaagcgccgcagccacattcgctcaagcagaggcaatattctctctttactacggatctcatgtggagaaggttttgacatacatgggtgccctgaagaaagctgtcattgacgtgtagcgtgctgacaatcctcacgcgggaatggccaacacggttctgcagaatcatctcaccttttgcgcttcttcgaggagttaatgtaggggaaaacccaaaaaatatttacaaagcagtgtggtattgcttgtagtttagtttgttctagaaaacacaaactagctcaaccaaacttcctggctaatgagtttggtggatgttctgagtgcctatgttaatgacttgtttcataaatttttttcgtatatactcgttgccttacaaactcggtcggtagaggaaagatcgctcccacggtattatattaagaagaagctcaattgaagcctcaaccaagaaaggtcat

SEQ ID NO: 203509 - DNA, 3585 bp, Zea Mays
ccgacactttgtagaaattcgctcaatagcccggctgacgtcactaattcaccctctctttccggccgccgccacgggctctccatggaacggctcaaatcggcggtgccgcccgacctccggcgggccgtcggcgagggcacggccgccgatctagctaacaccacctctcgcctgttcgccttcttcgacagccttcctctcttccaccaggttatgcaagaactgaccgaccccgagcttgcgttgtgtcgcaaagacaaggtgaaggctgtagagttgaagggccacggcaacgcgtgcttctctaggagggagttcgggaaagctctcaggttctattcgcaggcattgcgccatgtcccaattaattcgggtggcatggatgtgaacttggtatcttcattatatgtcaatcgagcctccaccatgcataaattaggtctgttcgaagaatctctaagggactgtgacagggccataaccatttctcctaattattctaaggcttggtacaggaagggaatggtaaaaacagcgctcaagaattattcatctgcaatacatgatttagaggtggcattgagccaggaagtgacttcttcggggaagagtaacatagaacaagagctgaagttgattttagagaagcatgaaagtgtcaatgaagctgggacatcaaactgtgatagcaaggatagagatttgcctcttgcaggacaacctcataaaattgttatagagagtatttcaacaccaaacaaaggtagaggaatgatttctacagatgatatccccccagcttcgttgattcatgttgaggaccctcttgctgcgattatcatgaaatcttcccgtgaaacacactgccacttttgcttcagtgaaactccagccgatgttgtattctgtccttcatgtacaataccaatttattgttcaaaaaggtgccaggagcaatcagcaggtcatatttctcgtgatgaagatactaatcttggatattcaacgaatgttgcaaacctgagtataacttcgagttgcaagtctccaagatctaagctatttgctgaacataggcatgaatgtggaggtgcccactgggcagctgttttaccagctgatgtagttttagctggacgaataatagcacacagcatagtaaaaaggatgccgtctgggaagagctttgctttctctggcccaaatttggatctagttcaccattatgatcaacattctcctgccaacaagttggaatcacatatatatgcaattgtcctattgttatgcctccaaaatcattatagatcagaccttttgtggacagaagattctttatcacaggtatatatggcgtttatcttcagacattattgttctgatatacctggttaatgagtatgatctgaaattgatggcgatttcagctcaagattttttataaattttcacaatgctaattgttatcaaatgtcttggtccatactgttttggtggagataaccagtctccttggggattgccagtttcatgttccttagtaatcttaatctcatctctacaataccagtgtttgtcgaacttccttctgtatagtccctttgaacttccttctgtatagtcctctttacacacttttacttgttctgatacttagaaagccattttttaacatgcaagaatttgtatcattacatttaaaaaaggacacaataaaagctctttcacttgtaaattaggtgaacacatcaaaccaaacaaaataggcagaaaagcagaaccaacgaggattattgttatataatcaaatcttaaatgactaaatagcctctagatcaatagccatcctgcaatgcaagtctgcaactgtgtctaacatgttacctaaagcccactggttacactcatggtggtcagacaagaaatcagacaagcttggaactcaagcttcagtcagatatgcctaaggtacctgggttcaacgatgttcttatctataccatggttttgtttctcattactaagctttcctatatactgcaattcccccaaaacttttttctctgggggtatagagaaactatggggtatcacattcacattttgtttttgggaaagaagaaactcatgtgttgattatcctctacagctggttcttttgatatttcaaatcaaagtcaattcaattgctattgtctgtatgaggtcgatggacagaggcccagagcacacaataaatagaggtttttatgtagctgaaggtgcaaaaatgtgtagtgtggagcagggttgcacaagctctttatgtatctggtagcctgttcaatcactcatgtcagcccaatgtgcacgcatattttctttcacgtgcgttcgtgctgagaactactgaatttataaagtccgggagcccagttgaactgtcatatggtccacaggttggcgagatgcatatttcagagagacagaagtcacttcaagagaattactacttcagttgtcaatgttcaagttgttcagagctaaacctatcagaccttgttatgaattcattctgttgtccacaaagcaactgccttggtgccatatcggaatcaacttactacaggtccaaagagaatttcgtgaatgtttcccttggaggatcttatgtctgcaaactatcattgcccgatgtatcgaaggttgatatggatatggagaatgtcgccaaatctctcttgcaaaatagtggtgtcagtctgaacatagatcatggatgttgcatgagttgtagatcctgtattgatctgtcgtctgctctggctacatcacacagggaagaatctaccatcgataggttgaagaaacatacattcctagacaagactctcatcacagaggcattacaatctctaaaacaactcaagaagttgaggcacccatatagcaaggctctcgcgcaggccgaagacacaatcgcagaggcctttgcgaaggtcggagaccaagaactagcacgaaagcactgtgaagcatcaattcagatcctcgagaagctgtaccacccaaaacacatcatcattgctcacgagcttattaagcttgtttcgattctgctgtccctgggagatggggcaagcgccgcagccacattcgctcaagcagaggcaatattctctctttactacggatctcatgtggagaaggttttgacatacatgggtgccctgaagaaagctgtcattgacgtgtagcgtgctgacaatcctcacgcgggaatggccaacacggttctgcagaatcatctcaccttttgcgcttcttcgaggagttaatgtaggggaaaacccaaaaaatatttacaaagcagtgtggtattgcttgtagtttagtttgttctagaaaacacaaactagctcaaccaaacttcctggctaatgagtttggtggatgttctgagtgcctatgttaatgacttgtttcataaatttttttcgtatatactcgttgccttacaaactcggtcggtagaggaaagatcgctcccacggtattatattaagaagaagctcaattgaagcctcaaccaagaaaggtcat

SEQ ID NO: 203510 - DNA, 3536 bp, Zea Mays
ccgacactttgtagaaattcgctcaatagcccggctgacgtcactaattcaccctctctttccggccgccgccacgggctctccatggaacggctcaaatcggcggtgccgcccgacctccggcgggccgtcggcgagggcacggccgccgatctagctaacaccacctctcgcctgttcgccttcttcgacagccttcctctcttccaccaggttatgcaagaactgaccgaccccgagcttgcgttgtgtcgcaaagacaaggtgaaggctgtagagttgaagggccacggcaacgcgtgcttctctaggagggagttcgggaaagctctcaggttctattcgcaggcattgcgccatgtcccaattaattcgggtggcatggatgtgaacttggtatcttcattatatgtcaatcgagcctccaccatgcataaattaggtctgttcgaagaatctctaagggactgtgacagggccataaccatttctcctaattattctaaggcttggtacaggaagggaatggtaaaaacagcgctcaagaattattcatctgcaatacatgatttagaggtggcattgagccaggaagtgacttcttcggggaagagtaacatagaacaagagctgaagttgattttagagaagcatgaaagtgtcaatgaagctgggacatcaaactgtgatagcaaggatagagatttgcctcttgcaggacaacctcataaaattgttatagagagtatttcaacaccaaacaaaggtagaggaatgatttctacagatgatatccccccagcttcgttgattcatgttgaggaccctcttgctgcgttgaatgcagattatcatgaaatcttcccgtgaaacacactgccacttttgcttcagtgaaactccagccgatgttgtattctgtccttcatgtacaataccaatttattgttcaaaaaggtgccaggagcaatcagcaggtcatatttctcgtgatgaagatactaatcttggatattcaacgaatgttgcaaacctgagtataacttcgagttgcaagtctccaagatctaagctatttgctgaacataggcatgaatgtggaggtgcccactgggcagctgttttaccagctgatgtagttttagctggacgaataatagcacacagcatagtaaaaaggatgccgtctgggaagagctttgctttctctggcccaaatttggatctagttcaccattatgatcaacattctcctgccaacaagttggaatcacatatatatgcaattgtcctattgttatgcctccaaaatcattatagatcagaccttttgtggacagaagattctttatcacaggtatatatggcgtttatcttcagacattattgttctgatatacctggttaatgagtatgatctgaaattgatggcgatttcagctcaagattttttataaattttcacaatgctaattgttatcaaatgtcttggtccatactgttttggtggagataaccagtctccttggggattgccagtttcatgttccttagtaatcttaatctcatctctacaataccagtgtttgtcgaacttccttctgtatagtccctttgaacttccttctgtatagtcctctttacacacttttacttgttctgatacttagaaagccattttttaacatgcaagaatttgtatcattacatttaaaaaaggacacaataaaagctctttcacttgtaaattaggtgaacacatcaaaccaaacaaaataggcagaaaagcagaaccaacgaggattattgttatataatcaaatcttaaatgactaaatagcctctagatcaatagccatcctgcaatgcaagtctgcaactgtgtctaacatgttacctaaagcccactggttacactcatggtggtcagacaagaaatcagacaagcttggaactcaagcttcagtcagatatgcctaaggtacctgggttcaacgatgttcttatctataccatggttttgtttctcattactaagctttcctatatactgcaattcccccaaaacttttttctctgggggtatagagaaactatggggtatcacattcacattttgtttttgggaaagaagaaactcatgtgttgattatcctctacagctggttcttttgatatttcaaatcaaagtcaattcaattgctattgtctgtatgaggtcgatggacagaggcccagagcacacaataaatagaggtttttatgtagctgaaggtgcaaaaatgtgtagtgtggagcaggtcagggttgcacaagctctttatgtatctggtagcctgttcaatcactcatgtcagcccaatgtgcacgcatattttctttcacgtgcgttcgtgctgagaactactgaatttataaagtccgggagcccagttgaactgtcatatggtccacaggttggcgagatgcatatttcagagagacagaagtcacttcaagagaattactacttcagttgtcaatgttcaagttgttcagagctaaacctatcagaccttgttatgaattcattctgttgtccacaaagcaactgccttggtgccatatcggaatcaacttactacaggatgtatcgaaggttgatatggatatggagaatgtcgccaaatctctcttgcaaaatagtggtgtcagtctgaacatagatcatggatgttgcatgagttgtagatcctgtattgatctgtcgtctgctctggctacatcacacagggaagaatctaccatcgataggttgaagaaacatacattcctagacaagactctcatcacagaggcattacaatctctaaaacaactcaagaagttgaggcacccatatagcaaggctctcgcgcaggccgaagacacaatcgcagaggcctttgcgaaggtcggagaccaagaactagcacgaaagcactgtgaagcatcaattcagatcctcgagaagctgtaccacccaaaacacatcatcattgctcacgagcttattaagcttgtttcgattctgctgtccctgggagatggggcaagcgccgcagccacattcgctcaagcagaggcaatattctctctttactacggatctcatgtggagaaggttttgacatacatgggtgccctgaagaaagctgtcattgacgtgtagcgtgctgacaatcctcacgcgggaatggccaacacggttctgcagaatcatctcaccttttgcgcttcttcgaggagttaatgtaggggaaaacccaaaaaatatttacaaagcagtgtggtattgcttgtagtttagtttgttctagaaaacacaaactagctcaaccaaacttcctggctaatgagtttggtggatgttctgagtgcctatgttaatgacttgtttcataaatttttttcgtatatactcgttgccttacaaactcggtcggtagaggaaagatcgctcccacggtattatattaagaagaagctcaattgaagcctcaaccaagaaaggtcat

SEQ ID NO: 203511 - DNA, 2793 bp, Zea Mays
gacactttgtagaaattcgctcaatagcccggctgacgtcactaattcaccctctctttccggccgccgccacgggctctccatggaacggctcaaatcggcggtgccgcccgacctccggcgggccgtcggcgagggcacggccgccgatctagctaacaccacctctcgcctgttcgccttcttcgacagccttcctctcttccaccaggttatgcaagaactgaccgaccccgagcttgcgttgtgtcgcaaagacaaggtgaaggctgtagagttgaagggccacggcaacgcgtgcttctctaggagggagttcgggaaagctctcaggttctattcgcaggcattgcgccatgtcccaattaattcgggtggcatggatgtgaacttggtatcttcattatatgtcaatcgagcctccaccatgcataaattaggtctgttcgaagaatctctaagggactgtgacagggccataaccatttctcctaattattctaaggcttggtacaggaagggaatggtaaaaacagcgctcaagaattattcatctgcaatacatgatttagaggtggcattgagccaggaagtgacttcttcggggaagagtaacatagaacaagagctgaagttgattttagagaagcatgaaagtgtcaatgaagctgggacatcaaactgtgatagcaaggatagagatttgcctcttgcaggacaacctcataaaattgttatagagagtatttcaacaccaaacaaaggtagaggaatgatttctacagatgatatccccccagcttcgttgattcatgttgaggaccctcttgctgcgttgaatgcagattatcatgaaatcttcccgtgaaacacactgccacttttgcttcagtgaaactccagccgatgttgtattctgtccttcatgtacaataccaatttattgttcaaaaaggtgccaggagcaatcagcaggtcatatttctcgtgatgaagatactaatcttggatattcaacgaatgttgcaaacctgagtataacttcgagttgcaagtctccaagatctaagctatttgctgaacataggcatgaatgtggaggtgcccactgggcagctgttttaccagctgatgtagttttagctggacgaataatagcacacagcatagtaaaaaggatgccgtctgggaagagctttgctttctctggcccaaatttggatctagttcaccattatgatcaacattctcctgccaacaagttggaatcacatatatatgcaattgtcctattgttatgcctccaaaatcattatagatcagaccttttgtggacagaagattctttatcacagctggttcttttgatatttcaaatcaaagtcaattcaattgctattgtctgtatgaggtcgatggacagaggcccagagcacacaataaatagaggtttttatgtagctgaaggtgcaaaaatgtgtagtgtggagcaggtcagggttgcacaagctctttatgtatctggtagcctgttcaatcactcatgtcagcccaatgtgcacgcatattttctttcacgtgcgttcgtgctgagaactactgaatttataaagtccgggagcccagttgaactgtcatatggtccacaggttggcgagatgcatatttcagagagacagaagtcacttcaagagaattactacttcagttgtcaatgttcaagttgttcagagctaaacctatcagaccttgttatgaattcattctgttgtccacaaagcaactgccttggtgccatatcggaatcaacttactacaggtccaaagagaatttcgtgaatgtttcccttggaggatcttatgtctgcaaactatcattgcccgatgtatcgaaggttgatatggatatggagaatgtcgccaaatctctcttgcaaaatagtggtgtcagtctgaacatagatcatggatgttgcatgagttgtagatcctgtattgatctgtcgtctgctctggctacatcacacagggaagaatctaccatcgataggttgaagaaacatacattcctagacaagactctcatcacagaggcattacaatctctaaaacaactcaagaagttgaggcacccatatagcaaggctctcgcgcaggccgaagacacaatcgcagaggcctttgcgaaggtcggagaccaagaactagcacgaaagcactgtgaagcatcaattcagatcctcgagaagctgtaccacccaaaacacatcatcattgctcacgagcttattaagcttgtttcgattctgctgtccctgggagatggggcaagcgccgcagccacattcgctcaagcagaggcaatattctctctttactacggatctcatgtggagaaggttttgacatacatgggtgccctgaagaaagctgtcattgacgtgtagcgtgctgacaatcctcacgcgggaatggccaacacggttctgcagaatcatctcaccttttgcgcttcttcgaggagttaatgtaggggaaaacccaaaaaatatttacaaagcagtgtggtattgcttgtagtttagtttgttctagaaaacacaaactagctcaaccaaacttcctggctaatgagtttggtggatgttctgagtgcctatgttaatgacttgtttcataaatttttttcgtatatactcgttgccttacaaactcggtcggtagaggaaagatcgctcccacggtattatattaagaagaagctcaattgaagcctcaaccaagaaaggtcat

SEQ ID NO: 203512 - DNA, 3591 bp, Zea Mays
cactttgtagaaattcgctcaatagcccggctgacgtcactaattcaccctctctttccggccgccgccacgggctctccatggaacggctcaaatcggcggtgccgcccgacctccggcgggccgtcggcgagggcacggccgccgatctagctaacaccacctctcgcctgttcgccttcttcgacagccttcctctcttccaccaggttatgcaagaactgaccgaccccgagcttgcgttgtgtcgcaaagacaaggtgaaggctgtagagttgaagggccacggcaacgcgtgcttctctaggagggagttcgggaaagctctcaggttctattcgcaggcattgcgccatgtcccaattaattcgggtggcatggatgtgaacttggtatcttcattatatgtcaatcgagcctccaccatgcataaattaggtctgttcgaagaatctctaagggactgtgacagggccataaccatttctcctaattattctaaggcttggtacaggaagggaatggtaaaaacagcgctcaagaattattcatctgcaatacatgatttagaggtggcattgagccaggaagtgacttcttcggggaagagtaacatagaacaagagctgaagttgattttagagaagcatgaaagtgtcaatgaagctgggacatcaaactgtgatagcaaggatagagatttgcctcttgcaggacaacctcataaaattgttatagagagtatttcaacaccaaacaaaggtagaggaatgatttctacagatgatatccccccagcttcgttgattcatgttgaggaccctcttgctgcgttgaatgcagattatcatgaaatcttcccgtgaaacacactgccacttttgcttcagtgaaactccagccgatgttgtattctgtccttcatgtacaataccaatttattgttcaaaaaggtgccaggagcaatcagcaggtcatatttctcgtgatgaagatactaatcttggatattcaacgaatgttgcaaacctgagtataacttcgagttgcaagtctccaagatctaagctatttgctgaacataggcatgaatgtggaggtgcccactgggcagctgttttaccagctgatgtagttttagctggacgaataatagcacacagcatagtaaaaaggatgccgtctgggaagagctttgctttctctggcccaaatttggatctagttcaccattatgatcaacattctcctgccaacaagttggaatcacatatatatgcaattgtcctattgttatgcctccaaaatcattatagatcagaccttttgtggacagaagattctttatcacaggtatatatggcgtttatcttcagacattattgttctgatatacctggttaatgagtatgatctgaaattgatggcgatttcagctcaagattttttataaattttcacaatgctaattgttatcaaatgtcttggtccatactgttttggtggagataaccagtctccttggggattgccagtttcatgttccttagtaatcttaatctcatctctacaataccagtgtttgtcgaacttccttctgtatagtccctttgaacttccttctgtatagtcctctttacacacttttacttgttctgatacttagaaagccattttttaacatgcaagaatttgtatcattacatttaaaaaaggacacaataaaagctctttcacttgtaaattaggtgaacacatcaaaccaaacaaaataggcagaaaagcagaaccaacgaggattattgttatataatcaaatcttaaatgactaaatagcctctagatcaatagccatcctgcaatgcaagtctgcaactgtgtctaacatgttacctaaagcccactggttacactcatggtggtcagacaagaaatcagacaagcttggaactcaagcttcagtcagatatgcctaaggtacctgggttcaacgatgttcttatctataccatggttttgtttctcattactaagctttcctatatactgcaattcccccaaaacttttttctctgggggtatagagaaactatggggtatcacattcacattttgtttttgggaaagaagaaactcatgtgttgattatcctctacagctggttcttttgatatttcaaatcaaagtcaattcaattgctattgtctgtatgaggtcgatggacagaggcccagagcacacaataaatagaggtttttatgtagctgaaggtgcaaaaatgtgtagtgtggagcagggttgcacaagctctttatgtatctggtagcctgttcaatcactcatgtcagcccaatgtgcacgcatattttctttcacgtgcgttcgtgctgagaactactgaatttataaagtccgggagcccagttgaactgtcatatggtccacaggttggcgagatgcatatttcagagagacagaagtcacttcaagagaattactacttcagttgtcaatgttcaagttgttcagagctaaacctatcagaccttgttatgaattcattctgttgtccacaaagcaactgccttggtgccatatcggaatcaacttactacaggtccaaagagaatttcgtgaatgtttcccttggaggatcttatgtctgcaaactatcattgcccgatgtatcgaaggttgatatggatatggagaatgtcgccaaatctctcttgcaaaatagtggtgtcagtctgaacatagatcatggatgttgcatgagttgtagatcctgtattgatctgtcgtctgctctggctacatcacacagggaagaatctaccatcgataggttgaagaaacatacattcctagacaagactctcatcacagaggcattacaatctctaaaacaactcaagaagttgaggcacccatatagcaaggctctcgcgcaggccgaagacacaatcgcagaggcctttgcgaaggtcggagaccaagaactagcacgaaagcactgtgaagcatcaattcagatcctcgagaagctgtaccacccaaaacacatcatcattgctcacgagcttattaagcttgtttcgattctgctgtccctgggagatggggcaagcgccgcagccacattcgctcaagcagaggcaatattctctctttactacggatctcatgtggagaaggttttgacatacatgggtgccctgaagaaagctgtcattgacgtgtagcgtgctgacaatcctcacgcgggaatggccaacacggttctgcagaatcatctcaccttttgcgcttcttcgaggagttaatgtaggggaaaacccaaaaaatatttacaaagcagtgtggtattgcttgtagtttagtttgttctagaaaacacaaactagctcaaccaaacttcctggctaatgagtttggtggatgttctgagtgcctatgttaatgacttgtttcataaatttttttcgtatatactcgttgccttacaaactcggtcggtagaggaaagatcgctcccacggtattatattaagaagaagctcaattgaagcctcaaccaagaaaggtcat

SEQ ID NO: 203513 - DNA, 3939 bp, Zea Mays
cactttgtagaaattcgctcaatagcccggctgacgtcactaattcaccctctctttccggccgccgccacgggctctccatggaacggctcaaatcggcggtgccgcccgacctccggcgggccgtcggcgagggcacggccgccgatctagctaacaccacctctcgcctgttcgccttcttcgacagccttcctctcttccaccaggttatgcaagaactgaccgaccccgagcttgcgttgtgtcgcaaagacaaggtgaaggctgtagagttgaagggccacggcaacgcgtgcttctctaggagggagttcgggaaagctctcaggttctattcgcaggcattgcgccatgtcccaattaattcgggtggcatggatgtgaacttggtatcttcattatatgtcaatcgagcctccaccatgcataaattaggtctgttcgaagaatctctaagggactgtgacagggccataaccatttctcctaattattctaaggcttggtacaggaagggaatggtaaaaacagcgctcaagaattattcatctgcaatacatgatttagaggtggcattgagccaggaagtgacttcttcggggaagagtaacatagaacaagagctgaagttgattttagagaagcatgaaagtgtcaatgaagctgggacatcaaactgtgatagcaaggatagagatttgcctcttgcaggacaacctcataaaattgttatagagagtatttcaacaccaaacaaaggtagaggaatgatttctacagatgatatccccccagcttcgttgattcatgttgaggaccctcttgctgcgattatcatgaaatcttcccgtgaaacacactgccacttttgcttcagtgaaactccagccgatgttgtattctgtccttcatgtacaataccaatttattgttcaaaaaggtgccaggagcaatcagcaggtcatatttctcgtgatgaagatactaatcttggatattcaacgaatgttgcaaacctgagtataacttcgagttgcaagtctccaagatctaagctatttgctgaacataggcatgaatgtggaggtgcccactgggcagctgttttaccagctgatgtagttttagctggacgaataatagcacacagcatagtaaaaaggatgccgtctgggaagagctttgctttctctggcccaaatttggatctagttcaccattatgatcaacattctcctgccaacaagttggaatcacatatatatgcaattgtcctattgttatgcctccaaaatcattatagatcagaccttttgtggacagaagattctttatcacaggtatatatggcgtttatcttcagacattattgttctgatatacctggttaatgagtatgatctgaaattgatggcgatttcagctcaagattttttataaattttcacaatgctaattgttatcaaatgtcttggtccatactgttttggtggagataaccagtctccttggggattgccagtttcatgttccttagtaatcttaatctcatctctacaataccagtgtttgtcgaacttccttctgtatagtccctttgaacttccttctgtatagtcctctttacacacttttacttgttctgatacttagaaagccattttttaacatgcaagaatttgtatcattacatttaaaaaaggacacaataaaagctctttcacttgtaaattaggtgaacacatcaaaccaaacaaaataggcagaaaagcagaaccaacgaggattattgttatataatcaaatcttaaatgactaaatagcctctagatcaatagccatcctgcaatgcaagtctgcaactgtgtctaacatgttacctaaagcccactggttacactcatggtggtcagacaagaaatcagacaagcttggaactcaagcttcagtcagatatgcctaaggtacctgggttcaacgatgttcttatctataccatggttttgtttctcattactaagctttcctatatactgcaattcccccaaaacttttttctctgggggtatagagaaactatggggtatcacattcacattttgtttttgggaaagaagaaactcatgtgttgattatcctctacagctggttcttttgatatttcaaatcaaagtcaattcaattgctattgtctgtatgaggtcgatggacagaggcccagagcacacaataaatagaggtttttatgtagctgaaggtgcaaaaatgtgtagtgtggagcaggtcagggttgcacaagctctttatgtatctggtagcctgttcaatcactcatgtcagcccaatgtgcacgcatattttctttcacgtgcgttcgtgctgagaactactgaatttataaagtccgggagcccagttgaactgtcatatggtccacaggttggcgagatgcatatttcagagagacagaagtcacttcaagagaattactacttcagttgtcaatgttcaagttgttcagagctaaacctatcagaccttgttatgaattcattctgttgtccacaaagcaactgccttggtgccatatcggaatcaacttactacaggtccaaagagaatttcgtgaatgtttcccttggaggatcttatgtctgcaaactatcattgcccgtacggttattttcattaccatggtttttaatatcttctcatttactctagtcacaaataattgaccttttaaacattgatatgatcttcaaaacacaactttgagtactgtttttgttacaaaatatttatgaatcaaagaaaattggttacttttatgaaactatatttaatgaaaactctgacaaatctgctcgtgctattttgaaatatccaaactcaacatataaaaactagtatacgatcaaaattttgaatggttaacttgagataacttcaaaacgacacttgtgactggagtgagtacttaatgctgatggatcacatatgacatgatgctgagtttcttttaggatgtatcgaaggttgatatggatatggagaatgtcgccaaatctctcttgcaaaatagtggtgtcagtctgaacatagatcatggatgttgcatgagttgtagatcctgtattgatctgtcgtctgctctggctacatcacacagggaagaatctaccatcgataggttgaagaaacatacattcctagacaagactctcatcacagaggcattacaatctctaaaacaactcaagaagttgaggcacccatatagcaaggctctcgcgcaggccgaagacacaatcgcagaggcctttgcgaaggtcggagaccaagaactagcacgaaagcactgtgaagcatcaattcagatcctcgagaagctgtaccacccaaaacacatcatcattgctcacgagcttattaagcttgtttcgattctgctgtccctgggagatggggcaagcgccgcagccacattcgctcaagcagaggcaatattctctctttactacggatctcatgtggagaaggttttgacatacatgggtgccctgaagaaagctgtcattgacgtgtagcgtgctgacaatcctcacgcgggaatggccaacacggttctgcagaatcatctcaccttttgcgcttcttcgaggagttaatgtaggggaaaacccaaaaaatatttacaaagcagtgtggtattgcttgtagtttagtttgttctagaaaacacaaactagctcaaccaaacttcctggctaatgagtttggtggatgttctgagtgcctatgttaatgacttgtttcataaatttttttcgtatatactcgttgccttacaaactcggtcggtagaggaaagatcgctcccacggtattatattaagaagaagctcaattgaagcctcaaccaagaaaggtcat

SEQ ID NO: 203514 - DNA, 4049 bp, Zea Mays
cactttgtagaaattcgctcaatagcccggctgacgtcactaattcaccctctctttccggccgccgccacgggctctccatggaacggctcaaatcggcggtgccgcccgacctccggcgggccgtcggcgagggcacggccgccgatctagctaacaccacctctcgcctgttcgccttcttcgacagccttcctctcttccaccaggttatgcaagaactgaccgaccccgagcttgcgttgtgtcgcaaagacaaggtgaaggctgtagagttgaagggccacggcaacgcgtgcttctctaggagggagttcgggaaagctctcaggttctattcgcaggcattgcgccatgtcccaattaattcgggtggcatggatgtgaacttggtatcttcattatatgtcaatcgagcctccaccatgcataaattaggtctgttcgaagaatctctaagggactgtgacagggccataaccatttctcctaattattctaaggcttggtacaggaagggaatggtaaaaacagcgctcaagaattattcatctgcaatacatgatttagaggtggcattgagccaggaagtgacttcttcggggaagagtaacatagaacaagagctgaagttgattttagagaagcatgaaagtgtcaatgaagctgggacatcaaactgtgatagcaaggatagagatttgcctcttgcaggacaacctcataaaattgttatagagagtatttcaacaccaaacaaaggtagaggaatgatttctacagatgatatccccccagcttcgttgattcatgttgaggaccctcttgctgcgattatcatgaaatcttcccgtgaaacacactgccacttttgcttcagtgaaactccagccgatgttgtattctgtccttcatgtacaataccaatttattgttcaaaaaggtgccaggagcaatcagcaggtcatatttctcgtgatgaagatactaatcttggatattcaacgaatgttgcaaacctgagtataacttcgagttgcaagtctccaagatctaagctatttgctgaacataggcatgaatgtggaggtgcccactgggcagctgttttaccagctgatgtagttttagctggacgaataatagcacacagcatagtaaaaaggatgccgtctgggaagagctttgctttctctggcccaaatttggatctagttcaccattatgatcaacattctcctgccaacaagttggaatcacatatatatgcaattgtcctattgttatgcctccaaaatcattatagatcagaccttttgtggacagaagattctttatcacaggtatatatggcgtttatcttcagacattattgttctgatatacctggttaatgagtatgatctgaaattgatggcgatttcagctcaagattttttataaattttcacaatgctaattgttatcaaatgtcttggtccatactgttttggtggagataaccagtctccttggggattgccagtttcatgttccttagtaatcttaatctcatctctacaataccagtgtttgtcgaacttccttctgtatagtccctttgaacttccttctgtatagtcctctttacacacttttacttgttctgatacttagaaagccattttttaacatgcaagaatttgtatcattacatttaaaaaaggacacaataaaagctctttcacttgtaaattaggtgaacacatcaaaccaaacaaaataggcagaaaagcagaaccaacgaggattattgttatataatcaaatcttaaatgactaaatagcctctagatcaatagccatcctgcaatgcaagtctgcaactgtgtctaacatgttacctaaagcccactggttacactcatggtggtcagacaagaaatcagacaagcttggaactcaagcttcagtcagatatgcctaaggtacctgggttcaacgatgttcttatctataccatggttttgtttctcattactaagctttcctatatactgcaattcccccaaaacttttttctctgggggtatagagaaactatggggtatcacattcacattttgtttttgggaaagaagaaactcatgtgttgattatcctctacagctggttcttttgatatttcaaatcaaagtcaattcaattgctattgtctgtatgaggtcgatggacagaggcccagagcacacaataaatagaggtttttatgtagctgaaggtgcaaaaatgtgtagtgtggagcaggtcagggttgcacaagctctttatgtatctggtagcctgttcaatcactcatgtcagcccaatgtgcacgcatattttctttcacgtgcgttcgtgctgagaactactgaatttataaagtccgggagcccagttgaactgtcatatggtccacaggtttcactgaaccccagctccctccaggcctccatttctctctgaatcagatatgaatgtcttctgctttgaacttttcatgcttctgatttctaggttggcgagatgcatatttcagagagacagaagtcacttcaagagaattactacttcagttgtcaatgttcaagttgttcagagctaaacctatcagaccttgttatgaattcattctgttgtccacaaagcaactgccttggtgccatatcggaatcaacttactacaggtccaaagagaatttcgtgaatgtttcccttggaggatcttatgtctgcaaactatcattgcccgtacggttattttcattaccatggtttttaatatcttctcatttactctagtcacaaataattgaccttttaaacattgatatgatcttcaaaacacaactttgagtactgtttttgttacaaaatatttatgaatcaaagaaaattggttacttttatgaaactatatttaatgaaaactctgacaaatctgctcgtgctattttgaaatatccaaactcaacatataaaaactagtatacgatcaaaattttgaatggttaacttgagataacttcaaaacgacacttgtgactggagtgagtacttaatgctgatggatcacatatgacatgatgctgagtttcttttaggatgtatcgaaggttgatatggatatggagaatgtcgccaaatctctcttgcaaaatagtggtgtcagtctgaacatagatcatggatgttgcatgagttgtagatcctgtattgatctgtcgtctgctctggctacatcacacagggaagaatctaccatcgataggttgaagaaacatacattcctagacaagactctcatcacagaggcattacaatctctaaaacaactcaagaagttgaggcacccatatagcaaggctctcgcgcagtatgttgtatgtaggccgaagacacaatcgcagaggcctttgcgaaggtcggagaccaagaactagcacgaaagcactgtgaagcatcaattcagatcctcgagaagctgtaccacccaaaacacatcatcattgctcacgagcttattaagcttgtttcgattctgctgtccctgggagatggggcaagcgccgcagccacattcgctcaagcagaggcaatattctctctttactacggatctcatgtggagaaggttttgacatacatgggtgccctgaagaaagctgtcattgacgtgtagcgtgctgacaatcctcacgcgggaatggccaacacggttctgcagaatcatctcaccttttgcgcttcttcgaggagttaatgtaggggaaaacccaaaaaatatttacaaagcagtgtggtattgcttgtagtttagtttgttctagaaaacacaaactagctcaaccaaacttcctggctaatgagtttggtggatgttctgagtgcctatgttaatgacttgtttcataaatttttttcgtatatactcgttgccttacaaactcggtcggtagaggaaagatcgctcccacggtattatattaagaagaagctcaattgaagcctcaaccaagaaaggtcat

SEQ ID NO: 203515 - DNA, 3911 bp, Zea Mays
cactttgtagaaattcgctcaatagcccggctgacgtcactaattcaccctctctttccggccgccgccacgggctctccatggaacggctcaaatcggcggtgccgcccgacctccggcgggccgtcggcgagggcacggccgccgatctagctaacaccacctctcgcctgttcgccttcttcgacagccttcctctcttccaccaggttatgcaagaactgaccgaccccgagcttgcgttgtgtcgcaaagacaaggtgaaggctgtagagttgaagggccacggcaacgcgtgcttctctaggagggagttcgggaaagctctcaggttctattcgcaggcattgcgccatgtcccaattaattcgggtggcatggatgtgaacttggtatcttcattatatgtcaatcgagcctccaccatgcataaattaggtctgttcgaagaatctctaagggactgtgacagggccataaccatttctcctaattattctaaggcttggtacaggaagggaatggtaaaaacagcgctcaagaattattcatctgcaatacatgatttagaggtggcattgagccaggaagtgacttcttcggggaagagtaacatagaacaagagctgaagttgattttagagaagcatgaaagtgtcaatgaagctgggacatcaaactgtgatagcaaggatagagatttgcctcttgcaggacaacctcataaaattgttatagagagtatttcaacaccaaacaaaggtagaggaatgatttctacagatgatatccccccagcttcgttgattcatgttgaggaccctcttgctgcgattatcatgaaatcttcccgtgaaacacactgccacttttgcttcagtgaaactccagccgatgttgtattctgtccttcatgtacaataccaatttattgttcaaaaaggtgccaggagcaatcagcaggtcatatttctcgtgatgaagatactaatcttggatattcaacgaatgttgcaaacctgagtataacttcgagttgcaagtctccaagatctaagctatttgctgaacataggcatgaatgtggaggtgcccactgggcagctgttttaccagctgatgtagttttagctggacgaataatagcacacagcatagtaaaaaggatgccgtctgggaagagctttgctttctctggcccaaatttggatctagttcaccattatgatcaacattctcctgccaacaagttggaatcacatatatatgcaattgtcctattgttatgcctccaaaatcattatagatcagaccttttgtggacagaagattctttatcacaggtatatatggcgtttatcttcagacattattgttctgatatacctggttaatgagtatgatctgaaattgatggcgatttcagctcaagattttttataaattttcacaatgctaattgttatcaaatgtcttggtccatactgttttggtggagataaccagtctccttggggattgccagtttcatgttccttagtaatcttaatctcatctctacaataccagtgtttgtcgaacttccttctgtatagtccctttgaacttccttctgtatagtcctctttacacacttttacttgttctgatacttagaaagccattttttaacatgcaagaatttgtatcattacatttaaaaaaggacacaataaaagctctttcacttgtaaattaggtgaacacatcaaaccaaacaaaataggcagaaaagcagaaccaacgaggattattgttatataatcaaatcttaaatgactaaatagcctctagatcaatagccatcctgcaatgcaagtctgcaactgtgtctaacatgttacctaaagcccactggttacactcatggtggtcagacaagaaatcagacaagcttggaactcaagcttcagtcagatatgcctaaggtacctgggttcaacgatgttcttatctataccatggttttgtttctcattactaagctttcctatatactgcaattcccccaaaacttttttctctgggggtatagagaaactatggggtatcacattcacattttgtttttgggaaagaagaaactcatgtgttgattatcctctacagctggttcttttgatatttcaaatcaaagtcaattcaattgctattgtctgtatgaggtcgatggacagaggcccagagcacacaataaatagaggtttttatgtagctgaaggtgcaaaaatgtgtagtgtggagcaggtctgtctttttatactttctgtatttttttctgggactgggagcaatatatcatccaactattaaagttgcaaaaggtcgattggttgttgtcaatcattgggctttatctcatgctgataaaacacaatttcaacccagaaggtcaaaactagattagattaaaaaataaaacggagaaagtattatttgaaaagttattggatcgattatcaagtaacaataatcacagtatatgaggcctttttattaaaaaggcatctcactctaaattgtggtattgtgtctgtaacctttgtcttatgttatgtttgctcactgttaggtcagggttgcacaagctctttatgtatctggtagcctgttcaatcactcatgtcagcccaatgtgcacgcatattttctttcacgtgcgttcgtgctgagaactactgaatttataaagtccgggagcccagttgaactgtcatatggtccacaggttggcgagatgcatatttcagagagacagaagtcacttcaagagaattactacttcagttgtcaatgttcaagttgttcagagctaaacctatcagaccttgttatgaattcattctgttgtccacaaagcaactgccttggtgccatatcggaatcaacttactacaggtccaaagagaatttcgtgaatgtttcccttggaggatcttatgtctgcaaactatcattgcccgatgtatcgaaggttgatatggatatggagaatgtcgccaaatctctcttgcaaaatagtggtgtcagtctgaacatagatcatggatgttgcatgagttgtagatcctgtattgatctgtcgtctgctctggctacatcacacagggaagaatctaccatcgataggttgaagaaacatacattcctagacaagactctcatcacagaggcattacaatctctaaaacaactcaagaagttgaggcacccatatagcaaggctctcgcgcaggccgaagacacaatcgcagaggcctttgcgaaggtcggagaccaagaactagcacgaaagcactgtgaagcatcaattcagatcctcgagaagctgtaccacccaaaacacatcatcattgctcacgagcttattaagcttgtttcgattctgctgtccctgggagatggggcaagcgccgcagccacattcgctcaagcagaggcaatattctctctttactacggatctcatgtggagaaggttttgacatacatgggtgccctgaagaaagctgtcattgacgtgtagcgtgctgacaatcctcacgcgggaatggccaacacggttctgcagaatcatctcaccttttgcgcttcttcgaggagttaatgtaggggaaaacccaaaaaatatttacaaagcagtgtggtattgcttgtagtttagtttgttctagaaaacacaaactagctcaaccaaacttcctggctaatgagtttggtggatgttctgagtgcctatgttaatgacttgtttcataaatttttttcgtatatactcgttgccttacaaactcggtcggtagaggaaagatcgctcccacggtattatattaagaagaagctcaattgaagcctcaaccaagaaaggtcat

SEQ ID NO: 203516 - DNA, 3431 bp, Zea Mays
cactttgtagaaattcgctcaatagcccggctgacgtcactaattcaccctctctttccggccgccgccacgggctctccatggaacggctcaaatcggcggtgccgcccgacctccggcgggccgtcggcgagggcacggccgccgatctagctaacaccacctctcgcctgttcgccttcttcgacagccttcctctcttccaccaggttatgcaagaactgaccgaccccgagcttgcgttgtgtcgcaaagacaaggtgaaggctgtagagttgaagggccacggcaacgcgtgcttctctaggagggagttcgggaaagctctcaggttctattcgcagaaattaggtctgttcgaagaatctctaagggactgtgacagggccataaccatttctcctaattattctaaggcttggtacaggaagggaatggtaaaaacagcgctcaagaattattcatctgcaatacatgatttagaggtggcattgagccaggaagtgacttcttcggggaagagtaacatagaacaagagctgaagttgattttagagaagcatgaaagtgtcaatgaagctgggacatcaaactgtgatagcaaggatagagatttgcctcttgcaggacaacctcataaaattgttatagagagtatttcaacaccaaacaaaggtagaggaatgatttctacagatgatatccccccagcttcgttgattcatgttgaggaccctcttgctgcgattatcatgaaatcttcccgtgaaacacactgccacttttgcttcagtgaaactccagccgatgttgtattctgtccttcatgtacaataccaatttattgttcaaaaaggtgccaggagcaatcagcaggtcatatttctcgtgatgaagatactaatcttggatattcaacgaatgttgcaaacctgagtataacttcgagttgcaagtctccaagatctaagctatttgctgaacataggcatgaatgtggaggtgcccactgggcagctgttttaccagctgatgtagttttagctggacgaataatagcacacagcatagtaaaaaggatgccgtctgggaagagctttgctttctctggcccaaatttggtaaatacctcatttattcattagcttgacattctcttatgctgttagcactcaaatgttgtgccatagatgatatcatttcaggaattaatgagcgaagttgaccatcgcaggatctagttcaccattatgatcaacattctcctgccaacaagttggaatcacatatatatgcaattgtcctattgttatgcctccaaaatcattatagatcagaccttttgtggacagaagattctttatcacaggtatatatggcgtttatcttcagacattattgttctgatatacctggttaatgagtatgatctgaaattgatggcgatttcagctcaagattttttataaattttcacaatgctaattgttatcaaatgtcttggtccatactgttttggtggagataaccagtctccttggggattgccagtttcatgttccttagtaatcttaatctcatctctacaataccagtgtttgtcgaacttccttctgtatagtccctttgaacttccttctgtatagtcctctttacacacttttacttgttctgatacttagaaagccattttttaacatgcaagaatttgtatcattacatttaaaaaaggacacaataaaagctctttcacttgtaaattaggtgaacacatcaaaccaaacaaaataggcagaaaagcagaaccaacgaggattattgttatataatcaaatcttaaatgactaaatagcctctagatcaatagccatcctgcaatgcaagtctgcaactgtgtctaacatgttacctaaagcccactggttacactcatggtggtcagacaagaaatcagacaagcttggaactcaagcttcagtcagatatgcctaagctggttcttttgatatttcaaatcaaagtcaattcaattgctattgtctgtatgaggtcgatggacagaggcccagagcacacaataaatagaggtttttatgtagctgaaggtgcaaaaatgtgtagtgtggagcaggtcagggttgcacaagctctttatgtatctggtagcctgttcaatcactcatgtcagcccaatgtgcacgcatattttctttcacgtgcgttcgtgctgagaactactgaatttataaagtccgggagcccagttgaactgtcatatggtccacaggttggcgagatgcatatttcagagagacagaagtcacttcaagagaattactacttcagttgtcaatgttcaagttgttcagagctaaacctatcagaccttgttatgaattcattctgttgtccacaaagcaactgccttggtgccatatcggaatcaacttactacaggtccaaagagaatttcgtgaatgtttcccttggaggatcttatgtctgcaaactatcattgcccgatgtatcgaaggttgatatggatatggagaatgtcgccaaatctctcttgcaaaatagtggtgtcagtctgaacatagatcatggatgttgcatgagttgtagatcctgtattgatctgtcgtctgctctggctacatcacacagggaagaatctaccatcgataggttgaagaaacatacattcctagacaagactctcatcacagaggcattacaatctctaaaacaactcaagaagttgaggcacccatatagcaaggctctcgcgcaggccgaagacacaatcgcagaggcctttgcgaaggtcggagaccaagaactagcacgaaagcactgtgaagcatcaattcagatcctcgagaagctgtaccacccaaaacacatcatcattgctcacgagcttattaagcttgtttcgattctgctgtccctgggagatggggcaagcgccgcagccacattcgctcaagcagaggcaatattctctctttactacggatctcatgtggagaaggttttgacatacatgggtgccctgaagaaagctgtcattgacgtgtagcgtgctgacaatcctcacgcgggaatggccaacacggttctgcagaatcatctcaccttttgcgcttcttcgaggagttaatgtaggggaaaacccaaaaaatatttacaaagcagtgtggtattgcttgtagtttagtttgttctagaaaacacaaactagctcaaccaaacttcctggctaatgagtttggtggatgttctgagtgcctatgttaatgacttgtttcataaatttttttcgtatatactcgttgccttacaaactcggtcggtagaggaaagatcgctcccacggtattatattaagaagaagctcaattgaagcctcaaccaagaaaggtcat

SEQ ID NO: 203517 - DNA, 3946 bp, Zea Mays
cactttgtagaaattcgctcaatagcccggctgacgtcactaattcaccctctctttccggccgccgccacgggctctccatggaacggctcaaatcggcggtgccgcccgacctccggcgggccgtcggcgagggcacggccgccgatctagctaacaccacctctcgcctgttcgccttcttcgacagccttcctctcttccaccaggttatgcaagaactgaccgaccccgagcttgcgttgtgtcgcaaagacaaggtgaaggctgtagagttgaagggccacggcaacgcgtgcttctctaggagggagttcgggaaagctctcaggttctattcgcaggcattgcgccatgtcccaattaattcgggtggcatggatgtgaacttggtatcttcattatatgtcaatcgagcctccaccatgcataaattaggtctgttcgaagaatctctaagggactgtgacagggccataaccatttctcctaattattctaaggcttggtacaggaagggaatggtaaaaacagcgctcaagaattattcatctgcaatacatgatttagaggtggcattgagccaggaagtgacttcttcggggaagagtaacatagaacaagagctgaagttgattttagagaagcatgaaagtgtcaatgaagctgggacatcaaactgtgatagcaaggatagagatttgcctcttgcaggacaacctcataaaattgttatagagagtatttcaacaccaaacaaagttgaatgcagattatcatgaaatcttcccgtgaaacacactgccacttttgcttcagtgaaactccagccgatgttgtattctgtccttcatgtacaataccaatttattgttcaaaaaggtgccaggagcaatcagcaggtcatatttctcgtgatgaagatactaatcttggatattcaacgaatgttgcaaacctgagtataacttcgagttgcaagtctccaagatctaagctatttgctgaacataggcatgaatgtggaggtgcccactgggcagctgttttaccagctgatgtagttttagctggacgaataatagcacacagcatagtaaaaaggatgccgtctgggaagagctttgctttctctggcccaaatttggatctagttcaccattatgatcaacattctcctgccaacaagttggaatcacatatatatgcaattgtcctattgttatgcctccaaaatcattatagatcagaccttttgtggacagaagattctttatcacaggtatatatggcgtttatcttcagacattattgttctgatatacctggttaatgagtatgatctgaaattgatggcgatttcagctcaagattttttataaattttcacaatgctaattgttatcaaatgtcttggtccatactgttttggtggagataaccagtctccttggggattgccagtttcatgttccttagtaatcttaatctcatctctacaataccagtgtttgtcgaacttccttctgtatagtccctttgaacttccttctgtatagtcctctttacacacttttacttgttctgatacttagaaagccattttttaacatgcaagaatttgtatcattacatttaaaaaaggacacaataaaagctctttcacttgtaaattaggtgaacacatcaaaccaaacaaaataggcagaaaagcagaaccaacgaggattattgttatataatcaaatcttaaatgactaaatagcctctagatcaatagccatcctgcaatgcaagtctgcaactgtgtctaacatgttacctaaagcccactggttacactcatggtggtcagacaagaaatcagacaagcttggaactcaagcttcagtcagatatgcctaaggtacctgggttcaacgatgttcttatctataccatggttttgtttctcattactaagctttcctatatactgcaattcccccaaaacttttttctctgggggtatagagaaactatggggtatcacattcacattttgtttttgggaaagaagaaactcatgtgttgattatcctctacagctggttcttttgatatttcaaatcaaagtcaattcaattgctattgtctgtatgaggtcgatggacagaggcccagagcacacaataaatagaggtttttatgtagctgaaggtgcaaaaatgtgtagtgtggagcaggtctgtctttttatactttctgtatttttttctgggactgggagcaatatatcatccaactattaaagttgcaaaaggtcgattggttgttgtcaatcattgggctttatctcatgctgataaaacacaatttcaacccagaaggtcaaaactagattagattaaaaaataaaacggagaaagtattatttgaaaagttattggatcgattatcaagtaacaataatcacagtatatgaggcctttttattaaaaaggcatctcactctaaattgtggtattgtgtctgtaacctttgtcttatgttatgtttgctcactgttaggtcagggttgcacaagctctttatgtatctggtagcctgttcaatcactcatgtcagcccaatgtgcacgcatattttctttcacgtgcgttcgtgctgagaactactgaatttataaagtccgggagcccagttgaactgtcatatggtccacaggtttcactgaaccccagctccctccaggcctccatttctctctgaatcagatatgaatgtcttctgctttgaacttttcatgcttctgatttctaggttggcgagatgcatatttcagagagacagaagtcacttcaagagaattactacttcagttgtcaatgttcaagttgttcagagctaaacctatcagaccttgttatgaattcattctgttgtccacaaagcaactgccttggtgccatatcggaatcaacttactacaggtccaaagagaatttcgtgaatgtttcccttggaggatcttatgtctgcaaactatcattgcccgatgtatcgaaggttgatatggatatggagaatgtcgccaaatctctcttgcaaaatagtggtgtcagtctgaacatagatcatggatgttgcatgagttgtagatcctgtattgatctgtcgtctgctctggctacatcacacagggaagaatctaccatcgataggttgaagaaacatacattcctagacaagactctcatcacagaggcattacaatctctaaaacaactcaagaagttgaggcacccatatagcaaggctctcgcgcaggccgaagacacaatcgcagaggcctttgcgaaggtcggagaccaagaactagcacgaaagcactgtgaagcatcaattcagatcctcgagaagctgtaccacccaaaacacatcatcattgctcacgagcttattaagcttgtttcgattctgctgtccctgggagatggggcaagcgccgcagccacattcgctcaagcagaggcaatattctctctttactacggatctcatgtggagaaggttttgacatacatgggtgccctgaagaaagctgtcattgacgtgtagcgtgctgacaatcctcacgcgggaatggccaacacggttctgcagaatcatctcaccttttgcgcttcttcgaggagttaatgtaggggaaaacccaaaaaatatttacaaagcagtgtggtattgcttgtagtttagtttgttctagaaaacacaaactagctcaaccaaacttcctggctaatgagtttggtggatgttctgagtgcctatgttaatgacttgtttcataaatttttttcgtatatactcgttgccttacaaactcggtcggtagaggaaagatcgctcccacggtattatattaagaagaagctcaattgaagcctcaaccaagaaaggtcat

SEQ ID NO: 203518 - DNA, 2835 bp, Zea Mays
cactttgtagaaattcgctcaatagcccggctgacgtcactaattcaccctctctttccggccgccgccacgggctctccatggaacggctcaaatcggcggtgccgcccgacctccggcgggccgtcggcgagggcacggccgccgatctagctaacaccacctctcgcctgttcgccttcttcgacagccttcctctcttccaccaggttatgcaagaactgaccgaccccgagcttgcgttgtgtcgcaaagacaaggtgaaggctgtagagttgaagggccacggcaacgcgtgcttctctaggagggagttcgggaaagctctcaggttctattcgcaggcattgcgccatgtcccaattaattcgggtggcatggatgtgaacttggtatcttcattatatgtcaatcgagcctccaccatgcataaattaggtctgttcgaagaatctctaagggactgtgacagggccataaccatttctcctaattattctaaggcttggtacaggaagggaatggtaaaaacagcgctcaagaattattcatctgcaatacatgatttagaggtggcattgagccaggaagtgacttcttcggggaagagtaacatagaacaagagctgaagttgattttagagaagcatgaaagtgtcaatgaagctgggacatcaaactgtgatagcaaggatagagatttgcctcttgcaggacaacctcataaaattgttatagagagtatttcaacaccaaacaaaggtagaggaatgatttctacagatgatatccccccagcttcgttgattcatgttgaggaccctcttgctgcgttgaatgcagattatcatgaaatcttcccgtgaaacacactgccacttttgcttcagtgaaactccagccgatgttgtattctgtccttcatgtacaataccaatttattgttcaaaaaggtgccaggagcaatcagcaggtcatatttctcgtgatgaagatactaatcttggatattcaacgaatgttgcaaacctgagtataacttcgagttgcaagtctccaagatctaagctatttgctgaacataggcatgaatgtggaggtgcccactgggcagctgttttaccagctgatgtagttttagctggacgaataatagcacacagcatagtaaaaaggatgccgtctgggaagagctttgctttctctggcccaaatttgatgatatcatttcaggaattaatgagcgaagttgaccatcgcaggatctagttcaccattatgatcaacattctcctgccaacaagttggaatcacatatatatgcaattgtcctattgttatgcctccaaaatcattatagatcagaccttttgtggacagaagattctttatcacagctggttcttttgatatttcaaatcaaagtcaattcaattgctattgtctgtatgaggtcgatggacagaggcccagagcacacaataaatagaggtttttatgtagctgaaggtgcaaaaatgtgtagtgtggagcaggtcagggttgcacaagctctttatgtatctggtagcctgttcaatcactcatgtcagcccaatgtgcacgcatattttctttcacgtgcgttcgtgctgagaactactgaatttataaagtccgggagcccagttgaactgtcatatggtccacaggttggcgagatgcatatttcagagagacagaagtcacttcaagagaattactacttcagttgtcaatgttcaagttgttcagagctaaacctatcagaccttgttatgaattcattctgttgtccacaaagcaactgccttggtgccatatcggaatcaacttactacaggtccaaagagaatttcgtgaatgtttcccttggaggatcttatgtctgcaaactatcattgcccgatgtatcgaaggttgatatggatatggagaatgtcgccaaatctctcttgcaaaatagtggtgtcagtctgaacatagatcatggatgttgcatgagttgtagatcctgtattgatctgtcgtctgctctggctacatcacacagggaagaatctaccatcgataggttgaagaaacatacattcctagacaagactctcatcacagaggcattacaatctctaaaacaactcaagaagttgaggcacccatatagcaaggctctcgcgcaggccgaagacacaatcgcagaggcctttgcgaaggtcggagaccaagaactagcacgaaagcactgtgaagcatcaattcagatcctcgagaagctgtaccacccaaaacacatcatcattgctcacgagcttattaagcttgtttcgattctgctgtccctgggagatggggcaagcgccgcagccacattcgctcaagcagaggcaatattctctctttactacggatctcatgtggagaaggttttgacatacatgggtgccctgaagaaagctgtcattgacgtgtagcgtgctgacaatcctcacgcgggaatggccaacacggttctgcagaatcatctcaccttttgcgcttcttcgaggagttaatgtaggggaaaacccaaaaaatatttacaaagcagtgtggtattgcttgtagtttagtttgttctagaaaacacaaactagctcaaccaaacttcctggctaatgagtttggtggatgttctgagtgcctatgttaatgacttgtttcataaatttttttcgtatatactcgttgccttacaaactcggtcggtagaggaaagatcgctcccacggtattatattaagaagaagctcaattgaagcctcaaccaagaaaggtcat

SEQ ID NO: 203519 - DNA, 3665 bp, Zea Mays
cactttgtagaaattcgctcaatagcccggctgacgtcactaattcaccctctctttccggccgccgccacgggctctccatggaacggctcaaatcggcggtgccgcccgacctccggcgggccgtcggcgagggcacggccgccgatctagctaacaccacctctcgcctgttcgccttcttcgacagccttcctctcttccaccaggttatgcaagaactgaccgaccccgagcttgcgttgtgtcgcaaagacaaggtgaaggctgtagagttgaagggccacggcaacgcgtgcttctctaggagggagttcgggaaagctctcaggttctattcgcaggcattgcgccatgtcccaattaattcgggtggcatggatgtgaacttggtatcttcattatatgtcaatcgagcctccaccatgcataaattaggtctgttcgaagaatctctaagggactgtgacagggccataaccatttctcctaattattctaaggcttggtacaggaagggaatggtaaaaacagcgctcaagaattattcatctgcaatacatgatttagaggtggcattgagccaggaagtgacttcttcggggaagagtaacatagaacaagagctgaagttgattttagagaagcatgaaagtgtcaatgaagctgggacatcaaactgtgatagcaaggatagagatttgcctcttgcaggacaacctcataaaattgttatagagagtatttcaacaccaaacaaaggtagaggaatgatttctacagatgatatccccccagcttcgttgattcatgttgaggaccctcttgctgcgattatcatgaaatcttcccgtgaaacacactgccacttttgcttcagtgaaactccagccgatgttgtattctgtccttcatgtacaataccaatttattgttcaaaaaggtgccaggagcaatcagcaggtcatatttctcgtgatgaagatactaatcttggatattcaacgaatgttgcaaacctgagtataacttcgagttgcaagtctccaagatctaagctatttgctgaacataggcatgaatgtggaggtgcccactgggcagctgttttaccagctgatgtagttttagctggacgaataatagcacacagcatagtaaaaaggatgccgtctgggaagagctttgctttctctggcccaaatttggatctagttcaccattatgatcaacattctcctgccaacaagttggaatcacatatatatgcaattgtcctattgttatgcctccaaaatcattatagatcagaccttttgtggacagaagattctttatcacaggtatatatggcgtttatcttcagacattattgttctgatatacctggttaatgagtatgatctgaaattgatggcgatttcagctcaagattttttataaattttcacaatgctaattgttatcaaatgtcttggtccatactgttttggtggagataaccagtctccttggggattgccagtttcatgttccttagtaatcttaatctcatctctacaataccagtgtttgtcgaacttccttctgtatagtccctttgaacttccttctgtatagtcctctttacacacttttacttgttctgatacttagaaagccattttttaacatgcaagaatttgtatcattacatttaaaaaaggacacaataaaagctctttcacttgtaaattaggtgaacacatcaaaccaaacaaaataggcagaaaagcagaaccaacgaggattattgttatataatcaaatcttaaatgactaaatagcctctagatcaatagccatcctgcaatgcaagtctgcaactgtgtctaacatgttacctaaagcccactggttacactcatggtggtcagacaagaaatcagacaagcttggaactcaagcttcagtcagatatgcctaaggtacctgggttcaacgatgttcttatctataccatggttttgtttctcattactaagctttcctatatactgcaattcccccaaaacttttttctctgggggtatagagaaactatggggtatcacattcacattttgtttttgggaaagaagaaactcatgtgttgattatcctctacagctggttcttttgatatttcaaatcaaagtcaattcaattgctattgtctgtatgaggtcgatggacagaggcccagagcacacaataaatagaggtttttatgtagctgaaggtgcaaaaatgtgtagtgtggagcagggttgcacaagctctttatgtatctggtagcctgttcaatcactcatgtcagcccaatgtgcacgcatattttctttcacgtgcgttcgtgctgagaactactgaatttataaagtccgggagcccagttgaactgtcatatggtccacaggtttcactgaaccccagctccctccaggcctccatttctctctgaatcagatatgaatgtcttctgctttgaacttttcatgcttctgatttctaggttggcgagatgcatatttcagagagacagaagtcacttcaagagaattactacttcagttgtcaatgttcaagttgttcagagctaaacctatcagaccttgttatgaattcattctgttgtccacaaagcaactgccttggtgccatatcggaatcaacttactacaggtccaaagagaatttcgtgaatgtttcccttggaggatcttatgtctgcaaactatcattgcccgttgatatggatatggagaatgtcgccaaatctctcttgcaaaatagtggtgtcagtctgaacatagatcatggatgttgcatgagttgtagatcctgtattgatctgtcgtctgctctggctacatcacacagggaagaatctaccatcgataggttgaagaaacatacattcctagacaagactctcatcacagaggcattacaatctctaaaacaactcaagaagttgaggcacccatatagcaaggctctcgcgcaggccgaagacacaatcgcagaggcctttgcgaaggtcggagaccaagaactagcacgaaagcactgtgaagcatcaattcagatcctcgagaagctgtaccacccaaaacacatcatcattgctcacgagcttattaagcttgtttcgattctgctgtccctgggagatggggcaagcgccgcagccacattcgctcaagcagaggcaatattctctctttactacggatctcatgtggagaaggttttgacatacatgggtgccctgaagaaagctgtcattgacgtgtagcgtgctgacaatcctcacgcgggaatggccaacacggttctgcagaatcatctcaccttttgcgcttcttcgaggagttaatgtaggggaaaacccaaaaaatatttacaaagcagtgtggtattgcttgtagtttagtttgttctagaaaacacaaactagctcaaccaaacttcctggctaatgagtttggtggatgttctgagtgcctatgttaatgacttgtttcataaatttttttcgtatatactcgttgccttacaaactcggtcggtagaggaaagatcgctcccacggtattatattaagaagaagctcaattgaagcctcaaccaagaaaggtcat

SEQ ID NO: 203520 - DNA, 2742 bp, Zea Mays
cactttgtagaaattcgctcaatagcccggctgacgtcactaattcaccctctctttccggccgccgccacgggctctccatggaacggctcaaatcggcggtgccgcccgacctccggcgggccgtcggcgagggcacggccgccgatctagctaacaccacctctcgcctgttcgccttcttcgacagccttcctctcttccaccaggttatgcaagaactgaccgaccccgagcttgcgttgtgtcgcaaagacaaggtgaaggctgtagagttgaagggccacggcaacgcgtgcttctctaggagggagttcgggaaagctctcaggttctattcgcaggcattgcgccatgtcccaattaattcgggtggcatggatgtgaacttgaaattaggtctgttcgaagaatctctaagggactgtgacagggccataaccatttctcctaattattctaaggcttggtacaggaagggaatggtaaaaacagcgctcaagaattattcatctgcaatacatgatttagaggtggcattgagccaggaagtgacttcttcggggaagagtaacatagaacaagagctgaagttgattttagagaagcatgaaagtgtcaatgaagctgggacatcaaactgtgatagcaaggatagagatttgcctcttgcaggacaacctcataaaattgttatagagagtatttcaacaccaaacaaaggtagaggaatgatttctacagatgatatccccccagcttcgttgattcatgttgaggaccctcttgctgcgattatcatgaaatcttcccgtgaaacacactgccacttttgcttcagtgaaactccagccgatgttgtattctgtccttcatgtacaataccaatttattgttcaaaaaggtgccaggagcaatcagcaggtcatatttctcgtgatgaagatactaatcttggatattcaacgaatgttgcaaacctgagtataacttcgagttgcaagtctccaagatctaagctatttgctgaacataggcatgaatgtggaggtgcccactgggcagctgttttaccagctgatgtagttttagctggacgaataatagcacacagcatagtaaaaaggatgccgtctgggaagagctttgctttctctggcccaaatttggatctagttcaccattatgatcaacattctcctgccaacaagttggaatcacatatatatgcaattgtcctattgttatgcctccaaaatcattatagatcagaccttttgtggacagaagattctttatcacagctggttcttttgatatttcaaatcaaagtcaattcaattgctattgtctgtatgaggtcgatggacagaggcccagagcacacaataaatagaggtttttatgtagctgaaggtgcaaaaatgtgtagtgtggagcaggtcagggttgcacaagctctttatgtatctggtagcctgttcaatcactcatgtcagcccaatgtgcacgcatattttctttcacgtgcgttcgtgctgagaactactgaatttataaagtccgggagcccagttgaactgtcatatggtccacaggttggcgagatgcatatttcagagagacagaagtcacttcaagagaattactacttcagttgtcaatgttcaagttgttcagagctaaacctatcagaccttgttatgaattcattctgttgtccacaaagcaactgccttggtgccatatcggaatcaacttactacaggtccaaagagaatttcgtgaatgtttcccttggaggatcttatgtctgcaaactatcattgcccgatgtatcgaaggttgatatggatatggagaatgtcgccaaatctctcttgcaaaatagtggtgtcagtctgaacatagatcatggatgttgcatgagttgtagatcctgtattgatctgtcgtctgctctggctacatcacacagggaagaatctaccatcgataggttgaagaaacatacattcctagacaagactctcatcacagaggcattacaatctctaaaacaactcaagaagttgaggcacccatatagcaaggctctcgcgcaggccgaagacacaatcgcagaggcctttgcgaaggtcggagaccaagaactagcacgaaagcactgtgaagcatcaattcagatcctcgagaagctgtaccacccaaaacacatcatcattgctcacgagcttattaagcttgtttcgattctgctgtccctgggagatggggcaagcgccgcagccacattcgctcaagcagaggcaatattctctctttactacggatctcatgtggagaaggttttgacatacatgggtgccctgaagaaagctgtcattgacgtgtagcgtgctgacaatcctcacgcgggaatggccaacacggttctgcagaatcatctcaccttttgcgcttcttcgaggagttaatgtaggggaaaacccaaaaaatatttacaaagcagtgtggtattgcttgtagtttagtttgttctagaaaacacaaactagctcaaccaaacttcctggctaatgagtttggtggatgttctgagtgcctatgttaatgacttgtttcataaatttttttcgtatatactcgttgccttacaaactcggtcggtagaggaaagatcgctcccacggtattatattaagaagaagctcaattgaagcctcaaccaagaaaggtcat

SEQ ID NO: 203521 - DNA, 1204 bp, Zea Mays
ctcgcccagtcgccccttccgctcgacgcaaatcgtgaaacagtttagaatttccaacgaaagtcctacgagcctgcgagtgctaaactgctaactgctaagactgcaatggcggccggaggcgagctgcagctgctgagctcatggtacagcccctacgtgatccgcgccaaggtggcgctggggctgaaggggctcatctacgagttcatcgaggaggacctcttcagcaagagcgacctgctgctgaagctcaacccggtgcacaagaaggtgcccgtcctggtccacggcggccgccccgtgtgcgagtcgctcgtcatcgtgcagtacgtcgacgagacctgggcagcaggcaccgggacccctctccttcctgccgacgcccacgaccgcgccacggctcgcttctgggcagcctacgtcgacgacaagttctgcaaggagtggatcaaactgtacaggtcgacgacggcggagaaggcggcggaggcgctcggcggcgtggtccccgtggtggagacgctggagcaggcgttcagggagtgctccagggggaaacccttcttcggcggcgacgccgtcgggctcgtggacatcgcgctcgggagcttcgtggtgtggatcagggtggtggacgaggcggccggcgtaaagcttctggacgaggccaagttcccggccttgacggcgtgggcggagcgcttcttggcggtggactgctccaaagggaaacccttcttcggcggcgacgccgtcgggctcgtggacatcgcgctcgggagcttcgtggtgtggatcagggtggtggacgaggcggccggcgtaaagcttctggacgaggccaagttcccggccttgacggcgtgggcggagcgcttcttggcggtggacgccgtgaaggaggtgatgccggacgccggaaggctgttggagcactacaaggggtttctggctaaacggtctccacctgctggttactgaacgctgtaactgtaagcctgtaacagcaagctcagtgttcgtgtacttttccgtgcgttaacgtgtactagagttcaggaaaggctttgattctgtccagagtccagacgaataaacgaatgttttttatacttcctccgttgcaatttatactttatttgacttttttacttaaagttttatcggtttgttttattaaaaaattctaatttattattaa

SEQ ID NO: 203522 - DNA, 2601 bp, Zea Mays
caagaaaccaatcgaattctttcggctgccctaatatctcatctcctttgacatctcaagagaaagaggaacgaacaagagagagagaaagcactggctctgtagctagctagctacagcgatagcaactcacaaaaaaagcggcaccacacacccacacacaccagaaaacacaagcacaagcaaataagcagcaccgccagcccggccaccaagaactccaagaataaccttcactgccgtcttcgttcgatcccttacgctaacactagctgcttcaggctgcagccaccagccaaaggtagggcgcgcgcgcggcatccatggaggcgcgggcagcgtcggtcccggacctttcgctgcacatcagccttccgagcagcgccgcgtctccgtctcccgccccggggctgggcgctggaggagtagggcgtggtgcgcagccgtccggaggggacccgtggcgccgtctgaacggatccacggcgtcgaccgagctgtcgctctcgccgccgccgccgcggcaggaggcggctgccggggacgtccttccatggcggctccggccgccagcggcgaattactcctcgtccaccgcggaggcaacgttcttgccggtgaccgtgccgcggctttcgttcgacgccgcggcggaggcggcgccggcaaggccaatcaacggagtgcccgtctacagcagcccgcggaccggcgccgcccatccttttcttggcgccggcggcgaataccggcagtgccaccaccacaaggccgccgtggggctatacaatccctaccactcctcgtcgtcgtggccctcgtccctgcggtcgacgacgacggcgccccttggcgccgtggcgccgccggcgtccgaccccacggcgtcgtcgtacctctcgccgtccgcgtaccaccggatgctgtcgagcaccggccggctccacctccagggcgtgctcgccgacacgctccgcggctacggcagcgggcaccaccaccgccagcacttgggcagcctggccgcggcccgctacatgccgaggctcccggcttcccggcgcggcatgcgcgcgccgcggatgcggtggacgagcagcctgcacgcgcgtttcgtccacgccgtcgagctcctcggcggccacgagcgggcgacgcccaagtcggtgctggagctgatggacgtgaaggatctgacgctagcgcatgtgaagagtcatttgcaggttgagttccggccgatgaggtcttggttctttaattctgtctacccgtgcgattctttaattattctgtgttcttcctgcatttcttgttcccgttcggggctcatgtacaaggaaggaggtcaaatcttgacgaggtgccagccagggcacagactccgagggacgatgtgttcagtgagagagaaagtcgtcagatgtgcttgtgcagactctcagccaagaaactgccatccctagctagcacctagcagagaggaaagggggagctactagtatagctagagagagagcctagagagatggggagagatcatctagtactagagagggaggttggatgtgtgggtgagtgtgcaagaaaaggtgccatcattgcacaataatgcaacgtctgtcgtctgctcctgcaagccgcccaatccccaaagcagtgaagtgagcggtccagccaggcaacacggggacggacgagagagagagagagagaggaggcagcccatagcagtttcctttggacatttctgggcgggtgctctgttttgctgcgatctcctgcgcaacgacgacgaccctttatgatccgctgtgctttacgccttttccctcctcgatctcttctccctccttcccaatgcaagcaaacagtcgtgtgtctgcagctttactttcttggtcattcttttcttgctgctccttttccagatgtataggaccgtgaagagcactgataagccgcctgcagcaacctcatcaggagggggagggccgcctgtggacggtggtggcgggtccggcgacgacgaccacccgagcgattggcggcgggctccatcctcatcagctggtcgggacgtcagcccgcaggcgttcactggacaccggtcagcctcctcggacggcgcggcaagccatgcgggcggcgacgttgaatgctcctccgccgacgattccgacggtggcaggccgcgcagtgcttctccgccaaggctgccgccaccaagtgcgtgcaatgcagcagacacccttcattcagttggcgtaccatattccactactgaggatatggagcctgcttgtcgatcagctggcttacaacattcactcaaccatgaaatgagctgccctcctagcctggagttcacgctagggcggccaaactggaatggtgcagaatagcatcaccagcagctagctactagacacatgcatggatatatggcacattattagttcgacacttcatctagactgcttacaacacctgattggtttttgcatctattagaaatttagatagttccatgtttaatccaaaaatatcatatatatagtagatttatgacaacatgtacgtgcacgtgtgaaatattac

SEQ ID NO: 203523 - DNA, 4710 bp, Zea Mays
tggaaagcaggcaagcacaacagcgatcccacaaaccacagctcggctcctcttcgccgtcgcaaccgatttatatatggcgatggaggcgtcggcggcctccgacgaaaccctagccgccgtcttcgcccagctcaagctccacaccgtcgctctcctcgacctcctccgcactcgccgccccatctctagctccggctcctccctacgcgaaatggccgctttcctccgcgccgccccggccccggcgctgcagctctgcttcgattatacagtgtttccactgctcctgctcctggatgcggcggtgcagtgcaggaagcaaggcaatgcgccggggcaggttgcagggggcattgatataggtgatgccgtcgccgaagctggtctgacctgccttgaggtcctcctcaccaagtgccacctcacctcggtcaatcagatggtagcaatgctgaaaaagttgacttccggggctatgctttcaccttcagaggcttcagaggaattccgtggtgcaattattagatgcttcagggctttggttttgcagttacagccatgcttggaccatttttgttcttgcaaacacggaatagtgttacctacgatcccaaccagtacatgcttggaggttagaagtgtagtccgcccaaatcactctgcgcagccagaggagtgcttgcttgcatttcttcagtctcaaaatgcttcagctgccgtaggacattggctctcacttcttctacaagcatcagaacttgaggcatcaagggggcaccggggaagtgcagatgttaggaaggaatcattgcacacgctgcgcattcttattggcaaggtaggctctgctgatgcacttgcctttttccttcctggaattgtcagtcgccttgggaaggttctctacacagctaagactatgattagtggtgctgctgggagttctttgagcattgaacaagccattcttggattgaccgaggctttgatgatagtactaaatgacaaggaaaatcttagtgcacttggtaagcacaagaatgagaatcattctggtggcagtgagtcaactgagcatatattgcagatgcttcgccagttgccaaccaaaaatatatctgataagataagccatgatgagattacagatgattctgtctccaatgtcaataattcctttgctgatagaaaggcactgcatgtgaagcggaccaaaaaatggcttgaggaaacaactagtaatgttgataaattgctgtctgctacattcccacatcttgctattcattcatctgagaaggtaaggaaggcagtggttagtggtgtaaaagggcttttgtctagttgcagttctacattaaaaagaaccaagatgctacttttggaatgtttatgtgttctggcatgtgatgatgctgcagctgtgtctgaggctgcacaagatgctcttgatcatcttttcaaccaaggccacaatctcgtaacagaaaaggagatttctgatacctttactaggctggttgaaaggctaccacaagtggtacttggaagcgaggagacaaccgcactttcacatgctaggatgttgttggctctgaccttttatgctggtccccagtttctgataaatcatcttcaccgttctcctgtcattgctgctcgtttctttgattgtttgggtttatgcataggtcatagctcacagttttctggttccatggacaagctaattgtatcaaagccactatctattgggtatctttattcagttgctgagttgaagagtggcgcctattctaaagatacaactaacatatctctgcatgccacgtcaacatctgcagcctccaaaatatctgttatccatgataatgctttgccaaatgcattacttggtacagttgaatatgagttgccccatgtgcctccatggttttttcatgctggtagccagaagctttatggggttcttgctggaataattagacttgttggcctatcaacagtgtcaggggaaggaactgctgcaaccttgtctctctttgttgatattctgcttgatcagtttaggaggttgagcactgagctgagagacaaagatgtttacaacgatggtctgcagcggtggtacatgaaaggtgaagctggacaagcattgcgccaggctagttcagctgtctgcatgctcaatgagctcatgtatggtttgtcaggtcgatcccttggtatgtttttacaacttttcagcaacggatcagcacagatgccaaggacagtttgtcagaaaaatcaactgcttgcttgtgttaaacataatgcagttactaacaaaagagaagtgtggggttttagtgaacaaaagggcactaaagacaacattcttcattgcatcagcagtattctgcatgaatatgtatcaccagaagtgtgggatcttccaacagagaaggacactgagctacacctaatagagttgaacctgccattgcacttctaccgtgatacaactgcattgcacacagtagtgcttgaaggaattggagtcttgggtgttcttcttggtcaagattttgcacttagtgggtttatgcactcttccctttatcttctgctccgtgaacttatcagctcaagtgctcagataagaactgcatgtgatgctgtcttgagagcccttgctactgctggcggtcattgttcggttggccaatttgtcgttgcgaatgcagactacattattgactctctttgcaggcaattgcgtcacctggacctgaacccccatgtccctgatgttcttgcttccatgctatgttacatcggtgcttctcgtgatatcttgccattcttggaagaaccgatgcaatcaatttcttctgagcttgaggtacttggcaggcatgatcacccacgtctaactgttccatttctgaaggcagtttctgagatttccaaggcatgtagacatgaatccacttgtttgccagatgaggcacaatcattttatgagaaggtcagttctgagggtcaagaagtaaaaattatgattgagaagagaatggaatccagtgcaatatctgaaagaaagaatgttgatgctcgatcttactttatgaccttggaatactgggaagatttattttgtaagctaaatgagatgagaagatataggagaatagttgggtctcttgcgggctcttgtttatcagctgccatcccacttctctcttccaataaggaaacagcatgccttgtggcccttgacattgtggagagtgctgctatatctattgccaatgttgaggaggcttataagtgtgaatgtcaaagcaaaggagtcattgaggaggccatccagttttgttcatttgacgagcttcttgatggtacagatgccaccgaagatgttgatgaaaataggctactcccagcaatgaacaaactgtggccttacttggttatctgtctaaggaacaagatctcagtgccggttgttaggaagtgcaccgaaatgttgaggcgagcaatttgcatatctggcggcgatttttatgtacgcaggtttcataaggatggacctattgtttggaggttgctggctttatctccattccgacgtctgtcaaagatggatgaaaaagcaatcattttaccatatagggatacctcacttaactcagaggaacctatggctgagatctccagccaaaagattcagattgcagtcctggacatgatcgctgcaatatcttcgaacaagagaagtgctgttgcactagaaagcgtactaaagaaggtctgtggccttgtggtaggcattgcctacagtagtttgacaggtttgcaggaagctgctataagggcattggcaggccttgcctgcatggatgctgatcttgtctggcttctccttgcggatgtgtactactcactaaaccaaagggaatctttacttcccaaccaagatctagccctggtatcagatcttttgccccctccagtgtcttcgagagaatacctctttgtacagtatggaggtgagggtgtcaggttcctgatactgtgtatttgtaatcttgctgagtttctttggtcatgctagcaccctatgtcacacattgaacataatatcacctgctacagagaatgcaaacatcaggactcatgatgacaatgaaggatgtgatgggtttgtatctgttagccatataaggttgcacgttaagcatgcccctgacttgccggacgagcagcaagacttcgggacctagattggctaaggcactaagaatagaatagcttatctaccgatatgtaaagtcttatttccacctttcgaattcttttcctcggtagctaagcttatttagttgcctaatggtcgatgtaatctttttattgtgtgattcattccactttcatggtatttccgctcttgttacctccctctaccgcttcttcatctacatctaacctcatgcctggcgacctctaataagtaactgttgatccggccacataattggaatgccttcgcgtgaggttgccggcctttgtgtcagtcactcaacatgctctcaacatgctgaggaaggtcgttgttgtgccgtagccgagcgacgcaacaagtggctgttcagaacacggacaaggtgatgttgaacgtgtagaaacaacggcagcgtgatgcggaacgtctgaaacaac

SEQ ID NO: 203524 - DNA, 4919 bp, Zea Mays
cgtcgcttggcgcttccagagaaaaacccgaaagacgtctcgtgtcgcctccactaggcacgtcctggaaccttgcggggccggtattggaaagcaggcaagcacaacagcgatcccacaaaccacagctcggctcctcttcgccgtcgcaaccgatttatatatggcgatggaggcgtcggcggcctccgacgaaaccctagccgccgtcttcgcccagctcaagctccacaccgtcgctctcctcgacctcctccgcactcgccgccccatctctagctccggctcctccctacgcgaaatggccgctttcctccgcgccgccccggccccggcgctgcagctctgcttcgattatacagtgtttccactgctcctgctcctggatgcggcggtgcagtgcaggaagcaaggcaatgcgccggggcaggttgcagggggcattgatataggtgatgccgtcgccgaagctggtctgacctgccttgaggtcctcctcaccaagtgccacctcacctcggtcaatcagatggtagcaatgctgaaaaagttgacttccggggctatgctttcaccttcagaggcttcagaggaattccgtggtgcaattattagatgcttcagggctttggttttgcagttacagccatgcttggaccatttttgttcttgcaaacacggaatagtgttacctacgatcccaaccagtacatgcttggaggttagaagtgtagtccgcccaaatcactctgcgcagccagaggagtgcttgcttgcatttcttcagtctcaaaatgcttcagctgccgtaggacattggctctcacttcttctacaagcatcagaacttgaggcatcaagggggcaccggggaagtgcagatgttaggaaggaatcattgcacacgctgcgcattcttattggcaaggtaggctctgctgatgcacttgcctttttccttcctggaattgtcagtcgccttgggaaggttctctacacagctaagactatgattagtggtgctgctgggagttctttgagcattgaacaagccattcttggattgaccgaggctttgatgatagtactaaatgacaaggaaaatcttagtgcacttggtaagcacaagaatgagaatcattctggtggcagtgagtcaactgagcatatattgcagatgcttcgccagttgccaaccaaaaatatatctgataagataagccatgatgagattacagatgattctgtctccaatgtcaataattcctttgctgatagaaaggcactgcatgtgaagcggaccaaaaaatggcttgaggaaacaactagtaatgttgataaattgctgtctgctacattcccacatcttgctattcattcatctgagaaggtaaggaaggcagtggttagtggtgtaaaagggcttttgtctagttgcagttctacattaaaaagaaccaagatgctacttttggaatgtttatgtgttctggcatgtgatgatgctgcagctgtgtctgaggctgcacaagatgctcttgatcatcttttcaaccaaggccacaatctcgtaacagaaaaggagatttctgatacctttactaggctggttgaaaggctaccacaagtggtacttggaagcgaggagacaaccgcactttcacatgctaggatgttgttggctctgaccttttatgctggtccccagtttctgataaatcatcttcaccgttctcctgtcattgctgctcgtttctttgattgtttgggtttatgcataggtcatagctcacagttttctggttccatggacaagctaattgtatcaaagccactatctattgggtatctttattcagttgctgagttgaagagtggcgcctattctaaagatacaactaacatatctctgcatgccacgtcaacatctgcagcctccaaaatatctgttatccatgataatgctttgccaaatgcattacttggtacagttgaatatgagttgccccatgtgcctccatggttttttcatgctggtagccagaagctttatggggttcttgctggaataattagacttgttggcctatcaacagtgtcaggggaaggaactgctgcaaccttgtctctctttgttgatattctgcttgatcagtttaggaggttgagcactgagctgagagacaaagatgtttacaacgatggtctgcagcggtggtacatgaaaggtgaagctggacaagcattgcgccaggctagttcagctgtctgcatgctcaatgagctcatgtatggtttgtcaggtcgatcccttggtatgtttttacaacttttcagcaacggatcagcacagatgccaaggacagtttgtcagaaaaatcaactgcttgcttgtgttaaacataatgcagttactaacaaaagagaagtgtggggttttagtgaacaaaagggcactaaagacaacattcttcattgcatcagcagtattctgcatgaatatgtatcaccagaagtgtgggatcttccaacagagaaggacactgagctacacctaatagagttgaacctgccattgcacttctaccgtgatacaactgcattgcacacagtagtgcttgaaggaattggagtcttgggtgttcttcttggtcaagattttgcacttagtgggtttatgcactcttccctttatcttctgctccgtgaacttatcagctcaagtgctcagataagaactgcatgtgatgctgtcttgagagcccttgctactgctggcggtcattgttcggttggccaatttgtcgttgcgaatgcagactacattattgactctctttgcaggcaattgcgtcacctggacctgaacccccatgtccctgatgttcttgcttccatgctatgttacatcggtgcttctcgtgatatcttgccattcttggaagaaccgatgcaatcaatttcttctgagcttgaggtacttggcaggcatgatcacccacgtctaactgttccatttctgaaggcagtttctgagatttccaaggcatgtagacatgaatccacttgtttgccagatgaggcacaatcattttatgagaaggtcagttctgagggtcaagaagtaaaaattatgattgagaagagaatggaatccagtgcaatatctgaaagaaagaatgttgatgctcgatcttactttatgaccttggaatactgggaagatttattttgtaagctaaatgagatgagaagatataggagaatagttgggtctcttgcgggctcttgtttatcagctgccatcccacttctctcttccaataaggaaacagcatgccttgtggcccttgacattgtggagagtgctgctatatctattgccaatgttgaggaggcttataagtgtgaatgtcaaagcaaaggagtcattgaggaggccatccagttttgttcatttgacgagcttcttgatggtacagatgccaccgaagatgttgatgaaaataggctactcccagcaatgaacaaactgtggccttacttggttatctgtctaaggaacaagatctcagtgccggttgttaggaagtgcaccgaaatgttgaggcgagcaatttgcatatctggcggcgatttttatgtacgcaggtttcataaggatggacctattgtttggaggttgctggctttatctccattccgacgtctgtcaaagatggatgaaaaagcaatcattttaccatatagggatacctcacttaactcagaggaacctatggctgagatctccagccaaaagattcagattgcagtcctggacatgatcgctgcaatatcttcgaacaagagaagtgctgttgcactagaaagcgtactaaagaaggtctgtggccttgtggtaggcattgcctacagtagtttgacaggtttgcaggaagctgctataagggcattggcaggccttgcctgcatggatgctgatcttgtctggcttctccttgcggatgtgtactactcactaaaccaaagggaatctttacttcccaaccaagatctagccctggtatcagatcttttgccccctccagtgtcttcgagagaatacctctttgtacagtatggaggtgagggtgtcaggtgtgatgtagatccctcatctgttcattatgtgttcagaaggatgcagggtgtgtgatcttgtgtgacctgaaaatcaggttcctgatactgtgtatttgtaatcttgctgagtttctttggtcatgctagcaccctatgtcacacattgaacataatatcacctgctacagagaatggtaaactttttcatacgtgttctcgcactgaaaatcatcaagcaaacatcaggactcatgatgacaatgaaggatgtgatgggtttgtatctgttagccatataaggttgcacgttaagcatgcccctgacttgccggacgagcagcaagacttcgggacctagattggctaaggcactaagaatagaatagcttatctaccgatatgtaaagtcttatttccacctttcgaattcttttcctcggtagctaagcttatttagttgcctaatggtcgatgtaatctttttattgtgtgattcattccactttcatggtatttccgctcttgttacctccctctaccgcttcttcatctacatctaacctcatgcctggcgacctctaataagtaactgttgatccggccacataattggaatgccttcgcgtgaggttgccggcctttgtgtcagtcactcaacatgctctcaacatgctgaggaaggtcgttgttgtgccgtagccgagcgacgcaacaagtggctgttcagaacacggacaaggtgatgttgaacgtgtagaaacaacggcagcgtgatgcggaacgtctgaaacaac

SEQ ID NO: 203525 - DNA, 1178 bp, Zea Mays
ctcgtctcttcttacagcgcatccagttagcttgctccttttgacccaaccaagaaaaagaagaagaagaaggtggtaatacaagagccatcagatgaggtggataacttggcagagaagacagagagcttgactgtaaccgagtctagtgagccaagctttgcgggcatgaaaaagaagaagaagaaacatgtggaacttgattcttctcttaccgagaccggagatgttgatgacacaggagacgatcaagttagagaggatgaagaaggagaagggattgtgctcgctggtgccgctgccaccagatacccttgggaaggaactgacagagattataagtatgaagagctgcttggcagagtattcaacattttgcgtgagaacaacccggatcttgctggtgatagaagaagaactgttatgaggccccctcaagtcctcagggaaggaacaaagaagacagtttttgtgaacttcatggacttgtgcaaaacgcaaccagaacatgtgatgatgttcttgcttgctgagatgggaacaagtggatccctggatgggcaacaaaggttggttatcaaaggaagatttgcaccaaaaaatttcgaagcgatacttaggagatatatcaatgaatatgtcatatgcaatggttgcaagagtccggataccattctttctaaagagaacaggttgttcttcctccgatgcgagcagtgtggttcatcgaggtctgttgctcccatcaaggctggattcgttgcccaagtgggccgtcgtaaggctggatcttaagctacctactacttgcctgaaatcgcttcccgatgaagacaatgcaaactagtttgctggtccacaaaaatcattgttgcactttcccttgtgcctacacagttcactggatttctgctgttcgctatacttggattggtgctgtgaatttatttcgtgtgatgagaggatttgtgtttgcggctcacttgtgtttactacgtttgttttgctcgtgattttgctgtggaaggcactgtcgggagcttcccgagttaggacgagtaacaagaaaacgtgttgcttccattcagataaaaagcaaggctgcagcattctgaactgttcctcagcttcttttccctgcacttatttgggtataaaaagctaagaagatgtgattt

SEQ ID NO: 203526 - DNA, 2456 bp, Zea Mays
aaaatggtctgtactgcctctgcgtgcctccccgtaataaattctccctcccttcctcctctctactctctcttcgcgcgcctgcgattctctccgctgggatgcaagtgttgtagtctgaagaattcgctggcggtggtgcagcttggcttcctctgcttctttttgacgatcaactgtcagggaacgtaacgtaactacatggtcacaattttgatgctggagcaaggcactcatggaccggacagacacatctggatttgttaccggtggatcagacgatgagtaccggttctgcgggtgtcttcctgcaccgtggaaaccaggctctcatggatgattctgcagtgccaattggcttctcaatgacgagctacacgacagaggtttccagaggtggattcatgcgcctgctcaagatgatgggtgcagactagtcctcgggctgggtccgacgccggacccagacgttaactctcctgatcagcagcctgccggtgccggagcagacaagtcgagaccaccacctgtaactttgtttggccagagcttctccttcgctgatccggggacgctgagccttgggattcatcagggccgtagtacgggagcaaataaacacttgggcgccggaaccatcatctctttttccactgtggacgagggctccacgtctgccaggagtagctccggcggctacatgccatcgctgctctttgctcgtcggccaaactgttcgacagctgaagaggaacagggtttgctagatgacacagacacagacaacagtaacgatggtactgaaccttcggcatccatgacggaggcttcatttggtggcgtgagctctgatgctgtgaccctggtaagcaactctggacagcaggctcaacgccggcaccccaagaagtgcaggttcaaagggtgctccaagggcgcgcgaggcgcgacgggcctgtgcatcgctcacggcggcgggcagaggtgccagaagcccgggtgccacaagggcgccgagagccgcacggcctactgcaaggcccacggcggggggcgccggtgcctgcagctcggctgcaccaagagcgcggaagggaagacggaccactgcatcgcccatggcggcggccagcggtgcggctaccctgactgccctaaagccgcgcgtggcaagtccgggcggtgcatcaagcacggcggcgggaagaggtgctcggtcgagggctgcatcaggagcgccgagggaagggtcgggctgtgcatctctcacggcggcgggcggcggtgccagttcccggactgccgcaggggagcgcagggcagcaccctgtactgcaagtcgcacggcggcgggaagcgctgcgtcttcgaggggtgcggcaagggcgccgaaggcagcacgccgctgtgcaaggcgcacggcggcgggaagcggtgcgtgtatgagggcggcggcgtgtgccccaagagcgtccacggcggcacagacttctgcgtggctcacggcggcgggaagcggtgcgcggtgcctgggtgcagcaagagcgcgcgcggccgcacggaccgctgcgtgaagcacggcggtggcaagcggtgcagggtggacgggtgcggcaagagcgcgcaagggagcaccgattgctgcaaggctcacggtggcgggaagaggtgcaacttcggcgacggccaatgcgagaagttcgcgcgcggccggagcgggctctgcgcggcgcacgacactctggtggcctcacagcagcgccgcggtggcggcatgatcgggccgggcctcttccacggcatcgttcgctctgccagcgttgcaaacatgaacagcgactactcgtcgtcgggcgtgagcacggtgtccgactgcgacggctcgcctgaggcggcgacgaggaggcaggagctgatccctccccaggtgctggtcccccggtccatgaaatctttgacggcggcaaccgtgcagccaccgaagaggagcagagaaggaagggtagtcaccgtccccgaggggagggtgcacggtggtggcctcctgtcgttgcttggcgggagcttcatgaacgtcgacaagctctgaagcagtcagcgcttggggctcgatttgacgatttctacctctacaacgctttttcttaccttagaaaaaagtgagaaaatgccactttttctattagagctgtcagattattgtctgtgcataaaaatattttctcgtctacagatcgaacttgtatggtgaaatttagggtaattttgtttcccttgtgccatcaagggtgaacacatgaatttgtcatgtcttatgtgttgaatcgttcgtagcatttccgaaagttttttttggatgcgaaagctttactgctgtacttgttgtgaataagattaatgtgtaacaatcaaacttattgctacactgtgctgaattaccataagattgttcccgg

SEQ ID NO: 203527 - DNA, 2549 bp, Zea Mays
cttcctcctctctactctctcttcgcgcgcctgcgattctctccgctgggatgcaagaagaatctttatcctttctccatttccggcaagcggcaggtgttggtaggcagcccaattcgtgttgtagtctgaagaattcgctggcggtggtgcagcttggcttcctctgcttctttttgacgatcaactgtcagggaacgtaacgtaactacatggtcacaattttgatgctggagcaaggcactcatggaccggacagacacatctggatttgttaccggtggatcagacgatgagtaccggttctgcgggtgtcttcctgcaccgtggaaaccaggctctcatggatgattctgcagtgccaattggcttctcaatgacgagctacacgacaggtaaccagtttcagagtcggataacatttggtatagaccaactgggttcagcagtgaacaatagcagcagccatggccgcagaggtttccagaggtggattcatgcgcctgctcaagatgatgggtgcagactagtcctcgggctgggtccgacgccggacccagacgttaactctcctgatcagcagcctgccggtgccggagcagacaagtcgagaccaccacctgtaactttgtttggccagagcttctccttcgctgatccggggacgctgagccttgggattcatcagggccgtagtacgggagcaaataaacacttgggcgccggaaccatcatctctttttccactgtggacgagggctccacgtctgccaggagtagctccggcggctacatgccatcgctgctctttgctcgtcggccaaactgttcgacagctgaagaggaacagggtttgctagatgacacagacacagacaacagtaacgatggtactgaaccttcggcatccatgacggaggcttcatttggtggcgtgagctctgatgctgtgaccctggtaagcaactctggacagcaggctcaacgccggcaccccaagaagtgcaggttcaaagggtgctccaagggcgcgcgaggcgcgacgggcctgtgcatcgctcacggcggcgggcagaggtgccagaagcccgggtgccacaagggcgccgagagccgcacggcctactgcaaggcccacggcggggggcgccggtgcctgcagctcggctgcaccaagagcgcggaagggaagacggaccactgcatcgcccatggcggcggccagcggtgcggctaccctgactgccctaaagccgcgcgtggcaagtccgggcggtgcatcaagcacggcggcgggaagaggtgctcggtcgagggctgcatcaggagcgccgagggaagggtcgggctgtgcatctctcacggcggcgggcggcggtgccagttcccggactgccgcaggggagcgcagggcagcaccctgtactgcaagtcgcacggcggcgggaagcgctgcgtcttcgaggggtgcggcaagggcgccgaaggcagcacgccgctgtgcaaggcgcacggcggcgggaagcggtgcgtgtatgagggcggcggcgtgtgccccaagagcgtccacggcggcacagacttctgcgtggctcacggcggcgggaagcggtgcgcggtgcctgggtgcagcaagagcgcgcgcggccgcacggaccgctgcgtgaagcacggcggtggcaagcggtgcagggtggacgggtgcggcaagagcgcgcaagggagcaccgattgctgcaaggctcacggtggcgggaagaggtgcaacttcggcgacggccaatgcgagaagttcgcgcgcggccggagcgggctctgcgcggcgcacgacactctggtggcctcacagcagcgccgcggtggcggcatgatcgggccgggcctcttccacggcatcgttcgctctgccagcgttgcaaacatgaacagcgactactcgtcgtcgggcgtgagcacggtgtccgactgcgacggctcgcctgaggcggcgacgaggaggcaggagctgatccctccccaggtgctggtcccccggtccatgaaatctttgacggcggcaaccgtgcagccaccgaagaggagcagagaaggaagggtagtcaccgtccccgaggggagggtgcacggtggtggcctcctgtcgttgcttggcgggagcttcatgaacgtcgacaagctctgaagcagtcagcgcttggggctcgatttgacgatttctacctctacaacgctttttcttaccttagaaaaaagtgagaaaatgccactttttctattagagctgtcagattattgtctgtgcataaaaatattttctcgtctacagatcgaacttgtatggtgaaatttagggtaattttgtttcccttgtgccatcaagggtgaacacatgaatttgtcatgtcttatgtgttgaatcgttcgtagcatttccgaaagttttttttggatgcgaaagctttactgctgtacttgttgtgaataagattaatgtgtaacaatcaaacttattgctacactgtgctgaattaccataagattgttcccgg

SEQ ID NO: 203528 - DNA, 335 bp, Zea Mays
ccttccatgaaaatcgtgatctacctgtcggtggaggacttcttgcataagagggaaaaggagaagtttgagaaggaggaggccgaaaagcagaaagaggaggcgaggaagaagagggctaagtccaggcagaagagaagaaattattgatctcaggatgaactaccccccaccaatgtgaccatttcttcttcttttccaccctgtttcttgtaatagcaatgattttgtatgtagtgttgcacctttggtatcacattgtggttttccttcactccattgccggctcttggatgctgtaacactgaactccattgtcggctccattgcccggg

SEQ ID NO: 203529 - DNA, 354 bp, Zea Mays
cggccatggtggtgtccgtgctgctcacacttgcgtgatctacctgtcggtggaggacttcttgcataagagggaaaaggagaagtttgagaaggaggaggccgaaaagcagaaagaggaggcgaggaagaagagggctaagtccaggcagaagagaagaaattattgatctcaggatgaactaccccccaccaatgtgaccatttcttcttcttttccaccctgtttcttgtaatagcaatgattttgtatgtagtgttgcacctttggtatcacattgtggttttccttcactccattgccggctcttggatgctgtaacactgaactccattgtcggctccattgcccggg

SEQ ID NO: 203530 - DNA, 1257 bp, Zea Mays
ctcactcctttcctcctaccgatctagtgctagctgctcactggctgaagggtgttcggttctctctgtggttggtatattgcaagatgaagttgatcctatggtatctgtgatgaaagttgagaaagcgcctttggaatcttatgctgacattggtggactggatgctcagattcaagaaattaaagaggcagttgagcttcccttgactcaccctgagctgtatgaagacattggtattaggcctcccaagggagtcatattatatggagaacctggaacaggaaaaactcttcttgccaaggctgtggctaactcaacatctgcgactttcttgcgtgttgttggtagtgaactcattcaaaagtaccttggggatggtcccaaactagtccgagaattgtttagggtggctgatgaactttctccctcaattgtctttattgatgagattgacgctgttggaacaaagaggtatgatgctcattcaggaggagagcgtgagattcaaagaactatgttggagctgctgaatcagctagatggttttgactcgcgtggagatgttaaagttattctagcaacaaaccgcattgaaagtcttgatcctgctttgcttcggccaggccgtatagaccggaagattgaattccctctcccagatattaaaactagaagacgcatcttccagattcacacatcaaaaatgacattagctgacgatgtgaacttggaagagtttgttatgaccaaagatgagttctcgggcgctgatattaaggccatctgcacggaggctggattgctcgccttaagagaacgtagaatgaaagtgacccatgcagatttcaagaaagcaaaggagaaggtgatgtacaagaagaaggaaggtgttccggatggtctctacatgtagtagacgtctcctgccttgtcagaacaagttatcctcgtctctctcgtcatgggagatttgattgccacggcacttgttgcacacctataagtggtctgagaacgtgtattatgctttgattgtttcaagtaaaatttctcttggagaacgctggaaagtttgtgcatcggctacctaccagcatcctcgtaaacacccattaatcagtttgtgcatcggctgcctcacacgtgttggctgctcaatcccatggatgaaaatatgctggagaaagtggagatgggatttcactgcgaaaggggcagcatcaatcagttataagcagggttcatgaaaccggt

SEQ ID NO: 203531 - DNA, 2962 bp, Zea Mays
ttactcgcgcacgctccatccgtcaaccacaagagccccacgcgctggccttgcctctgcccctcgccctcgcctcgcctccaggatcttgtcctcccccatctcctcgggccaaggaatcgttctcatccggcgacctacctccgttacgtctcaggtcttgttctgtatcacaagcaaagcaaaggatcggaggctactccattcggcagcaagctgactctgaagtctgaacgttggagtagaacaaggtgcttgttcaaaattgttagttgcatggagatgggaatgactcctgaagtaatgtatggacaaaatgttttcgttcctgctactgcaaatccctaccaatatggctatacagaagttggatcaccaatggaatggtatagtcacccgaactcttcaggatatgctagccaagatattttctattcggctgaaggcatgcaatgcgtatactatgcagccccagacaatggatctatgcatcctacctacattccttatccttcagatccttctttcgtacccgatggctcatttatgcctcaggagtatgttgctgaccctgctaactccacatgccaaataggcccgtcatcctattacattccagctgttcttccttatgcacaagatagtgtcccgggaagcgcaaccacacctctttactcctccaatgttgcatttcttcctggcataccagtctactattgtacctttgaagcagttgcaggaccatgcaaaaccgccaaaagttcaactgcacaattcggttccacagaagcaagagttgccagatagatgtatggtacctgctaaactccctcatgcttctcaggtatcagcacatttgtctggaaacaattgccttggatgtgctgctggatctgatcttcataagtgggctgccgccgagaaattccagccatcttcaaagtcaagtggtcatctaaatggtactggccaaaaggtgcatagcttagttgattctgagaaaccaagcaatcagagctttgccatgattgtgaaatctcacacattaaggctccctgtcggtaatccggatgggacaatcattataagaaccgaccagtacaacagagatgatctccgagttgactatatgtatgcaaagttctttgttatcaagtcaattggtgaggcagatgtgcacaaatcgataaagtatggtgtatggtcaagttcctccaatggaaacatcaagctagatagcgcattcagggatgctgacaggatatcaaggaggcattctactaagtgtccagtattcttgttcttctctgtgaatgggagtgggcacttctgtggcatggctgagatggttggtcctgttgattttcacaaggacatggacttctggtgtcaggataaatggaccggctgctttcctgtgagatggcacattgttaaagatataccgaatggttttttgcagcatatcacactgcagaataatgaaaacaagcctgtgacgcacagcagagatacacaggaaataccatacctccctggaatatctgtgatcaagatcttcaaagacatcaaagtgagggactgcctgtttgatgattttatgagatatgaggcagaagaggcgcaaatgaagccgcacagaagatgcaagctgagttacgatgctccagattttgtacctgtctcccagcgcactgagcagacgaagtccagcagtgtgctggtagacagaacatctgagatacaaaatgtgtctgagaagccgcatgatgctaaggtgatcaatcctcaggagccgcgtgcctctgataagcaggcgagtgaggctgagaaagagaatgaactacaggaaagtcattgcagcggcagtcagaaccaagaggatgcagcgaaaactgcaaccaaccatccaccaggtccaagcttgaaggcggcaggtgcggatgggaaacagcagtactggaagaaggtcgaaaatccaaagcagcatgcagacagcggtgctgcccagggctcactgaaagcacctgaaaagcggctaaatggagtcagcggctctgcgagcacagttccagttccagagggtggcgagcagcagagggtcactgccaaacttgggtctctcaagataagctccaaggcagtggaggctgaccgtaagactagcacagctggtatggagaagcagctaaatggagtcagtggctctgggagcgcagttcctgagggtggcgaggagcagaaggtcaaaatcagttccaaggtagtggaggctgaccggaagacgagcaaagctggtgtggtgacaatcggctcgatgccggtccgggttgacagttatgccgtctagtggccagcgggggggagcttttgtttttatcttttttgcccttctggggtaatctttggtgccccggcttttcatcttcctttctggtagaagaatgcttgtcctggttggtggttctttcctagcttctatatggtatcaaaaaaagaaaaaaaaaagagacgacgaatagttagattcttttttcgttgggggtgaaaagctagttttgcaggcaggcagcattctcatggtggtggtttcgtttgtggaaaagagagaagatactataatatgtgttcgttttcatgacattctattaagaaagaaaaagggaggagattagtaacctgggctcgggtgtgaattcttgcttgttctatctccccttgttttctttgtgttgtggcaggatcaggatcttatatgagcgttgctacaaaaggtggcttattttataatattattaaactctgatgtggcgtgcaagagagcattgttcaaagtaggatcggagtacgagtagtgtggtgttttggacattcagtagtgaattcggtcgtcctctctgaaggctgaaggagtgctatacttttcctatattattaattattaattcttgtttttgtaata

SEQ ID NO: 203532 - DNA, 1423 bp, Zea Mays
ggacccacctccccatccacaccctaacactcgctcctcatggcctccaccatccccttcgtgggagccgcatccatggtcgggccagcctccctcatcatcggcccctactcagtatcatacctcctccccactcccgcctctgcctccttcagtcgtgtcatctccggcgagctctacaccccatcccacgccgcactcgccgggctcgatgccttcgagtctggcaggaaataagttattctgcaattcctcaattatacatggttgttcagatctgatagcaatgactaatgaggacaaaaggatgcagctcctggataaacttatgtacatggagtgagaatttgtagcaaccaaagggtgggagagtgcattacaggaacgactactaaaggagtacatgttgggtgactatcaggggcgtattgtggtcaagtaatgaaaataaacgaacttgaggtacaactcaatagaccggttctaggatcagtacagaatcatcaatatcatccgcgaaggaattgataaaagacatggaaggggaatttgcatcgattatctgaaagctcaaaaggggagaagaaaacccttaagacggaactttcatatgtgaaagaagacctatccaaatcttcttccaaaaataaagccgagcaaagaaactaaccaaatcagagcaaagagattgcacaaaggagggagcaccggagcagcgacaacagcagagagatcgccagggccactcgcctgtctagagagaggaaggcaacaagagatggacgagatcatgaacaaggtgggtgtttactggttagggccaccagccaacaaggagatctcctcggcaggcgatgaccttgaatcactctcgaccagcgccgaggatggagcggaatggctggtgaagaagttgaagggcaagatgcagaagccactggtggacctgcttagcacaacctccctgtgggtatgctaggcgaggtcacctcacgtggaggtggacaggatcaagaccaaggtgctcgtctcggctagcgtcaccattgtcaaggccgccgctgccaaggtctacttcactacgaggatcaagtggtcgtgcaacgggatgcctatgatgtcgtcaggggcggcatcaccgtcgacgagtttgctgcacaccaagatggacaaatggttgctttcagttgcaggaataaatctacagtcattagctacctgggagatctgtgtgcactgtacatcatgtgttttgtgcttcgttgtgagaatgtgtaacacacagaaggattcagaatgtgtgcccattgcatatgatatatgtctcgaatacagtacatccgaagcagagctcgagttagctcaaacaatctatcagattttaaactgaagagtggcaagctattgctccatatatatgcgg

SEQ ID NO: 203533 - DNA, 1755 bp, Zea Mays
ggacccacctccccatccacaccctaacactcgctcctcatggcctccaccatccccttcgtgggagccgcatccatggtcgggccagcctccctcatcatcggcccctactcagtatcatacctcctccccactcccgcctctgcctccttcagtcgtgtcatctccggcgagctctacaccccatcccacgccgcactcgccgggctcgatgccttcgagtctggcaggaaataagttattctgcaattcctcaattatacatggttgttcagatctgatagcaatgactaatggtaactgcttgccattgtgataggcatattgatgtttttttgtaagtgtgcattttggaatcatgaaaggtgaaatccgagttcatgatggccccggacaccatagagaaacaagttcaggagtatcatacaaaacttgttgcgttggaggaacaattatctaagcactgtatgtgttggttcaccattatgcacactgtatgaataaggtcgacttcagtaaagtgttaattagctatatgaattacaactgtcatttcaagatatttcaaacactcaaacgtgacccaccctcaaagatatatctacaacaggttctttacatgcaggagaggacaaaaggatgcagctcctggataaacttatgtacatggagtgagaatttgtagcaaccaaagggtgggagagtgcattacaggaacgactactaaaggagtacatgttgggtgactatcaggggcgtattgtggtcaagtaatgaaaataaacgaacttgaggtacaactcaatagaccggttctaggatcagtacagaatcatcaatatcatccgcgaaggaattgataaaagacatggaaggggaatttgcatcgattatctgaaagctcaaaaggggagaagaaaacccttaagacggaactttcatatgtgaaagaagacctatccaaatcttcttccaaaaataaagccgagcaaagaaactaaccaaatcagagcaaagagattgcacaaaggagggagcaccggagcagcgacaacagcagagagatcgccagggccactcgcctgtctagagagaggaaggcaacaagagatggacgagatcatgaacaaggtgggtgtttactggttagggccaccagccaacaaggagatctcctcggcaggcgatgaccttgaatcactctcgaccagcgccgaggatggagcggaatggctggtgaagaagttgaagggcaagatgcagaagccactggtggacctgcttagcacaacctccctgtgggtatgctaggcgaggtcacctcacgtggaggtggacaggatcaagaccaaggtgctcgtctcggctagcgtcaccattgtcaaggccgccgctgccaaggtctacttcactacgaggatcaagtggtcgtgcaacgggatgcctatgatgtcgtcaggggcggcatcaccgtcgacgagtttgctgcacaccaagatggacaaatggttgctttcagttgcaggaataaatctacagtcattagctacctgggagatctgtgtgcactgtacatcatgtgttttgtgcttcgttgtgagaatgtgtaacacacagaaggattcagaatgtgtgcccattgcatatgatatatgtctcgaatacagtacatccgaagcagagctcgagttagctcaaacaatctatcagattttaaactgaagagtggcaagctattgctccatatatatgcgg

SEQ ID NO: 203534 - DNA, 1289 bp, Zea Mays
ggacccacctccccatccacaccctaacactcgctcctcatggcctccaccatccccttcgtgggagccgcatccatggtcgggccagcctccctcatcatcggcccctactcagtatcatacctcctccccactcccgcctctgcctccttcagtcgtgtcatctccggcgagctctacaccccatcccacgccgcactcgccgggctcgatgccttcgagtctggcaggaaataagttattctgcaattcctcaattatacatggttgttcagatctgatagcaatgactaatgaggacaaaaggatgcagctcctggataaacttatgtacatggagtgagaatttgtagcaaccaaagggtgggagagtgcattacaggaacgactactaaaggagtacatgttgggtgactatcaggggcgtattgtggtcaagtaatgaaaataaacgaacttgaggtacaactcaatagaccggttctaggatcagtacagaatcatcaatatcatccgcgaaggaattgataaaagacatggaaggggaatttgcatcgattatctgaaagctcaaaaggggagaagaaaacccttaagacggaactttcatatgtgaaagaagacctatccaaatcttcttccaaaaataaagccgagtcactctcgaccagcgccgaggatggagcggaatggctggtgaagaagttgaagggcaagatgcagaagccactggtggacctgcttagcacaacctccctgtgggtatgttcccatgcgagacgaccaactacgaattcccgctgtctctaagctatggtttgacgtcacggtgtcaggtatgctaggcgaggtcacctcacgtggaggtggacaggatcaagaccaaggtgctcgtctcggctagcgtcaccattgtcaaggccgccgctgccaaggtctacttcactacgaggatcaagtggtcgtgcaacgggatgcctatgatgtcgtcaggggcggcatcaccgtcgacgagtttgctgcacaccaagatggacaaatggttgctttcagttgcaggaataaatctacagtcattagctacctgggagatctgtgtgcactgtacatcatgtgttttgtgcttcgttgtgagaatgtgtaacacacagaaggattcagaatgtgtgcccattgcatatgatatatgtctcgaatacagtacatccgaagcagagctcgagttagctcaaacaatctatcagattttaaactgaagagtggcaagctattgctccatatatatgcgg

SEQ ID NO: 203535 - DNA, 2412 bp, Zea Mays
aaaagctctgcatattggacaaaaatcttctcatcgcgctcctcaagcgctttcctggcgtcttcgaggttgtcgaggagggcgtctactccccgctgtcgtcgctccccgccttgctctgccgcggccgtgcctcgccgccacaggtccaccgctcgagatcccggtcgacgctccggcctgatctccatttttggccttcggttggagatcggcacttctcggtgatgtccctttggctgcacggccacccaatcgggtgtttgggtcttcgatttgggtctgtagcgttggagatacccccttcaaactgctgccggtccggaagccgtgcctcctagccgcccacgctcgccgtccgtgatccgttctcgactgttggtgctccggactcacagtccatattgatggctacattatcatggtggatggaatggtcggtggagaatgttcgtgaggcatttttctcctatttcggggaaaatcagcacgtgagggtttctctgaatttggaagttaccacttagcaggtttccataccaaggctcaatacaatcaagtccgtagcgtctaccgatttcgccatatccccattttacttttctttgaaaccaggattccttgtataatttgttgatgatccgaaggtgccccttcttcatacatgtttgcaccggttcaaggggacccttggtggcagagagaggcatcgcacctgcttttcgctgaggtgcattattgcaagtggtgacgaagatttgattgaccgcttcagaattgacgctactttccatcgattcacggagatccttgggagttggtctcatgggtactatttcaaggaggaagctatcggcttgttattcagtcttctcaccgagaaatacaagttacctcagtctagaatatatgcctcatactttagtggtgatatgtcctcttgtttgagttcggacgacgagtcaagaaataccttgcagaaatatataggagcagaaagaatcttgccttccatgtccaaggttgatttttggatgcccggtgaaactggtccttgtgggccatgtattggttttttccttgattgttcggacaacaatgatggtgttgattccgtaaggaacataacggatggcaagcttgtcgagatatgccgtcttgtgtttgttgagttcgatcggcaagcagatggcgtcttggagcctttccaagctaagcatgtcttaacagggattaatcttgaatgtttagctgccattcttcaaaagaaagaaagccactatgacttagatgtatacgcttatgtaattcgtcaagtctactggggttaggaaatgaaggtcgcgagtatttcctgaagtgtgctgataaacaggctgtgaagtatggctatcaagtacttaagataaatgaagaggattacgacattgttgttgatgcaattcttctaaatgaacctgatttatgtaccgagcttgaaagagaaataatcgacagaatagtcaaagatgaagtgatgatctacaaaaagactaaagcagaggcaacgttctcctgcttggagagaaaataaccctcgatttagatatcaagaaagtgttggagagccatctcatccatcttttccagaggcctcttttgtgtggcaatacacaaatgcagttggaacagaacttggaactatcagagttcaataaacaagttcttggtgtattgccgaagcttacatgcagcttatactttgatgtgacattttctagctcttgtggcttagagaagacctttgaaactgcactgtttggttttcttggtgtccctctacgccatggctggttggtagatccccaggatgctgagttggactcctcaatacgtggaagctcctactccaaactttcgtataatcttgctatctatgaatcaattcgacccaagacaaattcagggcctcaaaagcatggtcgatatgaagatgatatgttctattcagcgcttgcattctctaaaactggatcagaaaaagaacttgattctacttcttgtgcaacaatttcaacatttttgcagggccctcagctaacccgatatggattctcttccttacataatgacctcagagcgttacaacctactgtcctgatctggaatgaaaacttaattacaatatctaagtttgaagacaaaatatatgtgttgctgaacgatttgtccttgttgagaactgaaaccgatgctgtgtgggaaaggttaacacaggcaaatagtaaacagggggaaactaatacactggttctacatatccgacgctgtcgggtatgtttgtcggacaacagtttcttgcgcatggtctcgttggacatgcccgacactgacctagccgacgccatcggtctttctggcgggtaacagttt

SEQ ID NO: 203536 - DNA, 2598 bp, Zea Mays
aaaagctctgcatattggacaaaaatcttctcatcgcgctcctcaagcgctttcctggcgtcttcgaggttgtcgaggagggcgtctactccccgctgtcgtcgctccccgccttgctctgccgcggccgtgcctcgccgccacaggtccaccgctcgagatcccggtcgacgctccggcctgatctccatttttggccttcggttggagatcggcacttctcggtgatgtccctttggctgcacggccacccaatcgggtgtttgggtcttcgatttgggtctgtagcgttggagatacccccttcaaactgctgccggtccggaagccgtgcctcctagccgcccacgctcgccgtccgtgatccgttctcgactgttggtgctccggactcacagtccatattgatggctacattatcatggtggatggaatggtcggtggagaatgttcgtgaggcatttttctcctatttcggggaaaatcagcacgtgagggtttctctgaatttggaagttaccacttagcaggtttccataccaaggctcaatacaatcaagtccgtagcgtctaccgatttcgccatatccccattttacttttctttgaaaccaggattccttgtataatttgttgatgatccgaaggtgccccttcttcatacatgtttgcaccggttcaaggggacccttggtggcagagagaggcatcgcacctgcttttcgctgaggtgcattattgcaagtggtgacgaagatttgattgaccgcttcagaattgacgctactttccatcgattcacggagatccttgggagttggtctcatgggtactatttcaaggaggaagctatcggcttgttattcagtcttctcaccgagaaatacaagttacctcagtctagaatatatgcctcatactttagtggtgatatgtcctcttgtttgagttcggacgacgagtcaagaaataccttgcagaaatatataggagcagaaagaatcttgccttccatgtccaaggttgatttttggatgcccggtgaaactggtccttgtgggccatgtattggttttttccttgattgttcggacaacaatgatggtgttgattccgtaaggaacataacggatggcaagcttgtcgagatatgccgtcttgtgtttgttgagttcgatcggcaagcagatggcgtcttggagcctttccaagctaagcatgtcttaacagggattaatcttgaatgtttagctgccattcttcaaaagaaagaaagccactatgacttagatgtatacgcttatgtaattcgtcaagtctactggggttaggaaatgaaggtcgcgagtatttcctgaagtgtgctgataaacaggctgtgaagtatggctatcaagtacttaagataaatgaagaggattacgacatgatgtcttcttcaatgcaccggtgcaaataacagagcatccatgttgttgatgcaattcttctaaatgaacctgatttatgtaccgagcttgaaagagaaataatcgacagaatagtcaaagatgaagtgatgatctacaaaaagactaaagcagagagggagtatacaggaaaacataatcataattatggctcaaggactgagttaccacagcagaagagacattaagtgcaaaaatcagttgcggaatcaggaacagccgtttgatatggggaaaaagaagaaaaggaacaaaaatgtccctgctgttgtgtggtatccgacaagggttatcgaatttcttggtcggcgcacacccattatcctcaaggaaaaggatacacggtgctccctagtagcaatatgcaacgttctcctgcttggagagaaaataaccctcgatttagatatcaagaaagtgttggagagccatctcatccatcttttccagaggcctcttttgtgtggcaatacacaaatgcagttggaacagaacttggaactatcagagttcaataaacaagttcttggtgtattgccgaagcttacatgcagcttatactttgatgtgacattttctagctcttgtggcttagagaagacctttgaaactgcactgtttggttttcttggtgtccctctacgccatggctggttggtagatccccaggatgctgagttggactcctcaatacgtggaagctcctactccaaactttcgtataatcttgctatctatgaatcaattcgacccaagacaaattcagggcctcaaaagcatggtcgatatgaagatgatatgttctattcagcgcttgcattctctaaaactggatcagaaaaagaacttgattctacttcttgtgcaacaatttcaacatttttgcagggccctcagctaacccgatatggagcgttacaacctactgtcctgatctggaatgaaaacttaattacaatatctaagtttgaagacaaaatatatgtgttgctgaacgatttgtccttgttgagaactgaaaccgatgctgtgtgggaaaggttaacacagtttcttgcgcatggtctcgttggacatgcccgacactgacctagccgacgccatcggtctttctggcgggtaacagttt

SEQ ID NO: 203537 - DNA, 2583 bp, Zea Mays
aaaagctctgcatattggacaaaaatcttctcatcgcgctcctcaagcgctttcctggcgtcttcgaggttgtcgaggagggcgtctactccccgctgtcgtcgctccccgccttgctctgccgcggccgtgcctcgccgccacaggtccaccgctcgagatcccggtcgacgctccggcctgatctccatttttggccttcggttggagatcggcacttctcggtgatgtccctttggctgcacggccacccaatcgggtgtttgggtcttcgatttgggtctgtagcgttggagatacccccttcaaactgctgccggtccggaagccgtgcctcctagccgcccacgctcgccgtccgtgatccgttctcgactgttggtgctccggactcacagtccatattgatggctacattatcatggtggatggaatggtcggtggagaatgttcgtgaggcatttttctcctatttcggggaaaatcagcacgtgagggtttctctgaatttggaagttaccacttagcaggtttccataccaaggctcaatacaatcaagtccgtagcgtctaccgatttcgccatatccccattttacttttctttgaaaccaggattccttgtataatttgttgatgatccgaaggtgccccttcttcatacatgtttgcaccggttcaaggggacccttggtggcagagagaggcatcgcacctgcttttcgctgaggtgcattattgcaagtggtgacgaagatttgattgaccgcttcagaattgacgctactttccatcgattcacggagatccttgggagttggtctcatgggtactatttcaaggaggaagctatcggcttgttattcagtcttctcaccgagaaatacaagttacctcagtctagaatatatgcctcatactttagtggtgatatgtcctcttgtttgagttcggacgacgagtcaagaaataccttgcagaaatatataggagcagaaagaatcttgccttccatgtccaaggttgatttttggatgcccggtgaaactggtccttgtgggccatgtattggttttttccttgattgttcggacaacaatgatggtgttgattccgtaaggaacataacggatggcaagcttgtcgagatatgccgtcttgtgtttgttgagttcgatcggcaagcagatggcgtcttggagcctttccaagctaagcatgtcttaacagggattaatcttgaatgtttagctgccattcttcaaaagaaagaaagccactatgacttagatgtatacgcttatgtaattcgtcaagtctactggggttaggaaatgaaggtcgcgagtatttcctgaagtgtgctgataaacaggctgtgaagtatggctatcaagtacttaagataaatgaagaggattacgacattgttgttgatgcaattcttctaaatgaacctgatttatgtaccgagcttgaaagagaaataatcgacagaatagtcaaagatgaagtgatgatctacaaaaagactaaagcagagagggagtatacaggaaaacataatcataattatggctcaaggactgagttaccacagcagaagagacattaagtgcaaaaatcagttgcggaatcaggaacagccgtttgatatggggaaaaagaagaaaaggaacaaaaatgtccctgctgttgtgtggtatccgacaagggttatcgaatttcttggtcggcgcacacccattatcctcaaggaaaaggatacacggtgctccctagtagcaatatgcaacgttctcctgcttggagagaaaataaccctcgatttagatatcaagaaagtgttggagagccatctcatccatcttttccagaggcctcttttgtgtggcaatacacaaatgcagttggaacagaacttggaactatcagagttcaataaacaagttcttggtgtattgccgaagcttacatgcagcttatactttgatgtgacattttctagctcttgtggcttagagaagacctttgaaactgcactgtttggttttcttggtgtccctctacgccatggctggttggtagatccccaggatgctgagttggactcctcaatacgtggaagctcctactccaaactttcgtataatcttgctatctatgaatcaattcgacccaagacaaattcagggcctcaaaagcatggtcgatatgaagatgatatgttctattcagcgcttgcattctctaaaactggatcagaaaaagaacttgattctacttcttgtgcaacaatttcaacatttttgcagggccctcagctaacccgatatggattctcttccttacataatgacctcagagcgttacaacctactgtcctgatctggaatgaaaacttaattacaatatctaagtttgaagacaaaatatatgtgttgctgaacgatttgtccttgttgagaactgaaaccgatgctgtgtgggaaaggttaacacagtttcttgcgcatggtctcgttggacatgcccgacactgacctagccgacgccatcggtctttctggcgggtaacagttt

SEQ ID NO: 203538 - DNA, 2695 bp, Zea Mays
aaaagctctgcatattggacaaaaatcttctcatcgcgctcctcaagcgctttcctggcgtcttcgaggttgtcgaggagggcgtctactccccgctgtcgtcgctccccgccttgctctgccgcggccgtgcctcgccgccacaggtccaccgctcgagatcccggtcgacgctccggcctgatctccatttttggccttcggttggagatcggcacttctcggtgatgtccctttggctgcacggccacccaatcgggtgtttgggtcttcgatttgggtctgtagcgttggagatacccccttcaaactgctgccggtccggaagccgtgcctcctagccgcccacgctcgccgtccgtgatccgttctcgactgttggtgctccggactcacagtccatattgatggctacattatcatggtggatggaatggtcggtggagaatgttcgtgaggcatttttctcctatttcggggaaaatcagcacgtgagggtttctctgaatttggaagttaccacttagcaggtttccataccaaggctcaatacaatcaagtccgtagcgtctaccgatttcgccatatccccattttacttttctttgaaaccaggattccttgtataatttgttgatgatccgaaggtgccccttcttcatacatgtttgcaccggttcaaggggacccttggtggcagagagaggcatcgcacctgcttttcgctgaggtgcattattgcaagtggtgacgaagatttgattgaccgcttcagaattgacgctactttccatcgattcacggagatccttgggagttggtctcatgggtactatttcaaggaggaagctatcggcttgttattcagtcttctcaccgagaaatacaagttacctcagtctagaatatatgcctcatactttagtggtgatatgtcctcttgtttgagttcggacgacgagtcaagaaataccttgcagaaatatataggagcagaaagaatcttgccttccatgtccaaggttgatttttggatgcccggtgaaactggtccttgtgggccatgtattggttttttccttgattgttcggacaacaatgatggtgttgattccgtaaggaacataacggatggcaagcttgtcgagatatgccgtcttgtgtttgttgagttcgatcggcaagcagatggcgtcttggagcctttccaagctaagcatgtcttaacagggattaatcttgaatgtttagctgccattcttcaaaagaaagaaagccactatgacttagatgtatacgcttatgtaattcgtcaagtctactggggttaggaaatgaaggtcgcgagtatttcctgaagtgtgctgataaacaggctgtgaagtatggctatcaagtacttaagataaatgaagaggattacgacatgatgtcttcttcaatgcaccggtgcaaataacagagcatccatgttgttgatgcaattcttctaaatgaacctgatttatgtaccgagcttgaaagagaaataatcgacagaatagtcaaagatgaagtgatgatctacaaaaagactaaagcagagctgcagcaattgaagtaaaatactacagaaggttgcagcagtagctccagcaaacatgcctcattgggtgaagcacagttgcggaatcaggaacagccgtttgatatggggaaaaagaagaaaaggaacaaaaatgtccctgctgttgtgtggtatccgacaagggttatcgaatttcttggtcggcgcacacccattatcctcaaggaaaaggatacacggtgctccctagtagcaatatgcaacgttctcctgcttggagagaaaataaccctcgatttagatatcaagaaagtgttggagagccatctcatccatcttttccagaggcctcttttgtgtggcaatacacaaatgcagttggaacagaacttggaactatcagagttcaataaacaagttcttggtgtattgccgaagcttacatgcagcttatactttgatgtgacattttctagctcttgtggcttagagaagacctttgaaactgcactgtttggttttcttggtgtccctctacgccatggctggttggtagatccccaggatgctgagttggactcctcaatacgtggaagctcctactccaaactttcgtataatcttgctatctatgaatcaattcgacccaagacaaattcagggcctcaaaagcatggtcgatatgaagatgatatgttctattcagcgcttgcattctctaaaactggatcagaaaaagaacttgattctacttcttgtgcaacaatttcaacatttttgcagggccctcagctaacccgatatggattctcttccttacataatgacctcagagcgttacaacctactgtcctgatctggaatgaaaacttaattacaatatctaagtttgaagacaaaatatatgtgttgctgaacgatttgtccttgttgagaactgaaaccgatgctgtgtgggaaaggttaacacaggcaaatagtaaacagggggaaactaatacactggttctacatatccgacgctgtcgggtatgtttgtcggacaacagtttcttgcgcatggtctcgttggacatgcccgacactgacctagccgacgccatcggtctttctggcgggtaacagttt

SEQ ID NO: 203539 - DNA, 2926 bp, Zea Mays
ctgggtcctcgagacgggcgatgagagctcttaaagcagttgaaaacatttccgatacagctggcaagctttacttccgataacatttgtgcttatcaggatgagcaccgccaaggtcatgataacatacaagaggaagcgtgctgccacacatgcccatacagaagacgacacagttcttgactcatctcctgctgcctcaagcaatgtggctgtcagcagtctacaacttaagcctgagggccctgctgagactgccgtgataaatgaatataatcatattactcctaaaatgcagcagtctttctccacgtttcaacaaaacatcaaagaagaacgtgaaccagagaaaggacatgatcagctatatgaatcatcaccgtggaaagaacaacctgagatttgttctgccactattgcctcaaccgcagaggcgcatagcaataaatcacaatgcattgatggcacaaatagtcaaacccctgtttcaagttctctgtgtggcaacatgcttgctgataggatgattaaccagacaaaagattcaaatatctctgcccctgtggaaataaattctcctacggggatggaaaatgctgtcgcccctggccaatgtaagagcaggtttagtcctctgctcacctttcgcaggcgagttaagaagaaaacaaatttggatgaaccagcagaagaaatttgttcacttgacaacgacaaacagtgttcaacactgacatgcagcccaccacgctcatcacaggatgctacatcattactaaaacatactgctccaaaccctttggatattgaggataaggtaggtagattgaaaaatactggaccttctacagaagctgaacactcacctgaacaagaaagttcccacgtcgtaaaatcctcagttcaacatgtggttccacagattgctctagatgtaaaccaaaacataattctggaagatgatgttacaccaatgtcgaaccaaaagatgtccttggaagatgatgttacaccaatgtcgaagttcactggtgtgcaagaggtcagtgggcaagatacgccagtggaggacttcaacagaacatcaccaaatactattgaagtgccaaaagttattgatttgcaggggaagggacattgtactggggaaactacttctctgcagtctccaagacaaaaagttgatgccagttggttgaaacggaccaataaatctgtggcagaagatgttccagaatctcaaggttcaacaaaaaatattccaataattctcttggatgatgataatgatgataggggcaaggagctcgaaaattcagaggccctcgatcaagggctccatagtcaaaacaaaagaacttttgggaagattgacctgaactgtactgaattaagacaacagggacttctctgtttagatgactcaacaattcaaaggctgccagatctggatctagctgtcaatgctcgaaagcaaatgtctcgaccgattgaaaggctgtttttcacagaggagaaagataccatccgtggcaaacaagagcatcatgaagaaagctcaaccatgcacgccccatactcaaatttctttgatctgggtccaccgtggaacaccgggagtttgaagggaccaaaaggcttgccttcagaagtaaagtttggaataatggacagggctcctgagttcagtctagacctcaggctggatagtttcacagacaacaacagtgtggctgccctgaggagcgacaagttgtttctcggaagcacctccagcacatctcgtaagttaacagaaaagcttggcatgtactcctacaagaggcagtcggctccgtggtcagaagaagagctggactttctttggatcggggttaggaggtacggcgtgaataactggaatgcaatgctgagggacagtcggctgcggttttcaatctcaaggatgcccgaggaccttgctaagcaatgggacaaggagcagaagaaacttgtgggtcctgcgcaagctgttggttatcttggtagagcttcgtgctctggatgctcaaagtctgcatctgtcggggcccaagcccaaacggacctttcattgggcgaatattaccttggtagagcttcgtgctctggatgctccaagtcttcatttctcggggcccagacggacctttcattgggcgacgtctaccttcgcagtggccgtgctccagagagaggccaccagcatcatttaccaacaagcctgggcgtgggcggcttccctggggcttcttcatcgtatggaagaagtggcggcaggcgcagaagggcgtccaagtcgtactactacgagaacaagtcggcttggttccaggagccaccatcggacagggtgccccagcaacccggcggccgaatgggccctgagatgtggccgagcatcatggtggtgccaccgccaacggcagatccaccgagggacgacgacgtgaagccccatgtcctcctccctgatgctaccctgaagcgcgcgataaggaggagtgcggactgggggtcgttcagcaggaggctgttcctgtccggcgatctcaacgggggggctgcaggcgccccagtaccaagcgacaccggcgcgtcatccgaagagacagtgtctgacagctgagcttcagtttatttgacatgtcccattcccattcccattcttattggatgttgatgaagctgctggcatgttctctgtaatgtcatggttgcctagtactcactagtattgcatcttgtataaagtctctctctctctctctctctctctctgtcctctataacaggctacgagtccactcatgcatggtggttagatcgaacaaatactccgtaacaacatagcataccctaaaccccccaagattatatatagtttagcacagctaattccacttct

SEQ ID NO: 203540 - DNA, 2741 bp, Zea Mays
ctgggtcctcgagacgggcgatgagagctcttaaagcagttgaaaacatttccgatacagctggcaagctttacttccgataacatttgtgcttatcaggatgagcaccgccaaggtcatgataacatacaagaggaagcgtgctgccacacatgcccatacagaagacgacacagttcttgactcatctcctgctgcctcaagcaatgtggctgtcagcagtctacaacttaagcctgagggccctgctgagactgccgtgataaatgaatataatcatattactcctaaaatgcagcagtctttctccacgtttcaacaaaacatcaaagaagaacgtgaaccagagaaaggacatgatcagctatatgaatcatcaccgtggaaagaacaacctgagatttgttctgccactattgcctcaaccgcagaggcgcatagcaataaatcacaatgcattgatggcacaaatagtcaaacccctgtttcaagttctctgtgtggcaacatgcttgctgataggatgattaaccagacaaaagattcaaatatctctgcccctgtggaaataaattctcctacggggatggaaaatgctgtcgcccctggccaatgtaagagcaggtttagtcctctgctcacctttcgcaggcgagttaagaagaaaacaaatttggatgaaccagcagaagaaatttgttcacttgacaacgacaaacagtgttcaacactgacatgcagcccaccacgctcatcacaggatgctacatcattactaaaacatactgctccaaaccctttggatattgaggataaggtaggtagattgaaaaatactggaccttctacagaagctgaacactcacctgaacaagaaagattgctctagatgtaaaccaaaacataattctggaagatgatgttacaccaatgtcgaaccaaaagatgtccttggaagatgatgttacaccaatgtcgaagttcactggtgtgcaagaggggaagggacattgtactggggaaactacttctctgcagtctccaagacaaaaagttgatgccagttggttgaaacggaccaataaatctgtggcagaagatgttccagaatctcaaggttcaacaaaaaatattccaataattctcttggatgatgataatgatgataggggcaaggagctcgaaaattcagaggccctcgatcaagggctccatagtcaaaacaaaagaacttttgggaagattgacctgaactgtactgaattaagacaacagggacttctctgtttagatgactcaacaattcaaaggctgccagatctggatctagctgtcaatgctcgaaagcaaatgtctcgaccgattgaaaggctgtttttcacagaggagaaagataccatccgtggcaaacaagagcatcatgaagaaagctcaaccatgcacgccccatactcaaatttctttgatctgggtccaccgtggaacaccgggagtttgaagggaccaaaaggcttgccttcagaagtaaagtttggaataatggacagggctcctgagttcagtctagacctcaggctggatagtttcacagacaacaacagtgtggctgccctgaggagcgacaagttgtttctcggaagcacctccagcacatctcgtaagttaacagaaaagcttggcatgtactcctacaagaggcagtcggctccgtggtcagaagaagagctggactttctttggatcggggttaggaggtacggcgtgaataactggaatgcaatgctgagggacagtcggctgcggttttcaatctcaaggatgcccgaggaccttgctaagcaatgggacaaggagcagaagaaacttgtgggtcctgcgcaagggcccaagcccaaacggacctttcattgggcgaatattaccttggtagagcttcgtgctctggatgctccaagtcttcatttctcggggcccagacggacctttcattgggcgacgtctaccttcgcagtggccgtgctccagagagaggccaccagcatcatttaccaacaagcctgggcgtgggcggcttccctggggcttcttcatcgtatggaagaagtggcggcaggcgcagaagggcgtccaagtcgtactactacgagaacaagtcggcttggttccaggagccaccatcggacagggtgccccagcaacccggcggccgaatgggccctgagatgtggccgagcatcatggtggtgccaccgccaacggcagatccaccgagggacgacgacgtgaagccccatgtcctcctccctgatgctaccctgaagcgcgcgataaggaggagtgcggactgggggtcgttcagcaggaggctgttcctgtccggcgatctcaacgggggggctgcaggcgccccagtaccaagcgacaccggcgcgtcatccgaagagacagtgtctgacagctgagcttcagtttatttgacatgtcccattcccattcccattcttattggatgttgatgaagctgctggcatgttctctgtaatgtcatggttgcctagtactcactagtattgcatcttgtataaagtctctctctctctctctctctctctctgtcctctataacaggctacgagtccactcatgcatggtggttagatcgaacaaatactccgtaacaacatagcataccctaaaccccccaagattatatatagtttagcacagctaattccacttct

SEQ ID NO: 203541 - DNA, 2575 bp, Zea Mays
aatcttgactctgttactcatatcaattttattactcctaaaatgcagcagtctttctccacgtttcaacaaaacatcaaagaagaacgtgaaccagagaaaggacatgatcagctatatgaatcatcaccgtggaaagaacaacctgagatttgttctgccactattgcctcaaccgcagaggcgcatagcaataaatcacaatgcattgatggcacaaatagtcaaacccctgtttcaagttctctgtgtggcaacatgcttgctgataggatgattaaccagacaaaagattcaaatatctctgcccctgtggaaataaattctcctacggggatggaaaatgctgtcgcccctggccaatgtaagagcaggtttagtcctctgctcacctttcgcaggcgagttaagaagaaaacaaatttggatgaaccagcagaagaaatttgttcacttgacaacgacaaacagtgttcaacactgacatgcagcccaccacgctcatcacaggatgctacatcattactaaaacatactgctccaaaccctttggatattgaggataaggtaggtagattgaaaaatactggaccttctacagaagctgaacactcacctgaacaagaaagattgctctagatgtaaaccaaaacataattctggaagatgatgttacaccaatgtcgaaccaaaagatgtccttggaagatgatgttacaccaatgtcgaagttcactggtgtgcaagaggtcagtgggcaagatacgccagtggaggacttcaacagaacatcaccaaatactattgaagtgccaaaagttattgatttgcaggggaagggacattgtactggggaaactacttctctgcagtctccaagacaaaaagttgatgccagttggttgaaacggaccaataaatctgtggcagaagatgttccagaatctcaaggttcaacaaaaaatattccaataattctcttggatgatgataatgatgataggggcaaggagctcgaaaattcagaggccctcgatcaagggctccatagtcaaaacaaaagaacttttgggaagattgacctgaactgtactgaattaagacaacagggacttctctgtttagatgactcaacaattcaaaggctgccagatctggatctagctgtcaatgctcgaaagcaaatgtctcgaccgattgaaaggctgtttttcacagaggagaaagataccatccgtggcaaacaagagcatcatgaagaaagctcaaccatgcacgccccatactcaaatttctttgatctgggtccaccgtggaacaccgggagtttgaagggaccaaaaggcttgccttcagaagtaaagtttggaataatggacagggctcctgagttcagtctagacctcaggctggatagtttcacagacaacaacagtgtggctgccctgaggagcgacaagttgtttctcggaagcacctccagcacatctcgtaagttaacagaaaagcttggcatgtactcctacaagaggcagtcggctccgtggtcagaagaagagctggactttctttggatcggggttaggaggtacggcgtgaataactggaatgcaatgctgagggacagtcggctgcggttttcaatctcaaggatgcccgaggaccttgctaagcaatgggacaaggagcagaagaaacttgtgggtcctgcgcaagggcccaagcccaaacggacctttcattgggcgaatattaccttggtagagcttcgtgctctggatgctccaagtcttcatttctcggggcccagacggacctttcattgggcgacgtctaccttcgcagtggccgtgctccagagagaggccaccagcatcatttaccaacaagcctgggcgtgggcggcttccctggggcttcttcatcgtatggaagaagtggcggcaggcgcagaagggcgtccaagtcgtactactacgagaacaagtcggcttggttccaggagccaccatcggacagggtgccccagcaacccggcggccgaatgggccctgagatgtggccgagcatcatggtggtgccaccgccaacggcagatccaccgagggacgacgacgtgaagccccatgtcctcctccctgatgctaccctgaagcgcgcgataaggaggagtgcggactgggggtcgttcagcaggaggctgttcctgtccggcgatctcaacgggggggctgcaggcgccccagtaccaagcgacaccggcgcgtcatccgaagagacagtgtctgacagctgagcttcagtttatttgacatgtcccattcccattcccattcttattggatgttgatgaagctgctggcatgttctctgtaatgtcatggttgcctagtactcactagtattgcatcttgtataaagtctctctctctctctctctctctctctgtcctctataacaggctacgagtccactcatgcatggtggttagatcgaacaaatactccgtaacaacatagcataccctaaaccccccaagattatatatagtttagcacagctaattccacttct

SEQ ID NO: 203542 - DNA, 2615 bp, Zea Mays
cttgactctgttactcatatcaattttattactcctaaaatgcagcagtctttctccacgtttcaacaaaacatcaaagaagaacgtgaaccagagaaaggacatgatcagctatatgaatcatcaccgtggaaagaacaacctgagatttgttctgccactattgcctcaaccgcagaggcgcatagcaataaatcacaatgcattgatggcacaaatagtcaaacccctgtttcaagttctctgtgtggcaacatgcttgctgataggatgattaaccagacaaaagattcaaatatctctgcccctgtggaaataaattctcctacggggatggaaaatgctgtcgcccctggccaatgtaagagcaggtttagtcctctgctcacctttcgcaggcgagttaagaagaaaacaaatttggatgaaccagcagaagaaatttgttcacttgacaacgacaaacagtgttcaacactgacatgcagcccaccacgctcatcacaggatgctacatcattactaaaacatactgctccaaaccctttggatattgaggataaggtaggtagattgaaaaatactggaccttctacagaagctgaacactcacctgaacaagaaagttcccacgtcgtaaaatcctcagttcaacatgtggttccacagattgctctagatgtaaaccaaaacataattctggaagatgatgttacaccaatgtcgaaccaaaagatgtccttggaagatgatgttacaccaatgtcgaagttcactggtgtgcaagaggtcagtgggcaagatacgccagtggaggacttcaacagaacatcaccaaatactattgaagtgccaaaagttattgatttgcaggggaagggacattgtactggggaaactacttctctgcagtctccaagacaaaaagttgatgccagttggttgaaacggaccaataaatctgtggcagaagatgttccagaatctcaaggttcaacaaaaaatattccaataattctcttggatgatgataatgatgataggggcaaggagctcgaaaattcagaggccctcgatcaagggctccatagtcaaaacaaaagaacttttgggaagattgacctgaactgtactgaattaagacaacagggacttctctgtttagatgactcaacaattcaaaggctgccagatctggatctagctgtcaatgctcgaaagcaaatgtctcgaccgattgaaaggctgtttttcacagaggagaaagataccatccgtggcaaacaagagcatcatgaagaaagctcaaccatgcacgccccatactcaaatttctttgatctgggtccaccgtggaacaccgggagtttgaagggaccaaaaggcttgccttcagaagtaaagtttggaataatggacagggctcctgagttcagtctagacctcaggctggatagtttcacagacaacaacagtgtggctgccctgaggagcgacaagttgtttctcggaagcacctccagcacatctcgtaagttaacagaaaagcttggcatgtactcctacaagaggcagtcggctccgtggtcagaagaagagctggactttctttggatcggggttaggaggtacggcgtgaataactggaatgcaatgctgagggacagtcggctgcggttttcaatctcaaggatgcccgaggaccttgctaagcaatgggacaaggagcagaagaaacttgtgggtcctgcgcaagggcccaagcccaaacggacctttcattgggcgaatattaccttggtagagcttcgtgctctggatgctccaagtcttcatttctcggggcccagacggacctttcattgggcgacgtctaccttcgcagtggccgtgctccagagagaggccaccagcatcatttaccaacaagcctgggcgtgggcggcttccctggggcttcttcatcgtatggaagaagtggcggcaggcgcagaagggcgtccaagtcgtactactacgagaacaagtcggcttggttccaggagccaccatcggacagggtgccccagcaacccggcggccgaatgggccctgagatgtggccgagcatcatggtggtgccaccgccaacggcagatccaccgagggacgacgacgtgaagccccatgtcctcctccctgatgctaccctgaagcgcgcgataaggaggagtgcggactgggggtcgttcagcaggaggctgttcctgtccggcgatctcaacgggggggctgcaggcgccccagtaccaagcgacaccggcgcgtcatccgaagagacagtgtctgacagctgagcttcagtttatttgacatgtcccattcccattcccattcttattggatgttgatgaagctgctggcatgttctctgtaatgtcatggttgcctagtactcactagtattgcatcttgtataaagtctctctctctctctctctctctctctgtcctctataacaggctacgagtccactcatgcatggtggttagatcgaacaaatactccgtaacaacatagcataccctaaaccccccaagattatatatagtttagcacagctaattccacttct

SEQ ID NO: 203543 - DNA, 2660 bp, Zea Mays
gtcatttctataacacgctgctgtgagtttccatgttctattactgctgatagctgcatgttttcatgaatcgtccctgtgtgccttgaaaattatcctctgaaaaagatccttgattactcctaaaatgcagcagtctttctccacgtttcaacaaaacatcaaagaagaacgtgaaccagagaaaggacatgatcagctatatgaatcatcaccgtggaaagaacaacctgagatttgttctgccactattgcctcaaccgcagaggcgcatagcaataaatcacaatgcattgatggcacaaatagtcaaacccctgtttcaagttctctgtgtggcaacatgcttgctgataggatgattaaccagacaaaagattcaaatatctctgcccctgtggaaataaattctcctacggggatggaaaatgctgtcgcccctggccaatgtaagagcaggtttagtcctctgctcacctttcgcaggcgagttaagaagaaaacaaatttggatgaaccagcagaagaaatttgttcacttgacaacgacaaacagtgttcaacactgacatgcagcccaccacgctcatcacaggatgctacatcattactaaaacatactgctccaaaccctttggatattgaggataaggtaggtagattgaaaaatactggaccttctacagaagctgaacactcacctgaacaagaaagattgctctagatgtaaaccaaaacataattctggaagatgatgttacaccaatgtcgaaccaaaagatgtccttggaagatgatgttacaccaatgtcgaagttcactggtgtgcaagaggtcagtgggcaagatacgccagtggaggacttcaacagaacatcaccaaatactattgaagtgccaaaagttattgatttgcaggggaagggacattgtactggggaaactacttctctgcagtctccaagacaaaaagttgatgccagttggttgaaacggaccaataaatctgtggcagaagatgttccagaatctcaaggttcaacaaaaaatattccaataattctcttggatgatgataatgatgataggggcaaggagctcgaaaattcagaggccctcgatcaagggctccatagtcaaaacaaaagaacttttgggaagattgacctgaactgtactgaattaagacaacagggacttctctgtttagatgactcaacaattcaaaggctgccagatctggatctagctgtcaatgctcgaaagcaaatgtctcgaccgattgaaaggctgtttttcacagaggagaaagataccatccgtggcaaacaagagcatcatgaagaaagctcaaccatgcacgccccatactcaaatttctttgatctgggtccaccgtggaacaccgggagtttgaagggaccaaaaggcttgccttcagaagtaaagtttggaataatggacagggctcctgagttcagtctagacctcaggctggatagtttcacagacaacaacagtgtggctgccctgaggagcgacaagttgtttctcggaagcacctccagcacatctcgtaagttaacagaaaagcttggcatgtactcctacaagaggcagtcggctccgtggtcagaagaagagctggactttctttggatcggggttaggaggtacggcgtgaataactggaatgcaatgctgagggacagtcggctgcggttttcaatctcaaggatgcccgaggaccttgctaagcaatgggacaaggagcagaagaaacttgtgggtcctgcgcaagggcccaagcccaaacggacctttcattgggcgaatattaccttggtagagcttcgtgctctggatgctccaagtcttcatttctcggggcccagacggacctttcattgggcgacgtctaccttcgcagtggccgtgctccagagagaggccaccagcatcatttaccaacaagcctgggcgtgggcggcttccctggggcttcttcatcgtatggaagaagtggcggcaggcgcagaagggcgtccaagtcgtactactacgagaacaagtcggcttggttccaggagccaccatcggacagggtgccccagcaacccggcggccgaatgggccctgagatgtggccgagcatcatggtggtgccaccgccaacggcagatccaccgagggacgacgacgtgaagccccatgtcctcctccctgatgctaccctgaagcgcgcgataaggaggagtgcggactgggggtcgttcagcaggaggctgttcctgtccggcgatctcaacgggggggctgcaggcgccccagtaccaagcgacaccggcgcgtcatccgaagagacagtgtctgacagctgagcttcagtttatttgacatgtcccattcccattcccattcttattggatgttgatgaagctgctggcatgttctctgtaatgtcatggttgcctagtactcactagtattgcatcttgtataaagtctctctctctctctctctctctctctgtcctctataacaggctacgagtccactcatgcatggtggttagatcgaacaaatactccgtaacaacatagcataccctaaaccccccaagattatatatagtttagcacagctaattccacttct

SEQ ID NO: 203544 - DNA, 2682 bp, Zea Mays
tgtgagtttccatgttctattactgctgatagctgcatgttttcatgaatcgtccctgtgtgccttgaaaattatcctctgaaaaagatccttgattactcctaaaatgcagcagtctttctccacgtttcaacaaaacatcaaagaagaacgtgaaccagagaaaggacatgatcagctatatgaatcatcaccgtggaaagaacaacctgagatttgttctgccactattgcctcaaccgcagaggcgcatagcaataaatcacaatgcattgatggcacaaatagtcaaacccctgtttcaagttctctgtgtggcaacatgcttgctgataggatgattaaccagacaaaagattcaaatatctctgcccctgtggaaataaattctcctacggggatggaaaatgctgtcgcccctggccaatgtaagagcaggtttagtcctctgctcacctttcgcaggcgagttaagaagaaaacaaatttggatgaaccagcagaagaaatttgttcacttgacaacgacaaacagtgttcaacactgacatgcagcccaccacgctcatcacaggatgctacatcattactaaaacatactgctccaaaccctttggatattgaggataaggtaggtagattgaaaaatactggaccttctacagaagctgaacactcacctgaacaagaaagttcccacgtcgtaaaatcctcagttcaacatgtggttccacagattgctctagatgtaaaccaaaacataattctggaagatgatgttacaccaatgtcgaaccaaaagatgtccttggaagatgatgttacaccaatgtcgaagttcactggtgtgcaagaggtcagtgggcaagatacgccagtggaggacttcaacagaacatcaccaaatactattgaagtgccaaaagttattgatttgcaggggaagggacattgtactggggaaactacttctctgcagtctccaagacaaaaagttgatgccagttggttgaaacggaccaataaatctgtggcagaagatgttccagaatctcaaggttcaacaaaaaatattccaataattctcttggatgatgataatgatgataggggcaaggagctcgaaaattcagaggccctcgatcaagggctccatagtcaaaacaaaagaacttttgggaagattgacctgaactgtactgaattaagacaacagggacttctctgtttagatgactcaacaattcaaaggctgccagatctggatctagctgtcaatgctcgaaagcaaatgtctcgaccgattgaaaggctgtttttcacagaggagaaagataccatccgtggcaaacaagagcatcatgaagaaagctcaaccatgcacgccccatactcaaatttctttgatctgggtccaccgtggaacaccgggagtttgaagggaccaaaaggcttgccttcagaagtaaagtttggaataatggacagggctcctgagttcagtctagacctcaggctggatagtttcacagacaacaacagtgtggctgccctgaggagcgacaagttgtttctcggaagcacctccagcacatctcgtaagttaacagaaaagcttggcatgtactcctacaagaggcagtcggctccgtggtcagaagaagagctggactttctttggatcggggttaggaggtacggcgtgaataactggaatgcaatgctgagggacagtcggctgcggttttcaatctcaaggatgcccgaggaccttgctaagcaatgggacaaggagcagaagaaacttgtgggtcctgcgcaagggcccaagcccaaacggacctttcattgggcgaatattaccttggtagagcttcgtgctctggatgctccaagtcttcatttctcggggcccagacggacctttcattgggcgacgtctaccttcgcagtggccgtgctccagagagaggccaccagcatcatttaccaacaagcctgggcgtgggcggcttccctggggcttcttcatcgtatggaagaagtggcggcaggcgcagaagggcgtccaagtcgtactactacgagaacaagtcggcttggttccaggagccaccatcggacagggtgccccagcaacccggcggccgaatgggccctgagatgtggccgagcatcatggtggtgccaccgccaacggcagatccaccgagggacgacgacgtgaagccccatgtcctcctccctgatgctaccctgaagcgcgcgataaggaggagtgcggactgggggtcgttcagcaggaggctgttcctgtccggcgatctcaacgggggggctgcaggcgccccagtaccaagcgacaccggcgcgtcatccgaagagacagtgtctgacagctgagcttcagtttatttgacatgtcccattcccattcccattcttattggatgttgatgaagctgctggcatgttctctgtaatgtcatggttgcctagtactcactagtattgcatcttgtataaagtctctctctctctctctctctctctctgtcctctataacaggctacgagtccactcatgcatggtggttagatcgaacaaatactccgtaacaacatagcataccctaaaccccccaagattatatatagtttagcacagctaattccacttct

SEQ ID NO: 203545 - DNA, 406 bp, Zea Mays
aattactgaaatcagcagggtctcttgtgcaaacaccccgtgcacaaccaattccccatcgagacatcggtccgtccgtacgaatccctgcgctcaacgccgcaccgaacctgactcaggcactcaccgctatgggcggcgaccatggcggtgggcacgccggcggtgacttccgccagaaggtatggagcatgacgggcggaccctactgccgcccggtccactggcgccgtaacaccgccatcgccatgttcggcgtcttcctcatctgcattcccatagccatgaagtccgccgagctcgaggatggatcccattatccccgatgatgaggcaagacacattgaaccaatagaagaagttgttgcacctgatgatgatgagaggcagtatcctgagtttgttg

SEQ ID NO: 203546 - DNA, 1988 bp, Zea Mays
aaaaaacacaaacatttcggtgtttccataactcccaagccagcaggattattaaggaattaaggcccttgtgagcttcttttggtgatgttgcaatcgtgtttctccaccattctgaaaaacagacagccgtaggttgtggtgctaactgcatcactcctaaaagttgcaaaattatggtccagacttcacaggcaaaaacacaccctatcaatagataatgtattgtttcatcctcctggtcacaaaaagggaaagcctccggatggggtagattcctcttggctagtcgatcagctgtccacaatcggttatgatgaggctgttctccatagaatatgttgtgtgaaggtggagagctacttgacagaatactttccagaggtgggaagtactctgaggatgatgcaaaagctgtcctggtgcaaatattaaatgtcgtcgctttttgccacattcaaggagtggttcatcgagatctcaaaccagagaattttcttttcacatcaaaagatgagaattcccatcttaaggccattgactttggcttatcagactttgtaaaaccagatgagaggctgaatgacattgttggaagtgcttattatgttgctccagaagttctgcatagatgctatagcacagaagctgatgtctggagtataggtgtaattgcatatatccttctttgcggcagccgtccattttgggcacgcactgaatctggcatattccgttcggttctcaaagctgaccccagctacaatgaggcaccatggccttcgctgactccagaagcaatggattttgttaagcgattgctgtgcaaggatccacgtagaaggatgactgcagctcaggctttaaaaattataatgccattaggctgccgttggacattcttatattccgacttatcaaagcttatattcgttcctcatctttacggaaagccgctttgagggctctatcaaagaccttaacagttgacgagcttttctatctgaaagcacagttttctttattggaaccagacagaaatggatgcatcactcttgacaatatcagaatggccttaacgagagaagctactgatgcaatgaaggaatcccgagttcaagacattcttgtttcgttgagcgcccttcagtacagaagaatggacttccaagagttctgtgcagcagcagttagtgtgcatcagcttgaagcattggatagatgggagcaacatgcgcgatctgcttatgaatattttgagaaggaaggcaaccgagctattgtaatagatgaattagcttctgaattgggcctcagtccttcagtgccactgcatgtcgttctgcaagattggatcaggcatacggatgggaaattaagttttcttggatttgtcaagttgttgcatggcatgtccagcaggtccctgtcaaagatgagatagctgtcgataatctctaacgacagcgcgtgtttacaccgtcctgttgacttggttcacaggcaaattaacagggctaaagaatcgtacgattggagcttgcatatcaagggcgtctgagctctaacagcacctgatccgacactaatttaactatagagttatgtttattgttgcctgcctactgatcatttagccgatagggaaatgaaagaaaatctcacccatgtctgcaacatgtgatgtttctaacaaccttagattaggcgtcatcttctgttatgattctagaaattttgtaatgcttcttttctcgaactggagcaagttagctgcagtcaccaggttggcgactggagcatggacatatcactgtcattgtgacattgttactgtatcattgtaccgacagatgaaagtgcttgatgtggtatgtcaggttctctccgtgtatatattgattgatgagatggaattgtgccatttttaaatatcggaatattagtatgtcaacttgcactctctaaggctcttttggaaagcagga

SEQ ID NO: 203547 - DNA, 2520 bp, Zea Mays
gctccactagctctcacactcactcgcaggccgcgtcggcaccgtgctgcctttactcctctccgaccaccttccccgtttcaattcgcttcactccccgcagtcgccactcgccgctccctcgaccccagagctctctctctctctccctccctcttcctagctccccctttccggcatggcctcctgctagctcccgtcggaacgcctcccagatcccagacgcagcgcgctaccccacgcgagcgaaggccggcgcgcgacatgggagggtgccacgcgaagccgctcacgcaggacgcggacggctcgccgccgcacgcggcgccggcgaccccgcccccgggcaacgctacccccggccccgggaagaagcactgggcggtgtccccgttcttcgcgttctccacgccgagcccgagccccgcgcaccacctcttcggcggctccgcggcgtcgccgcgcaagtcccccgcccccccgggctcggcgcccaccaccccggccaggcggatcctgaggctgcccttcccgccgccgtcgcccgccaagcacatccgggcggctctcgcgaggcggcacggcccgccgcggccgtccatccccgaggagggcggcggcgaaggggagggcggcggcggtgccaggggcctcgacaaggggtttgggttcaacaaggggttcgcggccaagtatgacttgggggatgaggtcggacggggccactttggctacacctgcgccgccacggttaagaagggcgcacgcaagggggagtccgtcgccgtcaaagtcatccccaaagcaaagatgactacatccattgctatagaggatgtccgaagggaggttaaaatcttgaaggctttgtcaggaaacaaaaacttggtgcaattttatgatgcctacgaggacaacgacaatgtatatatagtaatggagttgtgtgaaggtggagagctacttgacagaatactttccagaggtgggaagtactctgaggatgatgcaaaagctgtcctggtgcaaatattaaatgtcgtcgctttttgccacattcaaggagtggttcatcgagatctcaaaccagagaattttcttttcacatcaaaagatgagaattcccatcttaaggccattgactttggcttatcagactttgtaaaaccagatgagaggctgaatgacattgttggaagtgcttattatgttgctccagaagttctgcatagatgctatagcacagaagctgatgtctggagtataggtgtaattgcatatatccttctttgcggcagccgtccattttgggcacgcactgaatctggcatattccgttcggttctcaaagctgaccccagctacaatgaggcaccatggccttcgctgactccagaagcaatggattttgttaagcgattgctgtgcaaggatccacgtagaaggatgactgcagctcaggctttaagtcatccgtggatcagaaattataatgccattaggctgccgttggacattcttatattccgacttatcaaagcttatattcgttcctcatctttacggaaagccgctttgagggctctatcaaagaccttaacagttgacgagcttttctatctgaaagcacagttttctttattggaaccagacagaaatggatgcatcactcttgacaatatcagaatggccttaacgagagaagctactgatgcaatgaaggaatcccgagttcaagacattcttgtttcgttgagcgcccttcagtacagaagaatggacttccaagagttctgtgcagcagcagttagtgtgcatcagcttgaagcattggatagatgggagcaacatgcgcgatctgcttatgaatattttgagaaggaaggcaaccgagctattgtaatagatgaattagcttctgaattgggcctcagtccttcagtgccactgcatgtcgttctgcaagattggatcaggcatacggatgggaaattaagttttcttggatttgtcaagttgttgcatggcatgtccagcaaattaacagggctaaagaatcgtacgattggagcttgcatatcaagggcgtctgagctctaacagcacctgatccgacactaatttaactatagagttatgtttattgttgcctgcctactgatcatttagccgatagggaaatgaaagaaaatctcacccatgtctgcaacatgtgatgtttctaacaaccttagattaggcgtcatcttctgttatgattctagaaattttgtaatgcttcttttctcgaactggagcaagttagctgcagtcaccaggttggcgactggagcatggacatatcactgtcattgtgacattgttactgtatcattgtaccgacagatgaaagtgcttgatgtggtatgtcaggttctctccgtgtatatattgattgatgagatggaattgtgccatttttaaatatcggaatattagtatgtcaacttgcactctctaaggctcttttggaaagcagga

SEQ ID NO: 203548 - DNA, 2398 bp, Zea Mays
tggcaaaccattgatggaagcaggagcaagcgcacgcgttcgagaaccatgcacctcaattttagcaacctcgcacaaaaactgcatgcctaattataccttcttggcccctcctcccccgctggaacgcatgtgtttgcttcccatcgctcctggcttccccgtcgagcgagggagccacattcttgcttccattgttcgctcaaacgcttggtagctcgatcggcgccgttgttcttgggccggccggtcgagccgaatggtcatggcagcgccagtgccgctccggcggcggcgggcgctcctggtggtagcgacgttactcgccgtggtcaccgcggcgatggcgcaggactataaagatggtggcggcgacgactacgaggaggacgagaagaagaagccgcagttcaaggcgcaggaggcgtgcaacggcgtgttcctgacgtacacgttcatggagcgcgccaaggagtacccgcacctgaagaaggcggcggcgcagccgtacgcgttcaaggccacggcgacggtgctcaacaccatgaccgaggacctcaaggcgtggcagatgttcgtgggcttccagcacaaggagatcctcgtgtccgtcggcggcgccgtgctgctcgacggctccgacctccccgccaacgtgtccggtggcgccacctttgcgggatacccaatggccgacctcctcaactccatcgagacggcgggcgagccgtccctgatcgagagcaagattgagatcaccggcacccaattcggcgtgaaggcccccgggaagcccatgcccaagaccatcaagttgaccaaccccgtgggcttccggtgccccgcccccaaccacaaagacagcgtgatgtacgtgtgctgcgtcaaggaccgcaagttcaaggcgaagaaggctaacagcacgcggtaccagacacggcggaaagcggacctgacgttcgcctacgacgtgctgcaggccaacaccaacaactaccaggtgcaggtgaccatcgacaactggagccccatcagccggctggacaactggaacctcacctgggagtggaagcgcggcgagttcatctacagcatgaagggcgcctacacgctgctcaaggaaggccccgcctgcatctacagccccgcagcgggctactacaaggacatggacttcacccccgtctacaactgcgagaagcggcccgtcatcgtggacctcccgccggagcgggagaaggacgacgccgtcgggaacctccccttctgctgcaagaacggcacgctgctgccgcccaccatggacccgtccaagtcgcgggccatgttccagatgcaggtgtacaagctgccgccggacctgaaccgcacggcgctgtacccgccgcagaactggaagatctccggcaagctcaacccgcagtacgcgtgcgggccgcccgtccgcgtgagcccccaggagttcccggacccgacgggtctcatgtcgaccacccccgccgtggcgtcgtggcaggtggcgtgcaacatcacgcggcccaagaagcgcgcctccaagtgctgcgtctccttctccgcctactacaacgactccgtggtgccgtgcaacacctgcgcctgcggctgcggcgacgacaccgcgacgtgcgacccggacaagcgcgccatgctgctgccaccggaggcgctgctcgtcccgttcgacaaccggtcggccaaggcacgggcgtgggccaagatcaagcactggcgggtgcccaaccccatgccgtgcagcgacaactgcggcgtcagcatcaactggcacgtcatcaacaactacaagtccggctggtcggcgcgcatgaccatcttcaactggcaggactacaccttcaaggattggtttgccgcagtgaccatgggcagccacttcagcggctacgagaacgtctactccttcaacggcacgcggatgggcgcccccttcaacaacaccatcttcatgcagggggtgccgggcctcgcttacctcgagcccatcaccgacgcgaagacgacatcggaacccaggcttcccggcaagcagcagtcggtcatctcgttcaccaggaaagacgcgcccaatgtcaacattcccagaggggaaggcttccccaagaggatctacttcgacggcgaggagtgcgcgctcccggataggatacccaaggtgtcgagcgcgcgccggcgggctgggaccgcgagcctgggtcagatagccatggcggcggcgctcgtgatgattgtggcgctagtggattccttgtgcctatgatgactgaaaacttctttggttcatagaggatttgactgacctagcgcgctgcatttgttgaacacttcattcattaactaggaaaataaggcaaaatgcaga

SEQ ID NO: 203549 - DNA, 1009 bp, Zea Mays
ggaaaactttggtggggagtgcagtatccaatactttaaaaatactacagttttatctaaaccacagtattgaaaacaatgttttagaaggaccaaccaaacacatataggcctaaaatactgtagtatcctacaataccgcattattgcatcgaaactatgaaataaccatgctaccaaattgttatggctgcggcgtggtggtaggcgaggggtatgcaggggagagtggaggaggagagcggcttgagaacaagaacgcagaacgtagcgaggaggtctgtcgtcgccggcggctgaaggcgccaccgtcgaagaacagcccacctctaggagaacgatgaaaagtatagctgcagcgaaactggctatcgcctgcccttgaaatgtgtacaggcacaaaatgctacaaaagaaggaaacatgagcaagcagaggaagatattggatgatgcatccacatcaggtggcacaaaatccgcatcaggtggtccaaagcattatattacttacagaagttgtgtgccgttggttggagaggagaatttatctgttcttggttttgagataatgatggccggaatgttgctagtaagtggcccgttcgtatattaccggaaacggcgtacaaatcttatgcagggagctgcaagaatcccgacaagtgatcctaggttctagtatggggggacatggggtaataacggatcgcatacttgtgttgatctggtctatctttcttgtgattttgactcttgtcattgtactattatatttcacacatgtaattctggaagaggcgaagtgcttttttagttctcacaggagtaggaaccacagtggttagtctcatcgacctggtttacttgggtcaaatcacttgtgttacatattcaaatttatggttttgttacccccaaaaagttgctctaacagaggaacaactttgttcatgttgataatttatgcgaccaatgcgatcatttttctgaaagctgcaatgtttgag

SEQ ID NO: 203550 - DNA, 820 bp, Zea Mays
gtgcatgcagccatgcagggtgctctgaggactggcacatgctgttcaggcttgtgacttggcggcaggcaacaggcgggcctctggcgtagccaacggggcagggggaggggggcgcgcgggcggcacagacggaggaaaactttgaacgatgaaaagtatagctgcagcgaaactggctatcgcctgcccttgaaatgtgtacaggcacaaaatgctacaaaagaaggaaacatgagcaagcagaggaagatattggatgatgcatccacatcaggtggcacaaaatccgcatcaggtggtccaaagcattatattacttacagaagttgtgtgccgttggttggagaggagaatttatctgttcttggttttgagataatgatggccggaatgttgctagtaagtggcccgttcgtatattaccggaaacggcgtacaaatcttatgcagggagctgcaagaatcccgacaagtgatcctaggttctagtatggggggacatggggtaataacggatcgcatacttgtgttgatctggtctatctttcttgtgattttgactcttgtcattgtactattatatttcacacatgtaattctggaagaggcgaagtgcttttttagttctcacaggagtaggaaccacagtggttagtctcatcgacctggtttacttgggtcaaatcacttgtgttacatattcaaatttatggttttgttacccccaaaaagttgctctaacagaggaacaactttgttcatgttgataatttatgcgaccaatgcgatcatttttctgaaagctgcaatgtttgag

SEQ ID NO: 203551 - DNA, 8881 bp, Zea Mays
caaggctcaagcctcaagccaacaaccgaatagagagagcagaggacgcactacaaggccgcacagacggagcagagcagctagaggagagaggcggcgtcgcggcgaggtggaagagagagagagagagagagtggtgaaggtgcgtgggttaaaaagaggaaacaaaaaagaaaacgagcgaggcagaaaacacaagcaaagagacgacagcaaaaataggaggccggaggcgggcgaggaacgtgaataaaatatcattcggagaaacaagagaggccggggaatcgcgtcggaattccggcgaatcggcgggatccggccgggatctgcgcgccggatgaggggtcggcaccatgaaatggtccacattactcagtaaggtcgtcttcgccggcggccagcagcagcagccgccacctccgccgtcgccgccgccggagtctccgttccacggccagcaggcggtccaggacctcgccaccccgaggctcagctccgcctccaccggcggggacgagggcggcttcgacgcggcggccgggagctcgccctctgccgctgcgtcctctgccagggggagaaatgaattggagtcggactttaggagattatgggaagaatttcgctcttccagctctgaaaaggagaaagaaagggccttaaatttggctgtagatgtcttctgtaggctagtgaagcagtattctagtgtagctcaattagttacaaagttagtagaaggacatattttttcttttgttattggaagagcttttgttactgatgtggagaaactaagaatccacagcaaaggaagaccgctgcgtgtggctgatgttattggcttcttttcggataccacagagcttggtatatgtccaggatcaaatttgttgtacgcagtcgaagtgcttgtgactgagacaaatgataggcaacctctgttggactctggtattttgtgctgccttatatatatcctcaattctctattgagccccaatgagaactccacagataccttgcctgttcaccaagaaggatccagaaatgagaaaaacaaaaatttggatcctatgcaatcacgacggcttgagattgagggaagtgtaatacatattatgaaagcactggcgagccatcaatctgctgcaccaagtttaattgaagatgatgccttacaagttcttttccacatggttgcaaatggttcactatctgtgttgtcacagttcagggatggtattgttccccttcacacaattcagctccatcgccatgcaatgcaggtccttggtcttcttcttgcaaatgacaatgggacttctgcaaaatacatcaggaagcaccagctgattaaagtacttcttatggctgtgaaagatttcaatcctcaaagcggtgatgctgcttacactatgggcattgtggatttattactggaatgtgttgagctgtcttacaggcctgagtctggggccataaggctcagggaagacatacataatgctcatggttaccagttccttgttcagtttgctcttacactttgtagcttacacaaaaatcagactctccaatcctcatccaagttagcatccgaagcggatgcatctgttccttctcacagattagaacaagatatattctcatgtgacctttcacctcagttgtctaggttgcttgatgttcttgtaaatttgtcacaaattggcccctcagaaaatggtggtgttagtagccctaaggccttgaggggttatcatcttcttgcactttttcttcataggagaatgtcactatttgatatgcaatctcttgatatcttctttcgtattgctgcctgtgaggcttcctttcctgagccacagaaatcaaagataaatcgaacagcaggctatgcgtctggaatgtccccagaggccagccttgatgatctcaccttacccaggtttgccgatgatatgtcttctgggggatcacatggggatctagatgacttttcagctcaaaaggattcatttagccacttgtctgagctggagaatgctgacttagctggtgagacttctgaattcatagtcttgtcaaatgctgatatggttgaacacattcttttggactggactatatgggttgctgctcctatatcagtgcaaataactcttcttgggtttcttgagaggatggtgtccatgcattggttcagaaatcacaaccttacaatgctgcggcgaattaatcttgttcaacatcttcttgttacgttacaacgtggtgatgttgaaattcccgtgttggagaagctagttgtgcttctaggtgtcatcctggaggatggttttctagcttctgagctggagcttgttgtaagattcataataatgacatttgatcctccagagcttacaccgaaccgccagattgtgcgggaggctatgggaaagcatgttattgtgaggaacatgttattggaaatgcttattgatctacaagtaaccataaatgctgaagagttgctggagcaatggcataaagttgtttcatccagattggtcacatatttccttgatgaagcggtacatccaactagtatgagatggatcacgactcttttaggagtttgccttacgtcatcaactacatttgcattgaagttccgtacaagtggaggttttcaaggattgaatcatgtgcttccaagctttcacgattctccagaaatatactatatattgttctgtttggtgtttgggaagcctgtttatcctcgagtgccagaggtccgcatgcttgatttccatgctctcatgcctagcgatggaaactatggagaattgaagtttgtggatctcttggatactataattgcaatggcaaaagctacatttgattccttgattatgaaatctatgcttgcacatgagaataacaatctttcacatcttaatggcaccttggtcgcggatcttgttgaggcgacatcggacatgggaggtgatcttcaaggagaagctctgatgcataagacatacgcagcaaggttaatgggtggtgaagcagcagcacctgctgttgctacttcaatattgaggttcatggttgatctggcaaagatgtgcccaccattctctgccgtttgcaggcggcatgatttcctagagagctgcattgatctctatttctcttgtgtgagatccgattttgccctgaggatggcaaaagatcttacaactgttgcaactggcgagatgaatgaacatgatgatgataatggaagtttaaaggatgccctttcaagtttaccacatgatcaggatcaatctaccaaaacattgagtgccacaagttttcctcaggagcagaaaagttccagttcagaaagtactggcatgccaaacccttttgaaactgctgaagccaaagcagatgattcttcgaatcaggagttcagcaataaaattttaaatggagaagcaaatcaaatatttaataatgctcgtgatcaagggcggatcacagcttccggtgcaaatggcatttctgaattccaccatgtaactgattcacccaactcagttgctatgaataatgttggatctcctgttttatccgagaggtcaacccacagagcagctagtacccctactgcatctccaatggccccattcacatcttggcctggcagtgcaggatcgtatactgatggtagacacctgacagcttctccatccatggcttcatctatatctgggatagacctggactcgtcccctgatctgaggacaaatattcagggaccatctgccgcaaatacccttttcccaatcaattccaagcttttgcttgacatagatgatttaggttatgggggtggcccatgctctgcaggagctacagctgttctagattttgttgctcaaattcttgctgacactatctcagatcagcttaaagcagcactctttattgagaacattttggagtccgtgcctttgtttgttgatattgactctgctctagtttttcaaggcttgtgtctaagcagattgatgaacttccttgaaagaaagctcttgcttgatgatgaagaagatgggaagaaacttgacaagagccgctggtcggtcaatttggacccactttgctggatgattgttgatcgtgtgtacatgggctgctttccaaccccactcagggtactacaaacactagaattcttaatgtcaatgttacagcttgctagtaaagatggccgtgttgaagatgccgtgcctccagggaaaggtattttgtccattgctcgaggaagcaggcaacttgatccatacatccacgcgatattgaagaacacaaaccgaatgataatgtactgtttcctcccaatattccttaaaagtatgggggaagatgatctacttgcaaatcttgcattcctgacggaaactgggaggagtttagcttctaaacgttatcaggaagatttttctattgatatttgtacagttcttcagctactagttgccaacaagagattggtgctctgcccaagcaatgttgatacagatctaatgtgttgtttctgcataaatttaatgtcacttctccatgacaagagagtaactgctcaaaacttggcagttgatttacttaaatacttggtagtgcatcgtcgtcaatctcttgaggaccttctagtttgcaagcctaaccaaggacaacaactggacatcctgcatggaggacttgataaattggtcactggaagtacatcaacgttttttgaatggctgcaaagttctcagcaaacaataagtaaagtgttggaccagtgtgctttaataatgtgggttcaatatattaccggctcagcaaaatttcctggcgtgagaataaaaggaatggaggtcaggcgcaagaaagagatgggacggaaatttcgcgaatctgcaaaagtagatgccaggcactgggagcagataaatgagcggcggtataatcttgatttggttcgtgatgtgatgtctacagagctaagagcaattcgtcaagacaaatacggttggatattgcacggagaaagtgagtggcaaagccagctccaagaacttgtccatgagagaggtatttttcctatgcggcaaccatccacagaacctgagtggcagctgtgtggtgttgaaggaccatatagaatgaggaagaaacttgagcactccaaatttaagatagatactattcagaatgttctaaccagcaaccttggatcaaatggtggtaagattatcaataaagaggatggagaattgttgttgacatctgggtcagacacaatgtcaggcttgaatcttttgacctatgacactgagcagagggatcttgatgctgtcgagttttcgtcattcaaagatgatgatgacatattcaaaggaggaagcacaatttcaggtccaattggctggactgatgataaaagcagcgttaatgagcagagccttcattctgcgacggaatttggagcaaaatcaagttccctttcttttcacatgactgagagtcaccagggtaaatctgaacttagttcaccaaggagggcaccttcagtcaaaggtactgatgcaagaacctcagaggataaatcagaaaaggagttgcttgacaatggtgagtatcttatcaggccttatctggagccctatgagaaaataaggcataaatacaactgtgaacgggttgctggtcttgataagcacgatggaatatttttaattggagaactttgcttatacattattgagaacttctacattgatgattccaattgcatttgcgaaaagggcagtgaagatgagctctctgtcattgatcaagctttaggtgtgaacaaggatataatgggaggcagtgaatctcagttaaaatcacctaccacttggggtgggacagcaaaggtcttgcttggtggcagatcatgggcatataatggaggtgcttggggtaaggagaagctttgcaacagtagcaacctgcctcatccatggcatatgtggaagcttgatagtgtccatgagttgttgaaacgtgattaccagctccgccctgttgcaattgaaattttcagcatggatggttgcaatgagcttctagttttccacaaaaaggagagagaggaagttttcaaaaatttgattgccatgaatctcccacggaatagcatgttggacacaaccatatcagcatcctctaaacaggagagtggtgaggggagccgtctttttaaagtcatggcaaaatcattttctaaaagatggcaaagtggagaaattacgaacttccaatatctcatgcatctaaatacacttgctggtcgagggtatagtgatctcacacagtacccagtatttccatgggttctcgcagattatgagagcgatgttttagatctgaggaatccacagacatttcgcaggcttgataaacccatgggatgccaaacggaggaaggtgaagaggaattctgcaagagatatgatagctgggatgaccctgatgtaccaaagttccattatggctctcattattcaagtgctggaattgtccttttctatctcttaaggttgcctccttttagcacagaaaatcagaaattgcagggtggacaatttgaccatgcagaccggttattcaacagtgtgaaggatacatgggtaagtgctgcaggcaaaagtaacacatcagatgtgaaagaactaattcctgagttctattatttgcctgaatttttggagaaccgttttaatctggatctgggcgagaaacaatcaggagagaaggttggtgatgttgttttaccaccttgggctaaaggcagcgccagagagttcatcaggaagcatcgggaagcactggaatcggattatgtatctgagaatctgcatcattggattgatcttatttttggatataagcagagaggaaaggcagctgaagatgccgtcaatgtcttctatcactacacatatgaaggcaatgttgacatagacgcagtatcagatcctaccatgaaggcttcaatactagcacaaatcaaccattttggtcagacccccaaacagttattccagaaaccacatccacagaggcggactgacaggaaagtccctcctcatcctctacggtactgtgcctatctaacacagcaggagattcgcaagacagcatcttcggtgtcccagattgtctcctacaatgataagatcctaattgctgcagttaactgcttgctcaagccgctaacttataatgaatacatttcctggggattccctgaccgaagcttgagaatattaacatatgatcaggatagacttttgtctactcatgaaaaccttcatggtggtagtcaaattcagtgcactggagtgagccatgatggcaacattctcatcactggtggtgatgatggagttgttgcagtgtggagatttgtgaaggatggcatccgccgtctcctgagaatggagaaggctttgtgtgctcacacaggaaagataacttgcgtctctgtcagccaaccttactcattaattgtctcaggctctgatgactgttctgttatcttatgggacctgacaagcctagtctttgtgaagcagctaccaaggttcccggcatcagtatccgcgctacatgtgaacagcctcactggtgagattctgactggtgctggtgttctttttgctgtttggagcatcaatggggactgccttgctgtggtgaacacctcccagcttccttctgacctcatcttgtctgtgacaagcgcgacacactcagactggcaggacacaaactggtacgtgacaggccatcaaagcggcgcggttaaggtatggaagatgttgcactgctcgtctgatgaagcagtaaatagcaagagcaaatcacctgcggtatcgtctggtgggcttagcctgaacggccaagcaccagagtataggctacttctgcagaaggtgctcaagtcacacaaacaccctgtcactgccctttgtataccaccggacttgaagcagcttctgagtggggatggcagcggtcacttgctctcatggtcattgaaagacgacagtttcaagggttcatagctcagagaaatatagggattcagctgcacatatagagaaacactggttaaatcttaccactgatttcttcctcgtccagaactgagcattggcgtgcattgacaaaagagctcggatcagcaagcttctacatggtatatgaaatgttcccttgatgtcccatgcctgggccatacagcagtccgggcaggagagagaatacaacagacacaattggaaggatgaagtggacgtggatgcgctgctgcgctgacatcataatcttatactgtgaattatgagatggttgtaccttctcttgtttttttgaggagaaaaggattcatgtgggctgtaggtgccattgtttgtaaagtctatacagggtaattttggtggtgccggttgaggtggctgatggtgtagtgtctcgatgttttgttcggggttgtgggagcaaggaaagaggtattagtttcattttctccccccacctctggaggctagtttgggagccacaaaaccgaaagtgattggatggactaaaagcttctacatattcaaaattgaataagaacgagattttaatcacttcaatcctcttcgattttgtggcttccaaactagccccagaagtgttgattctttgactgggtgtaatttgagcacccttgtgttcagtaagtctatttgcgtatacatgcaagagttttgctgaacaaagcgacgagccccttccatggttcgattgg

SEQ ID NO: 203552 - DNA, 6549 bp, Zea Mays
gctaattttacgaataacccttaacacgagaggtaggaggtaggtgcaagctaagacagccccgcctaaaacccatcaggccgcctgcccgtgcgctcactactcactagggttttgaatcccttccgtaccctcccttccgccgactcctagggttccgaccgccgaccgggtttgttctccggcgatggcaccgcttccgccgcgcgagctcctctctgtcatcgaggcggcgctgctgggctccacggcgccatcgccggcgcagcgcgtggagctcctccacgccgtccgcgatgctgcccccgcgttccgcacgttactctcctatccggtgccgaaggcgtcggatcggactcaggtggagagcaaggaagtgcggctaccgggcatgcctcccatcactcttgatgacacagacgtgcggaccgcgcttaagctgagtgatgaactcaatcttaatgagattgagtgtgttcgtttgctagttgatgctaacagagagtgggttctctatgggcgagagccattggaaatatatagactcgcagctggcctttggtacatggagagaagggatcttataaccgctctgtacattctgttgcgatctgttgcacttgaccaaggtcttgatgccgatctgatgtctgaaatcgaggatcaaatccaacctttattcaatgatggtctccgacaacggataattactcttgtaaaggagctgaacagggaagaaccagctggaattggcagtccaagctctgagcgttatgtgcttgatttcagaggggctcttgtggaaagaagggcaattgtctcgagagagagattaagtttgagccactgccttgccctttctgcacttattaaactaacgagccccaaagaggttaaggatgtattttcaatattgaaagactgtgcagctgaagcaaatcaaaatagcagtgtggagctccagatcacctatggacttctgttctttcttgtagcaacttttatttctgatgccctaagtacttctcttgagaaagcatcattgtcatcgtctgattcctcatttagacgtgaatttcatgaacttgtgatgaggacaggtaacaatatgactattgaagggtttgttggtgttgtgcggcttgcatggtctgttcatttgatgctaactcaagatcgaagtaattcaagagaaacgtcagatatttggtcatgcctggaaattatctgtcgtcaaaattcttttgagtttttgcgggagcaagttttgaaaacagctgcataccagaatgatgatgaggacattgtctacatgtacactggctacactcacaagctaatgatgtgctttatttcccacccaacttccagagataagataaaggaaatcaaggagaaagcaatgactgccctcagtccatatgagccaccacgaggtcaacgagaagatcttggtagaaatggggaacaagctgatcagcctactaaggagccttttgtatccctgctggaactggttagagaaatctatcagaaagtgcctgagctagggaatggaaatgaggaattgtggacttttgttatatatgcaggagaagaccacacaaacacacaaactcttgtggcctttcttggacttcttagtactttggcttccactgaagttggtgctgccaaagtctatgagctgctccagggaaaaacttaccgttcagttggttggagcactttgtttgattgcttatctatctatgaggagaagttcaaaaaatcaattcaatcttctgcaaacatactgcctgattttcctgagggggatgcacaagcgcttgttgcatatttagctgttcttcagaaggtggtggaaaatgggaatcttacggaacgcaggaagtggttccctgacattgaacctttattcaagcttctcagctatgaaaatgtgcctccatacttgaagggggctttgcgaaattcaataactgcatttataaaagtgtcacccatactaaaggatgcaatttggaattatcttgagcaatatgatcttccggtggttacagctccattaggtcaccatacagcaacacaggtctatgatatgaggtttgagttgaatgaagtagaagcgagaagggagagttacccctcgaccatatctttcctcaaattgatcaatgcacttattgtggaagaaagaaacataagtgacaaaggccggaggttcatgggtatctttaagtttgtttatgaggatgtctttggtccttttcctcaaagagcttatgctgaccccctggaaaaatgggagcttgctcttgcttgcttggagcattttcgcatggttttgagcatgtatgatataaaggatgatgatatttatgcttctgtgaacacattagctccttcctctcttgagagacaactccctctgctagaactactcaaagatttcatgagtgggaaagttgctttccggaatattatgaacatcatattagtgggtgttgactctattatcaatgagcgaactacccaaacatacggtatcattttggagagaactgtccttctatctcttgaaatatttattcttgtcatggagagagatcttgctcttgctgatgtttttcggccgctctaccagccattggatgttatattggctcaaagtcatagacagattgtagcattgctagagtttgtacgatatgattatcttccccaaattcaacagtgttctatcaaaattatgggcatcctaagttctagaatagttggtttggtacagttgcttttgaaagctgatgttggaaaaatggtaatagaagattatgctgcttgcttggagttccggtttgatgattttcaggtcatagaagacacgaaagatgatgttggggttctaacactgcagttgcttgttgacaatatttgtcgtccagctccaaacattacacatttgctcttgggattcgatgtcaatgggtccattgagcaaacagttctaaaaccaaaatctcaatacagttgtttgaagataatcttggacaatcttgaaaaagcgacaaagccggatataaattccttactgcacgaattcagttttcagcttctctatgagttatgtcttgatcctttaacttgcggacctgttatggatctcttgagtacaaagaagtaccagttcttttctaagcatgttggaaccattggagtgacaccgcttccaaaaaggaacagtaaccaatctcttcgaatcagcatgctccatgagagggcatggttgctaaagatgttagcactggcattacatatatccgatatatcatcatctgtatacagggaagcctgcatggctattctttatcatacttttggtcagtgtgctgagaacttccagagcacaagcttgatccattcacatgatgctttgactagcattagcgatgtaccagcaaagaggaacaaggttttggacttgcttgaggttctacagtttagatgtccggatacttcaacgaagtatccacagctgctttccagcttgggaatcgaatcgaagattgaagagatcctaaggaactctgccactttcgaaaatggtggtgtatattattattcagagagaggtgaccgactgattgatcttgatgctttccgtgaaaaacttctccagatttcacaagaattgaactcacaattaaccgagcctgagaaagctggactaaaagaatcagttcatcatttgctcaaatgggcgtggcgatataacaaaaatcttgaagagcaggctgcccaacttcacatgttgactggctggtcacagattgttgaggttgctgtatcaagaaggatgtcattattcgaggactgttctcagctattgtttgaactgcttgatgcttcgttgaatgccacaacatctccagattgttcagtgaaaatggcatatgttttaactaatgtatcgttgacctgtatggcgaaactgcgggatgaaagattcatatgcccagctggtacagattctgatgcggttacttgccttgacattatttcgtcaaagcagctaccaaatgcagcttgtaactcattgttattcaagcttgtgatggcaacattaagaaatgaatcatctgaaatcttgagaagacggcaatatgcattattactgagttattttcagtattgtagcagcattctggactctgatgtccctccatctgttcttcggttcttgctactggaggagcaagatggtgatgatgaggacatcactcttcaaaaggttctcaaggagcacaatgaattagcacatgccaacttttccatcataaggaaggaagctcaagctatcgttgatttggttactaaggatgctttccatggtagtgaagctgggaaagcactttccttttatgttcttgatgcattaattagtattgaccatgaaaagtattttctaaatcaacttcaaagtcgagggatccttagatcatgcctgagtgatgttgcaaactatttgtcaaagggccagtgtttgaatccacaggcacagaggcgggagcagagcctgcgctctccatcattgacctacaaagttttggtactgggcttcactctggtttttggcccatctacagtagcccgccccttcaaaaaccctcccagccaccaggacccctcccagccgccagaaacccgccagaacccttcccagccgccagaaaccctactcctctcctctgtcctctctggtttctgccgacgtctctgctccagcctccaagtgctccagccagcagagaggcagagagcagatcagccgagggggagggggagctcgccgcggaagggggagggggtggagcctcaccagggagcaggggaaggggacttcaccagggagggagaggtcgcgggctcacggtatggggccgccgccgttggtgaactgagagctgccgtcacctggacctcacgtgaagccctaaccgcgtccttctctggaatcacatcaccgttgttaccttgtttggtgaagaacaagattgtacgagagatagtggacttcgcaaagcagcatcagtcagtttttaatagcattttaagggagaacatgactggaactaatttgctcacgttggagcagcttagcatggcggtttctattctcagcaaggtttgggcgtatgaggaaaatgaggaatgcagctacattcaagatctattttccttgatgcattctctttttagcgttgactttgggattctaaattttatgcaatcaccaaacatgattgagaatcagaagtcagaattgatagcatttggtctttgcttcagccttgtctcttacctttatgttctcgctacaaggaaaaacatgcgatttcaagtttcatatggccgtaacagtgatcagcagcacccaacactacaaatggtttctgatcttctgaattcagcaacacttgccctagaaagagttggtgaagaaaaatatatgcttttaaacaagatccgtgacttaaatgagttgtccagaaaggaggttgatgagataataaaagtgtgcatgaagcaagattgcatatctcctaacgataacatccgtaaaaggaggtacattgcaatgatagatttgtgttgcatggctggcaaccgagaccaactcattacccttctactccaaataacggaatgtgccgttactattctcctcattcattttcaggacgatgcttctgcaaaaggtctttcttcattttctgatgaactccttcctgtgctggagagactagagcatttgaaagaggacaaagttggacgtagtctgaagttgttccacagatccattactacactaaaggagatgaccatcagaaccataaccatctgaaggccgcagcctgtacaatgtacatgtttattaggatagtacacctcgctagatttgcagatgtaaaacattgttgtgtaagctctcatatatatatatacacacttttgccctgaggcaatgagctgtatgtcatgttttaagagtaaaatgtgatttttgaggggtttccatctaggaacattaacatttaaactgtatttttttggcctataaactttcactggagatattactttttttgttttgcccttagatgtctataggacacaaagcagggagaaaaggatatctataggatggccaagattcgtgaaaggaagacaagggatgtcaaccaagtcaaatgcatcaaggacgaagcaaaccaactattagtgaagagtgaagagatcaagaacagatggaaggagtacttcaacaaattgttcaatggagggaatgagagtgctacaatagaattggacgaaccattcgatgacaacaacaggggttttgtacgaaggatacaagaatatgaagttaaggaggcgctaaaaaggatgaaggtaggaaaggcgatgggccctgatggtatccctatcgaggtatggagatgtcttggagacatagtgatagtatggctgactaagcttttcaacacc

SEQ ID NO: 203553 - DNA, 6419 bp, Zea Mays
tgaatcccttccgtaccctcccttccgccgactcctagggttccgaccgccgaccgggtttgttctccggcgatggcaccgcttccgccgcgcgagctcctctctgtcatcgaggcggcgctgctgggctccacggcgccatcgccggcgcagcgcgtggagctcctccacgccgtccgcgatgctgcccccgcgttccgcacgttactctcctatccggtgccgaaggcgtcggatcggactcaggtggagagcaaggaagtgcggctaccgggcatgcctcccatcactcttgatgacacagacgcgcttaagctgagtgatgaactcaatcttaatgagattgagtgtgttcgtttgctagttgatgctaacagagagtgggttctctatgggcgagagccattggaaatatatagactcgcagctggcctttggtacatggagagaagggatcttataaccgctctgtacattctgttgcgatctgttgcacttgaccaaggtcttgatgccgatctgatgtctgaaatcgaggatcaaatccaacctttattcaatgatggtctccgacaacggataattactcttgtaaaggagctgaacagggaagaaccagctggaattggcagtccaagctctgagcgttatgtgcttgatttcagaggggctcttgtggaaagaagggcaattgtctcgagagagagattaagtttgagccactgccttgccctttctgcacttattaaactaacgagccccaaagaggttaaggatgtattttcaatattgaaagactgtgcagctgaagcaaatcaaaatagcagtgtggagctccagatcacctatggacttctgttctttcttgtagcaacttttatttctgatgccctaagtacttctcttgagaaagcatcattgtcatcgtctgattcctcatttagacgtgaatttcatgaacttgtgatgaggacaggtaacaatatgactattgaagggtttgttggtgttgtgcggcttgcatggtctgttcatttgatgctaactcaagatcgaagtaattcaagagaaacgtcagatatttggtcatgcctggaaattatctgtcgtcaaaattcttttgagtttttgcgggagcaagttttgaaaacagctgcataccagaatgatgatgaggacattgtctacatgtacactggctacactcacaagctaatgatgtgctttatttcccacccaacttccagagataagataaaggaaatcaaggagaaagcaatgactgccctcagtccatatgagccaccacgaggtcaacgagaagatcttggtagaaatggggaacaagctgatcagcctactaaggagccttttgtatccctgctggaactggttagagaaatctatcagaaagtgcctgagctagggaatggaaatgaggaattgtggacttttgttatatatgcaggagaagaccacacaaacacacaaactcttgtggcctttcttggacttcttagtactttggcttccactgaagttggtgctgccaaagtctatgagctgctccagggaaaaacttaccgttcagttggttggagcactttgtttgattgcttatctatctatgaggagaagttcaaaaaatcaattcaatcttctgcaaacatactgcctgattttcctgagggggatgcacaagcgcttgttgcatatttagctgttcttcagaaggtggtggaaaatgggaatcttacggaacgcaggaagtggttccctgacattgaacctttattcaagcttctcagctatgaaaatgtgcctccatacttgaagggggctttgcgaaattcaataactgcatttataaaagtgtcacccatactaaaggatgcaatttggaattatcttgagcaatatgatcttccggtggttacagctccattaggtcaccatacagcaacacaggtctatgatatgaggtttgagttgaatgaagtagaagcgagaagggagagttacccctcgaccatatctttcctcaaattgatcaatgcacttattgtggaagaaagaaacataagtgacaaaggccggaggttcatgggtatctttaagtttgtttatgaggatgtctttggtccttttcctcaaagagcttatgctgaccccctggaaaaatgggagcttgctcttgcttgcttggagcattttcgcatggttttgagcatgtatgatataaaggatgatgatatttatgcttctgtgaacacattagctccttcctctcttgagagacaactccctctgctagaactactcaaagatttcatgagtgggaaagttgctttccggaatattatgaacatcatattagtgggtgttgactctattatcaatgagcgaactacccaaacatacggtatcattttggagagaactgtccttctatctcttgaaatatttattcttgtcatggagagagatcttgctcttgctgatgtttttcggccgctctaccagccattggatgttatattggctcaaagtcatagacagattgtagcattgctagagtttgtacgatatgattatcttccccaaattcaacagtgttctatcaaaattatgggcatcctaagttctagaatagttggtttggtacagttgcttttgaaagctgatgttggaaaaatggtaatagaagattatgctgcttgcttggagttccggtttgatgattttcaggtcatagaagacacgaaagatgatgttggggttctaacactgcagttgcttgttgacaatatttgtcgtccagctccaaacattacacatttgctcttgggattcgatgtcaatgggtccattgagcaaacagttctaaaaccaaaatctcaatacagttgtttgaagataatcttggacaatcttgaaaaagcgacaaagccggatataaattccttactgcacgaattcagttttcagcttctctatgagttatgtcttgatcctttaacttgcggacctgttatggatctcttgagtacaaagaagtaccagttcttttctaagcatgttggaaccattggagtgacaccgcttccaaaaaggaacagtaaccaatctcttcgaatcagcatgctccatgagagggcatggttgctaaagatgttagcactggcattacatatatccgatatatcatcatctgtatacagggaagcctgcatggctattctttatcatacttttggtcagtgtgctgagaacttccagagcacaagcttgatccattcacatgatgctttgactagcattagcgatgtaccagcaaagaggaacaaggttttggacttgcttgaggttctacagtttagatgtccggatacttcaacgaagtatccacagctgctttccagcttgggaatcgaatcgaagattgaagagatcctaaggaactctgccactttcgaaaatggtggtgtatattattattcagagagaggtgaccgactgattgatcttgatgctttccgtgaaaaacttctccagatttcacaagaattgaactcacaattaaccgagcctgagaaagctggactaaaagaatcagttcatcatttgctcaaatgggcgtggcgatataacaaaaatcttgaagagcaggctgcccaacttcacatgttgactggctggtcacagattgttgaggttgctgtatcaagaaggatgtcattattcgaggactgttctcagctattgtttgaactgcttgatgcttcgttgaatgccacaacatctccagattgttcagtgaaaatggcatatgttttaactaatgtatcgttgacctgtatggcgaaactgcgggatgaaagattcatatgcccagctggtacagattctgatgcggttacttgccttgacattatttcgtcaaagcagctaccaaatgcagcttgtaactcattgttattcaagcttgtgatggcaacattaagaaatgaatcatctgaaatcttgagaagacggcaatatgcattattactgagttattttcagtattgtagcagcattctggactctgatgtccctccatctgttcttcggttcttgctactggaggagcaagatggtgatgatgaggacatcactcttcaaaaggttctcaaggagcacaatgaattagcacatgccaacttttccatcataaggaaggaagctcaagctatcgttgatttggttactaaggatgctttccatggtagtgaagctgggaaagcactttccttttatgttcttgatgcattaattagtattgaccatgaaaagtattttctaaatcaacttcaaagtcgagggatccttagatcatgcctgagtgatgttgcaaactatttgtcaaagggccagtgtttgaatccacaggcacagaggcgggagcagagcctgcgctctccatcattgacctacaaagttttggtactgggcttcactctggtttttggcccatctacagtagcccgccccttcaaaaaccctcccagccaccaggacccctcccagccgccagaaacccgccagaacccttcccagccgccagaaaccctactcctctcctctgtcctctctggtttctgccgacgtctctgctccagcctccaagtgctccagccagcagagaggcagagagcagatcagccgagggggagggggagctcgccgcggaagggggagggggtggagcctcaccagggagcaggggaaggggacttcaccagggagggagaggtcgcgggctcacggtatggggccgccgccgttggtgaactgagagctgccgtcacctggacctcacgtgaagccctaaccgcgtccttctctggaatcacatcaccgttgttaccttgtttggtgaagaacaagattgtacgagagatagtggacttcgcaaagcagcatcagtcagtttttaatagcattttaagggagaacatgactggaactaatttgctcacgttggagcagcttagcatggcggtttctattctcagcaaggtttgggcgtatgaggaaaatgaggaatgcagctacattcaagatctattttccttgatgcattctctttttagcgttgactttgggattctaaattttatgcaatcaccaaacatgattgagaagtcagaattgatagcatttggtctttgcttcagccttgtctcttacctttatgttctcgctacaaggaaaaacatgcgatttcaagtttcatatggccgtaacagtgatcagcagcacccaacactacaaatggtttctgatcttctgaattcagcaacacttgccctagaaagagttggtgaagaaaaatatatgcttttaaacaagatccgtgacttaaatgagttgtccagaaaggaggttgatgagataataaaagtgtgcatgaagcaagattgcatatctcctaacgataacatccgtaaaaggaggtacattgcaatgatagatttgtgttgcatggctggcaaccgagaccaactcattacccttctactccaaataacggaatgtgccgttactattctcctcattcattttcaggacgatgcttctgcaaaaggtctttcttcattttctgatgaactccttcctgtgctggagagactagagcatttgaaagaggacaaagttggacgtagtctgaagttgttccacagatccattactacactaaaggagatgaccatcagaaccataaccatctgaaggccgcagcctgtacaatgtacatgtttattaggatagtacacctcgctagatttgcagatgtaaaacattgttgtgtaagctctcatatatatatatacacacttttgccctgaggcaatgagctgtatgtcatgttttaagagtaaaatgtgatttttgaggggtttccatctaggaacattaacatttaaactgtatttttttggcctataaactttcactggagatattactttttttgttttgcccttagatgtctataggacacaaagcagggagaaaaggatatctataggatggccaagattcgtgaaaggaagacaagggatgtcaaccaagtcaaatgcatcaaggacgaagcaaaccaactattagtgaagagtgaagagatcaagaacagatggaaggagtacttcaacaaattgttcaatggagggaatgagagtgctacaatagaattggacgaaccattcgatgacaacaacaggggttttgtacgaaggatacaagaatatgaagttaaggaggcgctaaaaaggatgaaggtaggaaaggcgatgggccctgatggtatccctatcgaggtatggagatgtcttggagacatagtgatagtatggctgactaagcttttcaacacc

SEQ ID NO: 203554 - DNA, 6212 bp, Zea Mays
atggcaccgcttccgccgcgcgagctcctctctgtcatcgaggcggcgctgctgggctccacggcgccatcgccggcgcagcgcgtggagctcctccacgccgtccgcgatgctgcccccgcgttccgcacgttactctcctatccggtgccgaaggcgtcggatcggactcaggtggagagcaaggaagtgcggctaccgggcatgcctcccatcactcttgatgacacagacgtgcggaccgcgcttaagctgagtgatgaactcaatcttaatgagattgagtgtgttcgtttgctagttgatgctaacagagagtctgttgcacttgaccaaggtcttgatgccgatctgatgtctgaaatcgaggatcaaatccaacctttattcaatgatggtctccgacaacggataattactcttgtaaaggagctgaacagggaagaaccagctggaattggcagtccaagctctgagcgttatgtgcttgatttcagaggggctcttgtggaaagaagggcaattgtctcgagagagagattaagtttgagccactgccttgccctttctgcacttattaaactaacgagccccaaagaggttaaggatgtattttcaatattgaaagactgtgcagctgaagcaaatcaaaatagcagtgtggagctccagatcacctatggacttctgttctttcttgtagcaacttttatttctgatgccctaagtacttctcttgagaaagcatcattgtcatcgtctgattcctcatttagacgtgaatttcatgaacttgtgatgaggacaggtaacaatatgactattgaagggtttgttggtgttgtgcggcttgcatggtctgttcatttgatgctaactcaagatcgaagtaattcaagagaaacgtcagatatttggtcatgcctggaaattatctgtcgtcaaaattcttttgagtttttgcgggagcaagttttgaaaacagctgcataccagaatgatgatgaggacattgtctacatgtacactggctacactcacaagctaatgatgtgctttatttcccacccaacttccagagataagataaaggaaatcaaggagaaagcaatgactgccctcagtccatatgagccaccacgaggtcaacgagaagatcttggtagaaatggggaacaagctgatcagcctactaaggagccttttgtatccctgctggaactggttagagaaatctatcagaaagtgcctgagctagggaatggaaatgaggaattgtggacttttgttatatatgcaggagaagaccacacaaacacacaaactcttgtggcctttcttggacttcttagtactttggcttccactgaagttggtgctgccaaagtctatgagctgctccagggaaaaacttaccgttcagttggttggagcactttgtttgattgcttatctatctatgaggagaagttcaaaaaatcaattcaatcttctgcaaacatactgcctgattttcctgagggggatgcacaagcgcttgttgcatatttagctgttcttcagaaggtggtggaaaatgggaatcttacggaacgcaggaagtggttccctgacattgaacctttattcaagcttctcagctatgaaaatgtgcctccatacttgaagggggctttgcgaaattcaataactgcatttataaaagtgtcacccatactaaaggatgcaatttggaattatcttgagcaatatgatcttccggtggttacagctccattaggtcaccatacagcaacacaggtctatgatatgaggtttgagttgaatgaagtagaagcgagaagggagagttacccctcgaccatatctttcctcaaattgatcaatgcacttattgtggaagaaagaaacataagtgacaaaggccggaggttcatgggtatctttaagtttgtttatgaggatgtctttggtccttttcctcaaagagcttatgctgaccccctggaaaaatgggagcttgctcttgcttgcttggagcattttcgcatggttttgagcatgtatgatataaaggatgatgatatttatgcttctgtgaacacattagctccttcctctcttgagagacaactccctctgctagaactactcaaagatttcatgagtgggaaagttgctttccggaatattatgaacatcatattagtgggtgttgactctattatcaatgagcgaactacccaaacatacggtatcattttggagagaactgtccttctatctcttgaaatatttattcttgtcatggagagagatcttgctcttgctgatgtttttcggccgctctaccagccattggatgttatattggctcaaagtcatagacagattgtagcattgctagagtttgtacgatatgattatcttccccaaattcaacagtgttctatcaaaattatgggcatcctaagttctagaatagttggtttggtacagttgcttttgaaagctgatgttggaaaaatggtaatagaagattatgctgcttgcttggagttccggtttgatgattttcagttgcttgttgacaatatttgtcgtccagctccaaacattacacatttgctcttgggattcgatgtcaatgggtccattgagcaaacagttctaaaaccaaaatctcaatacagttgtttgaagataatcttggacaatcttgaaaaagcgacaaagccggatataaattccttactgcacgaattcagttttcagcttctctatgagttatgtcttgatcctttaacttgcggacctgttatggatctcttgagtacaaagaagtaccagttcttttctaagcatgttggaaccattggagtgacaccgcttccaaaaaggaacagtaaccaatctcttcgaatcagcatgctccatgagagggcatggttgctaaagatgttagcactggcattacatatatccgatatatcatcatctgtatacagggaagcctgcatggctattctttatcatacttttggtcagtgtgctgagaacttccagagcacaagcttgatccattcacatgatgctttgactagcattagcgatgtaccagcaaagaggaacaaggttttggacttgcttgaggttctacagtttagatgtccggatacttcaacgaagtatccacagctgctttccagcttgggaatcgaatcgaagattgaagagatcctaaggaactctgccactttcgaaaatggtggtgtatattattattcagagagaggtgaccgactgattgatcttgatgctttccgtgaaaaacttctccagatttcacaagaattgaactcacaattaaccgagcctgagaaagctggactaaaagaatcagttcatcatttgctcaaatgggcgtggcgatataacaaaaatcttgaagagcaggctgcccaacttcacatgttgactggctggtcacagattgttgaggttgctgtatcaagaaggatgtcattattcgaggactgttctcagctattgtttgaactgcttgatgcttcgttgaatgccacaacatctccagattgttcagtgaaaatggcatatgttttaactaatgtatcgttgacctgtatggcgaaactgcgggatgaaagattcatatgcccagctggtacagattctgatgcggttacttgccttgacattatttcgtcaaagcagctaccaaatgcagcttgtaactcattgttattcaagcttgtgatggcaacattaagaaatgaatcatctgaaatcttgagaagacggcaatatgcattattactgagttattttcagtattgtagcagcattctggactctgatgtccctccatctgttcttcggttcttgctactggaggagcaagatggtgatgatgaggacatcactcttcaaaaggttctcaaggagcacaatgaattagcacatgccaacttttccatcataaggaaggaagctcaagctatcgttgatttggttactaaggatgctttccatggtagtgaagctgggaaagcactttccttttatgttcttgatgcattaattagtattgaccatgaaaagtattttctaaatcaacttcaaagtcgagggatccttagatcatgcctgagtgatgttgcaaactatttgtcaaagggccagtgtttgaatccacaggcacagaggcgggagcagagcctgcgctctccatcattgacctacaaagttttggtactgggcttcactctggtttttggcccatctacagtagcccgccccttcaaaaaccctcccagccaccaggacccctcccagccgccagaaacccgccagaacccttcccagccgccagaaaccctactcctctcctctgtcctctctggtttctgccgacgtctctgctccagcctccaagtgctccagccagcagagaggcagagagcagatcagccgagggggagggggagctcgccgcggaagggggagggggtggagcctcaccagggagcaggggaaggggacttcaccagggagggagaggtcgcgggctcacggtatggggccgccgccgttggtgaactgagagctgccgtcacctggacctcacgtgaagccctaaccgcgtccttctctggaatcacatcaccgttgttaccttgtttggtgaagaacaagattgtacgagagatagtggacttcgcaaagcagcatcagtcagtttttaatagcattttaagggagaacatgactggaactaatttgctcacgttggagcagcttagcatggcggtttctattctcagcaaggtttgggcgtatgaggaaaatgaggaatgcagctacattcaagatctattttccttgatgcattctctttttagcgttgactttgggattctaaattttatgcaatcaccaaacatgattgagaatcagaagtcagaattgatagcatttggtctttgcttcagccttgtctcttacctttatgttctcgctacaaggaaaaacatgcgatttcaagtttcatatggccgtaacagtgatcagcagcacccaacactacaaatggtttctgatcttctgaattcagcaacacttgccctagaaagagttggtgaagaaaaatatatgcttttaaacaagatccgtgacttaaatgagttgtccagaaaggaggttgatgagataataaaagtgtgcatgaagcaagattgcatatctcctaacgataacatccgtaaaaggaggtacattgcaatgatagatttgtgttgcatggctggcaaccgagaccaactcattacccttctactccaaataacggaatgtgccgttactattctcctcattcattttcaggacgatgcttctgcaaaaggtctttcttcattttctgatgaactccttcctgtgctggagagactagagcatttgaaagaggacaaagttggacgtagtctgaagttgttccacagatccattactacactaaaggagatgaccatcagaaccataaccatctgaaggccgcagcctgtacaatgtacatgtttattaggatagtacacctcgctagatttgcagatgtaaaacattgttgtgtaagctctcatatatatatatacacacttttgccctgaggcaatgagctgtatgtcatgttttaagagtaaaatgtgatttttgaggggtttccatctaggaacattaacatttaaactgtatttttttggcctataaactttcactggagatattactttttttgttttgcccttagatgtctataggacacaaagcagggagaaaaggatatctataggatggccaagattcgtgaaaggaagacaagggatgtcaaccaagtcaaatgcatcaaggacgaagcaaaccaactattagtgaagagtgaagagatcaagaacagatggaaggagtacttcaacaaattgttcaatggagggaatgagagtgctacaatagaattggacgaaccattcgatgacaacaacaggggttttgtacgaaggatacaagaatatgaagttaaggaggcgctaaaaaggatgaaggtaggaaaggcgatgggccctgatggtatccctatcgaggtatggagatgtcttggagacatagtgatagtatggctgactaagcttttcaacacc

SEQ ID NO: 203555 - DNA, 4290 bp, Zea Mays
cttgtacttattcatttgttttgcttgtcttggtcagctttgttcacagtaaactggatttccatctctgacgatgatggttttggaatcactatattttacctttagcattaccctccactttccatgactatctcatcattctgaaggtggtggaaaatgggaatcttacggaacgcaggaagtggttccctgacattgaacctttattcaagcttctcagctatgaaaatgtgcctccatacttgaagggggctttgcgaaattcaataactgcatttataaaagtgtcacccatactaaaggatgcaatttggaattatcttgagcaatatgatcttccggtggttacagctccattaggtcaccatacagcaacacaggtctatgatatgaggtttgagttgaatgaagtagaagcgagaagggagagttacccctcgaccatatctttcctcaaattgatcaatgcacttattgtggaagaaagaaacataagtgacaaaggccggaggttcatgggtatctttaagtttgtttatgaggatgtctttggtccttttcctcaaagagcttatgctgaccccctggaaaaatgggagcttgctcttgcttgcttggagcattttcgcatggttttgagcatgtatgatataaaggatgatgatatttatgcttctgtgaacacattagctccttcctctcttgagagacaactccctctgctagaactactcaaagatttcatgagtgggaaagttgctttccggaatattatgaacatcatattagtgggtgttgactctattatcaatgagcgaactacccaaacatacggtatcattttggagagaactgtccttctatctcttgaaatatttattcttgtcatggagagagatcttgctcttgctgatgtttttcggccgctctaccagccattggatgttatattggctcaaagtcatagacagattgtagcattgctagagtttgtacgatatgattatcttccccaaattcaacagtgttctatcaaaattatgggcatcctaagttctagaatagttggtttggtacagttgcttttgaaagctgatgttggaaaaatggtaatagaagattatgctgcttgcttggagttccggtttgatgattttcagttgcttgttgacaatatttgtcgtccagctccaaacattacacatttgctcttgggattcgatgtcaatgggtccattgagcaaacagttctaaaaccaaaatctcaatacagttgtttgaagataatcttggacaatcttgaaaaagcgacaaagccggatataaattccttactgcacgaattcagttttcagcttctctatgagttatgtcttgatcctttaacttgcggacctgttatggatctcttgagtacaaagaagtaccagttcttttctaagcatgttggaaccattggagtgacaccgcttccaaaaaggaacagtaaccaatctcttcgaatcagcatgctccatgagggaagcctgcatggctattctttatcatacttttggtcagtgtgctgagaacttccagagcacaagcttgatccattcacatgatgctttgactagcattagcgatgtaccagcaaagaggaacaaggttttggacttgcttgaggttctacagtttagatgtccggatacttcaacgaagtatccacagctgctttccagcttgggaatcgaatcgaagattgaagagatcctaaggaactctgccactttcgaaaatggtggtgtatattattattcagagagaggtgaccgactgattgatcttgatgctttccgtgaaaaacttctccagatttcacaagaattgaactcacaattaaccgagcctgagaaagctggactaaaagaatcagttcatcatttgctcaaatgggcgtggcgatataacaaaaatcttgaagagcaggctgcccaacttcacatgttgactggctggtcacagattgttgaggttgctgtatcaagaaggatgtcattattcgaggactgttctcagctattgtttgaactgcttgatgcttcgttgaatgccacaacatctccagattgttcagtgaaaatggcatatgttttaactaatgtatcgttgacctgtatggcgaaactgcgggatgaaagattcatatgcccagctggtacagattctgatgcggttacttgccttgacattatttcgtcaaagcagctaccaaatgcagcttgtaactcattgttattcaagcttgtgatggcaacattaagaaatgaatcatctgaaatcttgagaagacggcaatatgcattattactgagttattttcagtattgtagcagcattctggactctgatgtccctccatctgttcttcggttcttgctactggaggagcaagatggtgatgatgaggacatcactcttcaaaaggttctcaaggagcacaatgaattagcacatgccaacttttccatcataaggaaggaagctcaagctatcgttgatttggttactaaggatgctttccatggtagtgaagctgggaaagcactttccttttatgttcttgatgcattaattagtattgaccatgaaaagtattttctaaatcaacttcaaagtcgagggatccttagatcatgcctgagtgatgttgcaaactatttgtcaaaggtgaagaacaagattgtacgagagatagtggacttcgcaaagcagcatcagtcagtttttaatagcattttaagggagaacatgactggaactaatttgctcacgttggagcagcttagcatggcggtttctattctcagcaaggtttgctattcacttcatatttgattttggccacctgtaatctgttgtagaggtgctaacaactttttaggtttgggcgtatgaggaaaatgaggaatgcagctacattcaagatctattttccttgatgcattctctttttagcgttgactttgggattctaaattttatgcaatcaccaaacatgattgagaatcagaagtcagaattgatagcatttggtctttgcttcagccttgtctcttacctttatgttctcgctacaaggaaaaacatgcgatttcaagtttcatatggccgtaacagtgatcagcagcacccaacactacaaatggtttctgatcttctgaattcagcaacacttgccctagaaagagttggtgaagaaaaatatatgcttttaaacaagatccgtgacttaaatgagttgtccagaaaggaggttgatgagataataaaagtgtgcatgaagcaagattgcatatctcctaacgataacatccgtaaaaggaggtacattgcaatgatagatttgtgttgcatggctggcaaccgagaccaactcattacccttctactccaaataacggaatgtgccgttactattctcctcattcattttcaggacgatgcttctgcaaaaggtctttcttcattttctgatgaactccttcctgtgctggagagactagagcatttgaaagaggacaaagttggacgtagtctgaagttgttccacagatccattactacactaaaggagatgaccatcagaaccataaccatctgaaggccgcagcctgtacaatgtacatgtttattaggatagtacacctcgctagatttgcagatgtaaaacattgttgtgtaagctctcatatatatatatacacacttttgccctgaggcaatgagctgtatgtcatgttttaagagtaaaatgtgatttttgaggggtttccatctaggaacattaacatttaaactgtatttttttggcctataaactttcactggagatattactttttttgttttgcccttagatgtctataggacacaaagcagggagaaaaggatatctataggatggccaagattcgtgaaaggaagacaagggatgtcaaccaagtcaaatgcatcaaggacgaagcaaaccaactattagtgaagagtgaagagatcaagaacagatggaaggagtacttcaacaaattgttcaatggagggaatgagagtgctacaatagaattggacgaaccattcgatgacaacaacaggggttttgtacgaaggatacaagaatatgaagttaaggaggcgctaaaaaggatgaaggtaggaaaggcgatgggccctgatggtatccctatcgaggtatggagatgtcttggagacatagtgatagtatggctgactaagcttttcaacacc

SEQ ID NO: 203556 - DNA, 1185 bp, Zea Mays
cgtatccatcttcaagccagccgtctccttatccctgcgacgccgctcacctaggctcatcttccagccgccctctccacccagcagcagagcacaccatcctctccactcggatccccaagccctcgcctccatctcttgccacgacatctgtcccctgctcgaacctccacccggccgcgtcctcgccggtggccagcgccgctgcatcgcccttcctagcgtcggccttggcaccgcttccccgagcgccctagtcgagctcgcccatcctctgctctagccctttctcaacgccgtcgctgagctcgcccctcccctcagccatggacacgacgacctgcaacccttcttggtggccaagcccatcttcctgctcgcgccccgtctttttccacctctgcgcgtatcagctcgtccaacccccatggtgtttcctccctctcggctcccttgctccctccccatggcgttccccctggatgttggtgatctgttccccacggtgcaggcaaatgttctttccctccctgcagcagcaccttggtggttgtcgagcagcacatcgcacttgcgcagcctaggtcacgacgttgtccacctcggtacgctaatgatcgagatgcgacagccagggtctaggttgaccccaagtggtgcaaaggatggcctacttcgagaggcgatgtcggcggaccaatctagaagattgatgatctctacataaaaataggattacattgattcaaatctgatctggtgtttggcatttgttttccccctacattagtttctcattattatatttgtatagattcatattcttgagactaacctaatcagcattctttacataataatattataaggaggattaatttcatatacaatactatatataatgagatgaatcatttggccttagatagataattggcagcctatcaaaaatttcataagtgtagaacaatttttttgccgttaacatagtgtataacatttgatgtcgtaatttgttttggaagaaaatttaatttcaacatagaatttttttaccgataggtttatggtcttttaatatctacaggttgtggaaactgagatcattgtaactcaaatgagagcttggcacttagcatatagatgccactagaaccaatttggaattactgtgaggaaaaacgg

SEQ ID NO: 203557 - DNA, 1644 bp, Zea Mays
cgccggctggacctcgcctggcctggaagtgctggtgatgtgctcgaagacgatcccgttgggaggctcaaggtgtatgtctacgagttgccgaccaagtacaacaagaagatggtggctaaagactctaggtgtctcagccacatgtttgccgcggagatcttcatgcaccgcttcctactgtctagcgcgatccggactttaaatccagaagtagccgattggttctatactccggtatacaccacgtgtgatctcacaccgtggggtcatcccttgcccttcaagtcaccacggataatgcggagcgcgattcagttcatttccaaccggtggccatactggaacaggacagagggagcagaccacttctttgtcgtgccacatgactttggcgcatgcttccactaccaggaagagaaggccatcgagcggggcgtccttccgttgcttcgccgtgctacactggtccagacttttgggcagaaggatcatgtctgcctgaaggaaggctccatcaccatcccgccatatgctcctcctcagaagatgaaaacccacctcgttcccccagggacccctaggtcgatcttcgtgtatttccgcggtttattctatgacactgcaaatgatcctgagggtggttactatgcaaggggcgcccgtgcatcagtctgggagaacttcaagaacaacccgctcttcgacatctcaacggaccacccacccacgtactacgaggacatgcagcgtgccgtcttctgcctgtgcccgctgggctgggccccgtggagcccccgtctggtggaggcggtggtgttcggctgcatcccggtgatcatcgccgacgacatcgtccttcccttcgcggacgcgatcccgtgggaggagatcggtgtcttcgtggccgaggacgacgtcccgaggctggacaccatcctgacgtccataccgatggaggtgatcctccggaagcagaggctgctcgcgaatccgtccatgaagcaggccatgctgttcccgcagcccgcccaggctggggacgccttccaccagatcctgaacgggctggcgcggaagctgccgcacggtgaggacgtgttcctcaagcccgggcagaaggtgctcaactggaccgagggcccccgcggcgacctgaagccatggtaggtgtactggaaaaaaatgccatggcaccgtcagcgtgtccgctgttcttgtgtacgctacacagcacaaccagatgggaagctgatcgacgacgaggacgatgagtactcccatgtcactgatgtaaatgtaaagcgtcttccagcccaccaggcactgtgcttcttcaggcgacgtgtctggtttgcttgtgttgtgtctgttctgaactttactttagcgttaacctattaacgatcggagatcatgtaatttatggctgttgtattctccctatagtatcaaggacatgtttgattagtttagtctagggactaaaatttagttaggagactaaagtttactccctactctatttagttgtagggactaaaaatattcagagcatattaaatgaatcataagaagaataaaatatcccttagcattctcgtgtaattagtgtaactgaaataaataacggacaaaaaaaaa

SEQ ID NO: 203558 - DNA, 1701 bp, Zea Mays
accctcagattgtgtgcatctgagcataagcaaggcataatcctgccttgcttatgctcggcagcagagcttcactgcacaggaagtgctggtgatgtgctcgaagacgatcccgttgggaggctcaaggtgtatgtctacgagttgccgaccaagtacaacaagaagatggtggctaaagactctaggtgtctcagccacatgtttgccgcggagatcttcatgcaccgcttcctactgtctagcgcgatccggactttaaatccagaagtagccgattggttctatactccggtatacaccacgtgtgatctcacaccgtggggtcatcccttgcccttcaagtcaccacggataatgcggagcgcgattcagttcatttccaaccggtggccatactggaacaggacagagggagcagaccacttctttgtcgtgccacatgactttggcgcatgcttccactaccaggaagagaaggccatcgagcggggcgtccttccgttgcttcgccgtgctacactggtccagacttttgggcagaaggatcatgtctgcctgaaggaaggctccatcaccatcccgccatatgctcctcctcagaagatgaaaacccacctcgttcccccagggacccctaggtcgatcttcgtgtatttccgcggtttattctatgacactgcaaatgatcctgagggtggttactatgcaaggggcgcccgtgcatcagtctgggagaacttcaagaacaacccgctcttcgacatctcaacggaccacccacccacgtactacgaggacatgcagcgtgccgtcttctgcctgtgcccgctgggctgggccccgtggagcccccgtctggtggaggcggtggtgttcggctgcatcccggtgatcatcgccgacgacatcgtccttcccttcgcggacgcgatcccgtgggaggagatcggtgtcttcgtggccgaggacgacgtcccgaggctggacaccatcctgacgtccataccgatggaggtgatcctccggaagcagaggctgctcgcgaatccgtccatgaagcaggccatgctgttcccgcagcccgcccaggctggggacgccttccaccagatcctgaacgggctggcgcggaagctgccgcacggtgaggacgtgttcctcaagcccgggcagaaggtgctcaactggaccgagggcccccgcggcgacctgaagccatggtaggtgtactggaaaaaaatgccatggcaccgtcagcgtgtccgctgttcttgtgtacgctacacagcacaaccagatgggaagctgatcgacgacgaggacgatgagtactcccatgtcactgatgtaaatgtaaagcgtcttccagcccaccaggcactgtgcttcttcaggcgacgtgtctggtttgcttgtgttgtgtctgttctgaactttactttagcgttaacctattaacgatcggagatcatgtaatttatggctgttgtattctccctatagtatcaaggacatgtttgattagtttagtctagggactaaaatttagttaggagactaaagtttactccctactctatttagttgtagggactaaaaatattcagagcatattaaatgaatcataagaagaataaaatatcccttagcattctcgtgtaattagtgtaactgaaataaataacggacaaaaaaaaa

SEQ ID NO: 203559 - DNA, 2658 bp, Zea Mays
cgtaccacatcatcttcctcccttcctcttcttcctcctctcccccgagcagatttaaagctatctagcagccgggagcagctatcggtacagtacgtgagcgagcggcggcggcaatgacaaggtgcggacgatgccgccagtgtgaatgcgccggcgcctccaccaccacctcccacggcgacgcgcgcaaccgcgacaacgatgcccccgacgcggtcctcgagggcctcgccatggcaggcctcgtcgacatcctccgccagctcggagacctcgcagagtgcgtttgttttggagtccctactccgctccctagctagtgtgtcctactatactagttgttgtctcgcgtcgtcgaaccgcatccgcatgcacacgccggccggttacgtatctactgggatgcgcaggcttgccgcggaggtgttcgacgacatgcaagaccaagtgatggccgcgtccgcgcgagggcgacgactggccgcgagagccaggaagctgctggcggccgacctcgacctcgtcctcgacctcgacctgccgccgccgtccacccaagaacaccgctgcctcagctctgccgccgctgctactgctctcgccacctccggtggtgcaggccgtctgggctgccgctcctatctcggaggcgcgccgccgatgccgcgtgtcgtcgtccaacgtatcgagcgctgccgcgggcctcccaggctgtcactccttgacaagtatatatggccgctgatatacgatacgatgacgtgcagtgcagctgcctgtttgatttctgctcccaagtcccaactccaatgtccaatccatgctggtacggtggtgttgcgttgcaggtttgatgctgctggcgatggagcgtgcctcaagaggtacaccgacccctccttcttcttcagggcccactctgccaagattgatgagcaaggcacgctgaagcagcatcgtcggcaggcagaagcagcagcagcagcaggtgccgccgggtctatgttcctgctgatgcagcaaacagctgctcacagggtcgaacagcccaacatggaacagaagctgcaagaaggtagtacagcgcagcccagcccaagtgagctcgagagaacgagctctttcgaggcatggctctctccacaagctcgccgctttcctaccgctactgctgctactactcatcaccatcttcaggaaccacctgatgatgatgatggtggtggtggtggtggtgctactacctgtagtggatccatcagtagtcaggttgataccacatcgaatgctgcggctgttagcagcagttccacggtgaaggcggtcaggctgaactcagcatcattggtgaaaggtggtgagagtaatacgacgaggtcgaggtacaaaggcaagatcgcctcaagagtcagcagcttgccgaggaagctcttcatgaacaccaccaagcatcacaacgaccactcgcgctcttttcgtgcaggtagtagcagcctccgggtgacccaagccacagacatcggggattgcagccctgaacttgaagccatcgccgtcgccatccccaccccagcagctgactccaagaacctgctgctgctgctgccaggaagtggtcctgttctggagccacctgacaattcttctgctgctgctgctgaagacgccaaagtacatacgccacttgcgcctattccaccgatgcagtggctgtcagagaaagggactccacctgcatctcctaaacacagaacaccatgtttccagcaacaatttggtagcagtgggcaatctgatgagaagccaagccaagagcacgaggcttcagaccacagcagcaatctgctgcaggagagcgtgttcttctctgcggcacaagagctagcgaagatgtcccctcctcctccttgggtgccaaggcccaaatatccactgcttgatgttaaggcagttaagctacggaatggtccaagcccgatccatccttcaagaaacattttggacagcaggagtgcacagataaaagacattgcaatttcttccaagctgaaaccagcttctagagcgagctctcatgtgactgggactgggagtcctaccaacgccaccattctgaacagagcagatggcattcggcaggtgcacgatgatgaaactgatcaaatctggagcgatgacactcaatgaataatgatcatgtactaactgatggaagtagagtcattcaagttgagatggccgagttggtctaaggcgccagattaaggttctggtccgaaagggcgtgggttcaaatcccactctcaacaaatatttttttatttttcctgttactcttgtaattgtttgtagagaattcattagctttttttttcaaatccaactctcaacaaacatgtttttcattgtattgtttttctttttcctgtttcaaactactcttctaattgtaattgtttgtagagaattcattagccctttttttactttatcatgcagttcttgtttttggattgtttttcttcttcctgtgttaagctaatctggttcttgtaactgtttgtagaagattcattattcttgtaacagttcttggattgtctctacaaatttgttgaggcttatagttattagattttagccacaggatcaaat

SEQ ID NO: 203560 - DNA, 1425 bp, Zea Mays
catcaccatcttcaggaaccacctgatgatgatgatggtggtggtggtggtggtgctactacctgtagtggatccatcagtagtcaggttgataccacatcgaatgctgcggctgttagcagcagttccacggtgaaggcggtcaggctgaactcagcatcattggtgaaaggtggtgagagtaatacgacgaggtcgaggtacaaaggtagtagcagcctccgggtgacccaagccacagacatcggggattgcagccctgaacttgaagccatcgccgtcgccatccccaccccagatcgatgcagtaacagtaacagcagcactcctgaaacatgtacagcagctgactccaagaacctgctgctgctgctgccaggaagtggtcctgttctggagccacctgacaattcttctgctgctgctgctgaagacgccaaagtacatacgccacttgcgcctattccaccgatgcagtggctgtcagagaaagggactccacctgcatctcctaaacacagaacaccatgtttccagcaacaatttggtagcagtgggcaatctgatgagaagccaagccaagagcacgaggcttcagaccacagcagcaatctgctgcaggagagcgtgttcttctctgcggcacaagagctagcgaagatgtcccctcctcctccttgggtgccaaggcccaaatatccactgcttgatgttaaggcagttaagctacggaatggtccaagcccgatccatccttcaagaaacattttggacagcaggagtgcacagataaaagacattgcaatttcttccaagctgaaaccagcttctagagcgagctctcatgtgactgggactgggagtcctaccaacgccaccattctgaacagagcagatggcattcggcaggtgcacgatgatgaaactgatcaaatctggagcgatgacactcaatgaataatgatcatgtactaactgatggaagtagagtcattcaagttgagatggccgagttggtctaaggcgccagattaaggttctggtccgaaagggcgtgggttcaaatcccactctcaacaaatatttttttatttttcctgttactcttgtaattgtttgtagagaattcattagctttttttttcaaatccaactctcaacaaacatgtttttcattgtattgtttttctttttcctgtttcaaactactcttctaattgtaattgtttgtagagaattcattagccctttttttactttatcatgcagttcttgtttttggattgtttttcttcttcctgtgttaagctaatctggttcttgtaactgtttgtagaagattcattattcttgtaacagttcttggattgtctctacaaatttgttgaggcttatagttattagattttagccacaggatcaaat

SEQ ID NO: 203561 - DNA, 2149 bp, Zea Mays
gtctccctcccctcgcccgtacccacacttgattaacgtgtcagctcgctaccggaggccctcgccaactcgactcgtactcccgttcccggcggcgatccggccggcaccggaaccctagggttccaacgaagcaggaatgatgagtcatcaacagcaaattgcccctcctagtaggggttctgtgaatggattcccccatctaaagctggatagggtgggtagtggaaggcatgaaagtaaaatcgtgaggtcatcatctggcggttttaccaattcagggcatggaagccattcgagggaccgactaatctatgttctaacacaacttattgggcatcatgtcaacgtgcatgtgaaaaatggctctataatatctggaattttccatgcaacaaactctgacaaagacttcggagtagtcttaaaaatggctcaggtcataaaggatggttctgccagaggacaaagatttgcttctgatgttgtaaagaaacctgagactatgataataccagcaagggagcttgtacaagtttttgccaaggatgtagcacttggcggtgatgagctgccaaaaggtcctggtcatgacaaaaggaaggacttgctgattgattctgccatttcccgctctcattaccttgaagagagggaacttgagcgctgggcaccagatgaaggagattcagagtgtatcgaactggagaagtatgacagaaagggaaataggagctgggatcagttcgaaaccaatgcagccttgtttggggtaaagagtacattcaatgaagaaatttataccacaaagcttgagagaggtcctcatatgagagagcttgaaaagcatgcttcgagaatagctagagaaatagaaggagaagataccaaagatattcatcttgcagaggagagaggcttattcctgggtgatgacttggaccatgatgaagagataaaatattcagcagtgcgtagagacaccgataacagcaagtacaagccaccatttactaatgtcccaagcagtacataccaagttgatttgtttaacaggacagtcaatattgttcccaaggatttgctgggatgttcatcaacaatggatgaagaatcatcatcccacatatttgatgatattgatgcatctgccactattcaaaccaatagcgttagacagccaacatctgattaccttccagatagactctcgtccaatgatgaaaacaggttggacagaaagctgagcaaagggagtaatgaaaatatggataagagaaagttgcaacctgagaataatttatctgatggtgcaagacctcttatttctgaaggaattcaagctaaatcctaatgccaagagtttcactccgtcagcatctttgaggccaccacaccctgcatcatctgatgcatcatattactatactaataacattccagcagcaccacttggacctggtttgccagtgggcatggggttcccaccggcatatggcacccagcctgtcatgtataatgctcaacctggagcatcacagcagggttacatgcatcctgttggtctacagtatgggcagcagatgatgatgggaggagggcagaatcgtcctgtttattattatgcgcctgagatgcaacaatacagaggaagaaacttctagatatactattttgaactgctgctaggtgaaagtcacaacaatccccacaagtgggataatgacccggcaaaagccgctattagaatggaaagaactggtgatgatctccctgactgtcgctccgattccttggacaaaaagccccatcgactttgtgttgcttggttgcctggtcaaaaagctcttcattgttctgtcactgttgctcagaagcaggttgactggattttttttatgttttttgtcagacttctgttgtaaattaaattgtgggtcatctgttcgacccagaaatgacattcataagggctagtgtggtgacagaaaattgaaggggatccatagaagagaatccacttgctattcaattttgaatagcaagtggattctcttcatggatctattttaatttctcggtcaccaaatcagtcctaaatgtttgagattgccccatattacatttatgtgttctttgacgcttgttc

SEQ ID NO: 203562 - DNA, 2478 bp, Zea Mays
ccgcgccttcgtcgtcaaggccggggttcctgcggccgcgtctccctcccctcgcccgtacccacacttgattaacgtgtcagctcgctaccggaggccctcgccaactcgactcgtactcccgttcccggcggcgatccggccggcaccggaaccctagggttccaacgaagcaggaatgatgagtcatcaacagcaaattgcccctcctagtaggggttctgtgaatggattcccccatctaaagctggatagggtgggtagtggaaggcatgaaagtaaaatcgtgaggtcatcatctggcggttttaccaattcaggaaatgacatcaaactagggcatggaagccattcgagggaccgactaatctatgttctaacacaacttattgggcatcatgtcaacgtgcatgtgaaaaatggctctataatatctggaattttccatgcaacaaactctgacaaagacttcggagtagtcttaaaaatggctcaggtcataaaggatggttctgccagaggacaaagatttgcttctgatgttgtaaagaaacctgagactatgataataccagcaagggagcttgtacaagtttttgccaaggatgtagcacttggcggtgatgagctgccaaaaggtcctggtcatgacaaaaggaaggacttgctgattgattctgccatttcccgctctcattaccttgaagagagggaacttgagcgctgggcaccagatgaaggagattcagagtgtatcgaactggagaagtatgacagaaagggaaataggagctgggatcagttcgaaaccaatgcagccttgtttggggtaaagagtacattcaatgaagaaatttataccacaaagcttgagagaggtcctcatatgagagagcttgaaaagcatgcttcgagaatagctagagaaatagaaggagaagataccaaagatattcatcttgcagaggagagaggcttattcctgggtgatgacttggaccatgatgaagagataaaatattcagcagtgcgtagagacaccgataacagcaagtacaagccaccatttactaatgtcccaagcagtacataccaagttgatttgtttaacaggacagtcaatattgttcccaaggatttgctgggatgttcatcaacaatggatgaagaatcatcatcccacatatttgatgatattgatgcatctgccactattcaaaccaatagcgttagacagccaacatctgattaccttccagatagactctcgtccaatgatgaaaacaggttggacagaaagctgagcaaagggagtaatgaaaatatggataagagaaagttgcaacctgagaataatttatctgatggtgcaagacctcttatttctgaagggtcggatgggccaccctcaagttcatatgcatatgaaccctcatcttctggccaaggattcaaatctccagaaacacctgatttgacagtatctgtcaaacatccttctaagacggaacatgtgattaactctcaaagacctggtagttcaacatcgtcaacatcagagcgcattgctgcaaactcagctgcgagtgctcttggcttgtcaccaagctcttcaataggatcccttacctctgaaaaatcaactttgaaccctaatgctaaggaattcaagctaaatcctaatgccaagagtttcactccgtcagcatctttgaggccaccacaccctgcatcatctgatgcatcatattactatactaataacattccagcagcaccacttggacctggtttgccagtgggcatggggttcccaccggcatatggcacccagcctgtcatgtataatgctcaacctggagcatcacagcagggttacatgcatcctgttggtctacagtatgggcagcagatgatgatgggaggagggcagaatcgtcctgtttattattatgcgcctgagatgcaacaatacagaggaagaaacttctagatatactattttgaactgctgctaggtgaaagtcacaacaatccccacaagtgggataatgacccggcaaaagccgctattagaatggaaagaactggtgatgatctccctgactgtcgctccgattccttggacaaaaagccccatcgactttgtgttgcttggttgcctggtcaaaaagctcttcattgttctgtcactgttgctcagaagcaggttgactggattttttttatgttttttgtcagacttctgttgtaaattaaattgtgggtcatctgttcgacccagaaatgacattcataagggctagtgtggtgacagaaaattgaaggggatccatagaagagaatccacttgctattcaattttgaatagcaagtggattctcttcatggatctattttaatttctcggtcaccaaatcagtcctaaatgtttgagattgccccatattacatttatgtgttctttgacgcttgttc

SEQ ID NO: 203563 - DNA, 2224 bp, Zea Mays
cccacccccgcgccttcgtcgtcaaggccggggttcctgcggccgcgtctccctcccctcgcccgtacccacacttgattaacgtgtcagctcgctaccggaggccctcgccaactcgactcgtactcccgttcccggcggcgatccggccggcaccggaaccctagggttccaacgaagcaggaaattaggaatgatgagtcatcaacagcaaattgcccctcctagtaggggttctgtgaatggattcccccatctaaagctggatagggtgggtagtggaaggcatgaaagtaaaatcgtgaggtcatcatctggcggttttaccaattcaggaaatgacatcaaactagggcatggaagccattcgagggaccgactaatctatgttctaacacaacttattgggcatcatgtcaacgtgcatgtgaaaaatggctctataatatctggaattttccatgcaacaaactctgacaaagacttcggagtagtcttaaaaatggctcaggtcataaaggatggttctgccagaggacaaagatttgcttctgatgttgtaaagaaacctgagactatgataataccagcaagggagcttgtacaagtttttgccaaggatgtagcacttggcggtgatgagctgccaaaaggtcctggtcatgacaaaaggaaggacttgctgattgattctgccatttcccgctctcattaccttgaagagagggaacttgagcgctgggcaccagatgaaggagattcagagtgtatcgaactggagaagtatgacagaaagggaaataggagctgggatcagttcgaaaccaatgcagccttgtttggggtaaagagtacattcaatgaagaaatttataccacaaagcttgagagaggtcctcatatgagagagcttgaaaagcatgcttcgagaatagctagagaaatagaaggagaagataccaaagatattcatcttgcagaggagagaggcttattcctgggtgatgacttggaccatgatgaagagataaaatattcagcagtgcgtagagacaccgataacagcaagtacaagccaccatttactaatgtcccaagcagtacataccaagttgatttgtttaacaggacagtcaatattgttcccaaggatttgctgggatgttcatcaacaatggatgaagaatcatcatcccacatatttgatgatattgatgcatctgccactattcaaaccaatagcgttagacagccaacatctgattaccttccagatagactctcgtccaatgatgaaaacaggttggacagaaagctgagcaaagggagtaatgaaaatatggataagagaaagttgcaacctgagaataatttatctgatggtgcaagacctcttatttctgaaggaattcaagctaaatcctaatgccaagagtttcactccgtcagcatctttgaggccaccacaccctgcatcatctgatgcatcatattactatactaataacattccagcagcaccacttggacctggtttgccagtgggcatggggttcccaccggcatatggcacccagcctgtcatgtataatgctcaacctggagcatcacagcagggttacatgcatcctgttggtctacagcagtatgggcagcagatgatgatgggaggagggcagaatcgtcctgtttattattatgcgcctgagatgcaacaatacagaggaagaaacttctagatatactattttgaactgctgctaggtgaaagtcacaacaatccccacaagtgggataatgacccggcaaaagccgctattagaatggaaagaactggtgatgatctccctgactgtcgctccgattccttggacaaaaagccccatcgactttgtgttgcttggttgcctggtcaaaaagctcttcattgttctgtcactgttgctcagaagcaggttgactggattttttttatgttttttgtcagacttctgttgtaaattaaattgtgggtcatctgttcgacccagaaatgacattcataagggctagtgtggtgacagaaaattgaaggggatccatagaagagaatccacttgctattcaattttgaatagcaagtggattctcttcatggatctattttaatttctcggtcaccaaatcagtcctaaatgtttgagattgccccatattacatttatgtgttctttgacgcttgttc

SEQ ID NO: 203564 - DNA, 2493 bp, Zea Mays
ccgcccccacccccgcgccttcgtcgtcaaggccggggttcctgcggccgcgtctccctcccctcgcccgtacccacacttgattaacgtgtcagctcgctaccggaggccctcgccaactcgactcgtactcccgttcccggcggcgatccggccggcaccggaaccctagggttccaacgaagcaggaatgatgagtcatcaacagcaaattgcccctcctagtaggggttctgtgaatggattcccccatctaaagctggatagggtgggtagtggaaggcatgaaagtaaaatcgtgaggtcatcatctggcggttttaccaattcaggaaatgacatcaaactagggcatggaagccattcgagggaccgactaatctatgttctaacacaacttattgggcatcatgtcaacgtgcatgtgaaaaatggctctataatatctggaattttccatgcaacaaactctgacaaagacttcggagtagtcttaaaaatggctcaggtcataaaggatggttctgccagaggacaaagatttgcttctgatgttgtaaagaaacctgagactatgataataccagcaagggagcttgtacaagtttttgccaaggatgtagcacttggcggtgatgagctgccaaaaggtcctggtcatgacaaaaggaaggacttgctgattgattctgccatttcccgctctcattaccttgaagagagggaacttgagcgctgggcaccagatgaaggagattcagagtgtatcgaactggagaagtatgacagaaagggaaataggagctgggatcagttcgaaaccaatgcagccttgtttggggtaaagagtacattcaatgaagaaatttataccacaaagcttgagagaggtcctcatatgagagagcttgaaaagcatgcttcgagaatagctagagaaatagaaggagaagataccaaagatattcatcttgcagaggagagaggcttattcctgggtgatgacttggaccatgatgaagagataaaatattcagcagtgcgtagagacaccgataacagcaagtacaagccaccatttactaatgtcccaagcagtacataccaagttgatttgtttaacaggacagtcaatattgttcccaaggatttgctgggatgttcatcaacaatggatgaagaatcatcatcccacatatttgatgatattgatgcatctgccactattcaaaccaatagcgttagacagccaacatctgattaccttccagatagactctcgtccaatgatgaaaacaggttggacagaaagctgagcaaagggagtaatgaaaatatggataagagaaagttgcaacctgagaataatttatctgatggtgcaagacctcttatttctgaagggtcggatgggccaccctcaagttcatatgcatatgaaccctcatcttctggccaaggattcaaatctccagaaacacctgatttgacagtatctgtcaaacatccttctaagacggaacatgtgattaactctcaaagacctggtagttcaacatcgtcaacatcagagcgcattgctgcaaactcagctgcgagtgctcttggcttgtcaccaagctcttcaataggatcccttacctctgaaaaatcaactttgaaccctaatgctaaggaattcaagctaaatcctaatgccaagagtttcactccgtcagcatctttgaggccaccacaccctgcatcatctgatgcatcatattactatactaataacattccagcagcaccacttggacctggtttgccagtgggcatggggttcccaccggcatatggcacccagcctgtcatgtataatgctcaacctggagcatcacagcagggttacatgcatcctgttggtctacagcagtatgggcagcagatgatgatgggaggagggcagaatcgtcctgtttattattatgcgcctgagatgcaacaatacagaggaagaaacttctagatatactattttgaactgctgctaggtgaaagtcacaacaatccccacaagtgggataatgacccggcaaaagccgctattagaatggaaagaactggtgatgatctccctgactgtcgctccgattccttggacaaaaagccccatcgactttgtgttgcttggttgcctggtcaaaaagctcttcattgttctgtcactgttgctcagaagcaggttgactggattttttttatgttttttgtcagacttctgttgtaaattaaattgtgggtcatctgttcgacccagaaatgacattcataagggctagtgtggtgacagaaaattgaaggggatccatagaagagaatccacttgctattcaattttgaatagcaagtggattctcttcatggatctattttaatttctcggtcaccaaatcagtcctaaatgtttgagattgccccatattacatttatgtgttctttgacgcttgttc

SEQ ID NO: 203565 - DNA, 2507 bp, Zea Mays
ccgcccccgcccccacccccgcgccttcgtcgtcaaggccggggttcctgcggccgcgtctccctcccctcgcccgtacccacacttgattaacgtgtcagctcgctaccggaggccctcgccaactcgactcgtactcccgttcccggcggcgatccggccggcaccggaaccctagggttccaacgaagcaggaaattaggaatgatgagtcatcaacagcaaattgcccctcctagtaggggttctgtgaatggattcccccatctaaagctggatagggtgggtagtggaaggcatgaaagtaaaatcgtgaggtcatcatctggcggttttaccaattcaggaaatgacatcaaactagggcatggaagccattcgagggaccgactaatctatgttctaacacaacttattgggcatcatgtcaacgtgcatgtgaaaaatggctctataatatctggaattttccatgcaacaaactctgacaaagacttcggagtagtcttaaaaatggctcaggtcataaaggatggttctgccagaggacaaagatttgcttctgatgttgtaaagaaacctgagactatgataataccagcaagggagcttgtacaagtttttgccaaggatgtagcacttggcggtgatgagctgccaaaaggtcctggtcatgacaaaaggaaggacttgctgattgattctgccatttcccgctctcattaccttgaagagagggaacttgagcgctgggcaccagatgaaggagattcagagtgtatcgaactggagaagtatgacagaaagggaaataggagctgggatcagttcgaaaccaatgcagccttgtttggggtaaagagtacattcaatgaagaaatttataccacaaagcttgagagaggtcctcatatgagagagcttgaaaagcatgcttcgagaatagctagagaaatagaaggagaagataccaaagatattcatcttgcagaggagagaggcttattcctgggtgatgacttggaccatgatgaagagataaaatattcagcagtgcgtagagacaccgataacagcaagtacaagccaccatttactaatgtcccaagcagtacataccaagttgatttgtttaacaggacagtcaatattgttcccaaggatttgctgggatgttcatcaacaatggatgaagaatcatcatcccacatatttgatgatattgatgcatctgccactattcaaaccaatagcgttagacagccaacatctgattaccttccagatagactctcgtccaatgatgaaaacaggttggacagaaagctgagcaaagggagtaatgaaaatatggataagagaaagttgcaacctgagaataatttatctgatggtgcaagacctcttatttctgaagggtcggatgggccaccctcaagttcatatgcatatgaaccctcatcttctggccaaggattcaaatctccagaaacacctgatttgacagtatctgtcaaacatccttctaagacggaacatgtgattaactctcaaagacctggtagttcaacatcgtcaacatcagagcgcattgctgcaaactcagctgcgagtgctcttggcttgtcaccaagctcttcaataggatcccttacctctgaaaaatcaactttgaaccctaatgctaaggaattcaagctaaatcctaatgccaagagtttcactccgtcagcatctttgaggccaccacaccctgcatcatctgatgcatcatattactatactaataacattccagcagcaccacttggacctggtttgccagtgggcatggggttcccaccggcatatggcacccagcctgtcatgtataatgctcaacctggagcatcacagcagggttacatgcatcctgttggtctacagcagtatgggcagcagatgatgatgggaggagggcagaatcgtcctgtttattattatgcgcctgagatgcaacaatacagaggaagaaacttctagatatactattttgaactgctgctaggtgaaagtcacaacaatccccacaagtgggataatgacccggcaaaagccgctattagaatggaaagaactggtgatgatctccctgactgtcgctccgattccttggacaaaaagccccatcgactttgtgttgcttggttgcctggtcaaaaagctcttcattgttctgtcactgttgctcagaagcaggttgactggattttttttatgttttttgtcagacttctgttgtaaattaaattgtgggtcatctgttcgacccagaaatgacattcataagggctagtgtggtgacagaaaattgaaggggatccatagaagagaatccacttgctattcaattttgaatagcaagtggattctcttcatggatctattttaatttctcggtcaccaaatcagtcctaaatgtttgagattgccccatattacatttatgtgttctttgacgcttgttc

SEQ ID NO: 203566 - DNA, 2504 bp, Zea Mays
ccgcccccgcccccacccccgcgccttcgtcgtcaaggccggggttcctgcggccgcgtctccctcccctcgcccgtacccacacttgattaacgtgtcagctcgctaccggaggccctcgccaactcgactcgtactcccgttcccggcggcgatccggccggcaccggaaccctagggttccaacgaagcaggaaattaggaatgatgagtcatcaacagcaaattgcccctcctagtaggggttctgtgaatggattcccccatctaaagctggatagggtgggtagtggaaggcatgaaagtaaaatcgtgaggtcatcatctggcggttttaccaattcaggaaatgacatcaaactagggcatggaagccattcgagggaccgactaatctatgttctaacacaacttattgggcatcatgtcaacgtgcatgtgaaaaatggctctataatatctggaattttccatgcaacaaactctgacaaagacttcggagtagtcttaaaaatggctcaggtcataaaggatggttctgccagaggacaaagatttgcttctgatgttgtaaagaaacctgagactatgataataccagcaagggagcttgtacaagtttttgccaaggatgtagcacttggcggtgatgagctgccaaaaggtcctggtcatgacaaaaggaaggacttgctgattgattctgccatttcccgctctcattaccttgaagagagggaacttgagcgctgggcaccagatgaaggagattcagagtgtatcgaactggagaagtatgacagaaagggaaataggagctgggatcagttcgaaaccaatgcagccttgtttggggtaaagagtacattcaatgaagaaatttataccacaaagcttgagagaggtcctcatatgagagagcttgaaaagcatgcttcgagaatagctagagaaatagaaggagaagataccaaagatattcatcttgcagaggagagaggcttattcctgggtgatgacttggaccatgatgaagagataaaatattcagcagtgcgtagagacaccgataacagcaagtacaagccaccatttactaatgtcccaagcagtacataccaagttgatttgtttaacaggacagtcaatattgttcccaaggatttgctgggatgttcatcaacaatggatgaagaatcatcatcccacatatttgatgatattgatgcatctgccactattcaaaccaatagcgttagacagccaacatctgattaccttccagatagactctcgtccaatgatgaaaacaggttggacagaaagctgagcaaagggagtaatgaaaatatggataagagaaagttgcaacctgagaataatttatctgatggtgcaagacctcttatttctgaagggtcggatgggccaccctcaagttcatatgcatatgaaccctcatcttctggccaaggattcaaatctccagaaacacctgatttgacagtatctgtcaaacatccttctaagacggaacatgtgattaactctcaaagacctggtagttcaacatcgtcaacatcagagcgcattgctgcaaactcagctgcgagtgctcttggcttgtcaccaagctcttcaataggatcccttacctctgaaaaatcaactttgaaccctaatgctaaggaattcaagctaaatcctaatgccaagagtttcactccgtcagcatctttgaggccaccacaccctgcatcatctgatgcatcatattactatactaataacattccagcagcaccacttggacctggtttgccagtgggcatggggttcccaccggcatatggcacccagcctgtcatgtataatgctcaacctggagcatcacagcagggttacatgcatcctgttggtctacagtatgggcagcagatgatgatgggaggagggcagaatcgtcctgtttattattatgcgcctgagatgcaacaatacagaggaagaaacttctagatatactattttgaactgctgctaggtgaaagtcacaacaatccccacaagtgggataatgacccggcaaaagccgctattagaatggaaagaactggtgatgatctccctgactgtcgctccgattccttggacaaaaagccccatcgactttgtgttgcttggttgcctggtcaaaaagctcttcattgttctgtcactgttgctcagaagcaggttgactggattttttttatgttttttgtcagacttctgttgtaaattaaattgtgggtcatctgttcgacccagaaatgacattcataagggctagtgtggtgacagaaaattgaaggggatccatagaagagaatccacttgctattcaattttgaatagcaagtggattctcttcatggatctattttaatttctcggtcaccaaatcagtcctaaatgtttgagattgccccatattacatttatgtgttctttgacgcttgttc

SEQ ID NO: 203567 - DNA, 1529 bp, Zea Mays
cgccttcgtcgtcaaggccggggttcctgcggccgcgtctccctcccctcgcccgtacccacacttgattaacgtgtcagctcgctaccggaggccctcgccaactcgactcgtactcccgttcccggcggcgatccggccggcaccggaaccctagggttccaacgaagcagcgttatttctgggttccattataggaaattaggaatgatgagtcatcaacagcaaattgcccctcctagtaggggttctgtgaatggattcccccatctaaagctggatagggtgggtagtggaaggcatgaaagtaaaatcgtgaggtcatcatctggcggttttaccaattcaggaaatgacatcaaactagggcatggaagccattcgagggaccgactaatctatgttctaacacaacttattgggcatcatgtcaacgtgcatgtgaaaaatggctctataatatctggaattttccatgcaacaaactctgacaaagacttcggagtagtcttaaaaatggctcaggtcataaaggatggttctgccagaggacaaagatttgcttctgatgttgtaaagaaacctgagactatgataataccagcaagggagcttgtacaagtttttgccaaggatgtagcacttggcggtgatgagctgccaaaaggtcctggtcatgacaaaaggaaggacttgctgattgattctgccatttcccgctctcattaccttgaagagagggaacttgagcgctgggcaccagatgaaggagattcagagtgtatcgaactggagaagtatgacagaaagggaaataggagctgggatcagttcgaaaccaatgcagccttgtttggggtaaagagtacattcaatgaagaaatttataccacaaagcttgagagaggtcctcatatgagagagcttgaaaagcatgcttcgagaatagctagagaaatagaaggagaagataccaaagatattcatcttgcagaggagagaggcttattcctgggtgatgacttggaccatgatgaagagataaaatattcagcagtgcgtagagacaccgataacagcaagtacaagccaccatttactaatgtcccaagcagtacataccaagttgatttgtttaacaggacagtcaatattgttcccaaggatttgctgggatgttcatcaacaatggatgaagaatcatcatcccacatatttgatgatattgatgcatctgccactattcaaaccaatagcgttagacagccaacatctgattaccttccagatagactctcgtccaatgatgaaaacaggtactatctcccatgatgaagtttctatttattgttgaccagtagctaaactcaatctagccagctgcatatcgatttagctttagttagggggtgtttgggactgctccaggttccagctccaacgtgttgtagtttataatttaaatttaaatagttaaaaaatatttttaatctaaagaatacatggaatgacctacctaaatgtcttac

SEQ ID NO: 203568 - DNA, 1195 bp, Zea Mays
atggccggcatatatggttgcattgagctgggccttgtgattctaatgttgttgcaaaaacgaaagggtgtgggtggatggttgggcggcatgcgcggtggggaagaggaagaggaagagaaagagagagggggagacatagcaggccgccttgagctggcataggatgcgacggtccggcaggggcagggctgggcggtcgacggaggccaattctttaacttccttcctccgtcgatcatccagcaccagcaggagaatcccgtcgaatcccccaacccaagggagcgcgcgcgtatgcctcctccagatccaaagcaacaagcaacagacagcgagggggcaccggggtccgccgcatgtgtgtggttcatggaggatcatgctttcctgcttactgcattagctcctgacgcgccaccctcccctcgcgttcattgatttctgttataattactcacattattattggtaaagaaagaaagggcacctcttctaatttgatgggcattccgttaccgtctcaacttcaacgtcaacaacaggtcttttcagcggctcgggcaaaaggcgacaagtcagtgcagagaagatagtgcttgatctaacccctctacaggaacagaggctgcaaagtctgaaggaaaggctaaatgtgccatatgacgaaactcggacagatcatcaagaatcgcttagggctctatggaatgcatcctttcccgatacagagctcactagcttagtttcagaacagtggaaagacatggggtggcagggcgtgaacccagcaactgatttcaggggctgtgggtttgtttcgctcgagaaccttttgttttttgcaagaacatacccggcttctttcaagaggctgatgctgaagcagcaaggaatgcgaactacatgggagtacccctttgcggtcgcgggtgtaaatatctcatacatgttgattcaactgctggagctcaactcaggtcacattgcaagtatagtatcaggcacatggtggacacagctggttgctgataactgctaaccgatgcgcaaccgtctcgtcccgttgcatgtatgcctgccttgtgctgccacccatgattgccctgcctgatcatcatccatataccagcacacagaacaagccaatttgcgccagaaccgtcatgtggtttcaaacagaaaaagaaagaaa

SEQ ID NO: 203569 - DNA, 1216 bp, Zea Mays
atggccggcatatatggttgcattgagctgggccttgtgattctaatgttgttgcaaaaacgaaagggtgtgggtggatggttgggcggcatgcgcggtcttttcagcggctcgggcaaaaggcgacaagtcagtgcagagaagatagtgcttgatctaacccctctacaggaacagaggctgcaaagtctgaaggaaaggctaaatgtgccatatgacgaaactcggacagatcatcaagaatcgcttagggctctatggaatgcatcctttcccgatacagagctcactagcttagtttcagaacagtggaaagacatggggtggcagggcgtgaacccagcaactgatttcaggggctgtgggtttgtttcgctcgagaaccttttgttttttgcaagaacatacccggcttctttcaagaggctgatgctgaagcagcaaggaatgcgaactacatgggagtacccctttgcggtcgcgggtgtaaatatctcatacatgttgattcaactgctggagctcaactcagtgcgccccgaagtctttgccagggattaacttcatcaaagtgttgacagaacacgaggatgcattcgacgtgctgtactgcatagcgttcgagatgatggacgcccagtggctagcaatgcgagcctcgtacatgcagttcaaagaggtgctggaggccacaaggcagcagctcgagagggagctctccctggaggatctcaatggcatccatgacctccctgcctgcaacctcttgtacaaatagtgctactggtagttagattatattactgggatgcagtcaaaggaaaatttgatcaggttacatcgtaaccagcatcatcagcctgtaaaaaagaaaaaggaaaagaaaaagagagaagggagacacacatctctggttgtcagtaattcacatacgccacagttttgcccaggatcgatccagcctacagtagggatacacacacaccacgaccacgtatatgtgaaaattgaattaagctggtcaaaaggttgtgtttgcgtttgcacgttttgcggtcatgtcatgtgaagaggaggcgcttgctgtgtgctttttgactggatccgcccgggagtataggccaactgctagctgccgatcgcatgcaatgaatgatcactaagcgcctgcaggcatcatcagacccttttgtggcttgtggattgtgtagatttc

SEQ ID NO: 203570 - DNA, 1516 bp, Zea Mays
tccctatttatttttatttatcgtgttttaattcgaaacttataaatattcgaaaacggagattagaataatcgggctgtcaggattgacttgctcagctcatatatccgtccagtcgtcacatattcacatgcatgcggtctttatatctctctccgcgctgcctcctcgcctcacagagacgttcgccaacgccaaaccaatctcgctcgatcgctacgtctacgtgcagtgcagtgcggggaccgacaacaatcaccatatgggcaactccatgggcgggaagcggcggagggcgagggtgatgacggtggacggcaccacgtacaagtaccgcgcccccgcggcggccggggacgcgctgcgcgagcacccgggcaagggcaaccacctgctggagtcggaggaggtgcggcgactgggcctgcgcgcgcggccgctggacccggacgcgccgctcaagcccgggaagctctacttcctggtggagctgcctccgccgtcgtcggccgcccaccaccatcgccgggcccgggcgccgcagcgcacgtggtccggcgcgctccactacggcgccgtggccggggccggggagcggctggagagcctgatgctggcgcggcggtcggcgtccgacgtggcggcgtcgtcgtccgtcggcgacggcggcgccctgcgcctgcgcgtgcgcctccccaaggccgacgtccagcgcctcgtcgacgacagccgcgacgccgccgacgccgccgagaggatcatgcagctctgcgtcgcccgcgaccagcagcgccgccaccggtccgcgcccgccacgcccctcgccgtgcccgtgcccccggcggtcgtcagcgtcacctcgacgtccagctcgcgcaaagatgatggctccggcggtagcaacaagcccgcggcggcaacaaccggcaagaaagagaaacgggcgaggttcgtgacggtgccggacgagatcatcggcttctgaatccggttcgccggccgatatatatgctagctgcagcatgatgcgtgcgtgcgcgcaaaagagatggccagatgggtgtgagtaaattaagcgtcaggccggccggggaacatgagaagaagctgttgagtttgtgatccaaattctgaagaaggcggccaagttggcgagcgaagcggaggcccgtcgccgggaggcttgggccggagcgcagcgaggccaactggccttcccgaggcccagggacgcctggggggtgcggggggcggagccccccgcggtacggatcgttttagggtttcacctctataaatatctttgtaagccgcaggagatatccatctctctattgtaaatctcctgcgatctgtaaccacccaaaaatagtgagaagttgccggccggcgcccgtggttttttccccttcactttggaggggttttccacgttaaatccgtgtcttctctgtgattgatcctatttgtgtcgcatttatttataacagaagctgcatgtgaatgccttcctgtc

SEQ ID NO: 203571 - DNA, 2184 bp, Zea Mays
acagaacggacggaaaattgacgacctctcccgttccggcggccgaccgtgcacgatcgtctgcctgccctgctcacccacttgccgtcgcaccggctccgttccttctgccccactaccgccatcccaaccggcaagcgcgccaccgccttctccaccctcgcccaccttgctgccgcagtcgcccataccgctaccgcgcccacgcccgcctcgagggcccgacgccagaggggctgccctcgatctgaccccacggggtaggatggacaaagggaaatcggtggtggccgagctggcggcgtcgttcagcgatgtccgtgtcacgccgcgccagaaccccaagaccaagagcttcctaccgtcgccctccttctcgttatctccaaatattgacttcaaaattgtacttcagattcttcctcgaagaaaggtaaacctcagaaattggtcagcttgtgccttggcacccttggtcagcatcttgaagatatcatcactgatatttcagaatttgctgccttatttccaccccacataaagttgacaattatgtctattgcaaggaggaggaggctcctgaatgatgaagttttgacttctcttgctgaaagttcctgggaaatcctagatatatctggatctgatgtaactgatgctggtttggctactgtagcgaatgtttgtagtaatttacgagcagttgatattagtcgctgtgaaaaagttactacttctggtgtgtctgagattgtatgccactgcccgtccttggagatattgagatgtggaggctgtccaagaagtgaagtaacggcacggaggtgcttggatctcttgaaacccaaattgaataatcttgaagaggactcatgggaggaacttaatacactagatataggaggtggtgcggaatccttaaaatggcttgtttggccgaagatagatgataactcaaaggagactttagctgctgaatgccctcgtgttactgtcaacccacagccatcgctgtttgacctctcaggatccaaagtcccagttgaagcactggcaagcgtaccgctggaccattccatagttgaggatattgatcccaagacatgggctgtttctgctgctcctcgaagacctgttgctcctcccaatccaaatgctccccctgaaataccgatagcggaaaggttcaggctggcctatgtggagagggaagcaaggctggcacccaagagggccaaacgggaaaggcagcagcggcgccgagctgaaagggactacatgatgaatgacatcgacgcgaggtcgatggcacttgctgctcaagcaagcagaaacctgcgcaagagctgatagcgaactttgcttggcttggcttggcttcttgtttatgctgtttgttgtatgcatatctcaatagttgtcaaacacaatgtaaacatagcagttttgtattgggctatagcagtggcgtttacactttcatgtactactacaaaaaagtctaaatgtgaatacactcggtgcaaggaaagcgtgccttcattgggtcgcgatgaattagattatattcgtatcctgcttgtctgcatatcatattatatcctgaagtgcctactgtcggattagcgtctttggttgtgtgggcgtgtcacctggataggctgagcgcatgcaaaatagaacaagcctaactcatttttagaattaagtactccgtctcaaattaatattcatttttacccttttagtagatttatatattaatgtatatgttctatatatgtttaccttcgttatcattcatataaatatagacatactatattagaacggagggagtatttaataagacttgttgtaacttaacccattgttacaatagctagagccgatcaaactaaaaaaatagcgtcgctgatttttagtttcatttagaaatattatataaaatattagtcgttttaactctttatttatgttatgtttaaatggatgataaatctagacacatatataaaacaaatatattaattattgtatgaatcaactaaaaaggtaaaacgaattttattttaggacgtagagagtgcattaattcttatttttgcttttgcttttatcccctccgtcttagaaagatatttataattagattatgaaatagtaatgttccacatgtgtaag

SEQ ID NO: 203572 - DNA, 3389 bp, Zea Mays
cagaacggacggaaaattgacgacctctcccgttccggcggccgaccgtgcacgatcgtctgcctgccctgctcacccacttgccgtcgcaccggctccgttccttctgccccactaccgccatcccaaccggcaagcgcgccaccgccttctccaccctcgcccaccttgctgccgcagtcgcccataccgctaccgcgcccacgcccgcctcgagggcccgacgccagaggggctgccctcgatctgaccccacggggtaggatggacaaagggaaatcggtggtggccgagctggcggcgtcgttcagcgatgtccgtgtcacgccgcgccagaaccccaagaccaagagcttcctaccgtcgccctccttctcgttatctccaaatattgacttcaaaattgtacttcagattcttcctcgaagaaaggtaaacctcagaaattggtcagcttgtgccttggcacccttggtcagcatcttgaagatatcatcactgatatttcagaatttgctgccttatttccaccccacataaaggtatctttatgcatcaatatcttttatttggttgtcaatttgcctcagtgtcgaataaaatattcatatattatactccgtctgtctcaatttataattcatttgaaatttttgtaacaagtttgaccggttcgtcttattcttttatttttgcgaaaaatgaaaaattcaaagccgtatctaaagtatattatgtggtaaacgatatcacagtaaaagttaataacaattatgttttttttaataatactaggcagtcaaacttatggtaaaaaagtcaaacgaattataaattggaatggaggaagtataaggttttttattgttagatagagtttactttttaaggtggaagcccatttcattgccgtggtggtgttcacaaactgaaaagagaagttgatgttcttgttagttctaagttcatcggatggctcccaacactgattagtttgtttatgaaatactctcctttcttccagttgacttgtgagttgtaactcttgcttcaaagtacacatatagagggcattcatcccaaagaagtcaccattaacattttttgtttgattgctgttgagtttgcatttaaaagtttggaagtagcatatattagaatatacaatgctcatattaacatggttctctgaacttagctagagctttgctgttcgctagcgaagagccgaagagttgcagttttgggaggctggccagggcattatctacttctttgcccatgagctacttgagaggcatggtcatgttgtttttcttgtaataggtgtgcatgttttgattgaacctctagatcaaggtgccgtggtgtgtggttgtatgggttcttaaccttttctttcttaatataatgatatgttggttcctgcatgtttgaaaaaaatggatagtaacattaatctcagaaaaacataggaatggatagtaaggaactgttaaaacaaatggttgatgtgtgacatgtactaaggctctctagcattatgcatggccttcttgtaccactgttgttagcaagttgacctcaagcttttcgtcagtatttttaaggttttgaagttaccaggtccagtaaatgcaaaacagcaactgttgatttagttcatatactgacatctgatgtctacgtgtacttatgcatgttattgtgagttagtgacaattgagtttatttgttatatgatacagttgacaattatgtctattgcaaggaggaggaggctcctgaatgatgaagttttgacttctcttgctgaaagttcctgggaaatcctagatatatctggatctgatgtaactgatgctggtttggctactgtagcgaatgtttgtagtaatttacgagcagttgatattagtcgctgtgaaaaagttactacttctggtgtgtctgagattgtatgccactgcccgtccttggagatattgagatgtggaggctgtccaagaagtgaagtaacggcacggaggtgcttggatctcttgaaacccaaattgaataatcttgaagaggactcatgggaggaacttaatacactagatataggaggtggtgcggaatccttaaaatggcttgtttggccgaagatagatgataactcaaaggagactttagctgctgaatgccctcgtgttactgtcaacccacagccatcgctgtttgacctctcaggatccaaagtcccagttgaagcactggcaagcgtaccgctggaccattccatagttgaggatattgatcccaagacatgggctgtttctgctgctcctcgaagacctgttgctcctcccaatccaaatgctccccctgaaataccgatagcggaaaggttcaggctggcctatgtggagagggaagcaaggctggcacccaagagggccaaacgggaaaggcagcagcggcgccgagctgaaagggactacatgatgaatgacatcgacgcgaggtcgatggcacttgctgctcaagcaagcagaaacctgcgcaagagctgatagcgaactttgcttggcttggcttggcttcttgtttatgctgtttgttgtatgcatatctcaatagttgtcaaacacaatgtaaacatagcagttttgtattgggctatagcagtggcgtttacactttcatgtactactacaaaaaagtctaaatgtgaatacactcggtgcaaggaaagcgtgccttcattgggtcgcgatgaattagattatattcgtatcctgcttgtctgcatatcatattatatcctgaagtgcctactgtcggattagcgtctttggttgtgtgggcgtgtcacctggataggctgagcgcatgcaaaatagaacaagcctaactcatttttagaattaagtactccgtctcaaattaatattcatttttacccttttagtagatttatatattaatgtatatgttctatatatgtttaccttcgttatcattcatataaatatagacatactatattagaacggagggagtatttaataagacttgttgtaacttaacccattgttacaatagctagagccgatcaaactaaaaaaatagcgtcgctgatttttagtttcatttagaaatattatataaaatattagtcgttttaactctttatttatgttatgtttaaatggatgataaatctagacacatatataaaacaaatatattaattattgtatgaatcaactaaaaaggtaaaacgaattttattttaggacgtagagagtgcattaattcttatttttgcttttgcttttatcccctccgtcttagaaagatatttataattagattatgaaatagtaatgttccacatgtgtaag

SEQ ID NO: 203573 - DNA, 2135 bp, Zea Mays
gccatcgctagctcttactactacggtcctcgtcaatcctcatataagcataggctgatgcgtgcagcgtgctagtggaaggctagctgtctaaaattttcagttcaccatgaggtcaccggctgctccggggccttctcacgattccctcgactcatcaccgccggcgcctggttttcgtagttaccagcagacaaaactggcggagcttgatctggattcatccttgtcgccggccaccgcggcgccaggttcgcagcctactccatcggagtcgccgctgccagctccgacaccaacacctgcgcccgcggcgacagggctgctgataccaataccagcgcggccagtgcttgctccatattcccagccggcgtcttcatcgggttcacctgccgacaagtcagtggcgggcattgctgctggctcagctgctgcgggcgcccttctcatcgtgctactggtagcagttggtttgtatgtggcgtcgcctatttggaagaggcgcactgggcgtgaccgcaggggagcaggcagctccggtggcggcggtgcctcacaacatgaatcgcagaaacgccactctgctgttcaaatcgaggtcgaagtgacgccgccgccaacagcgtcatcatcgtcctgggctacttccagagacagccacaagccggacacgcacggcgacggagcgggaccgcgcgtgcaggtgcagcccgtgcctggagctggaggtggcgactacgaggtccggtttagaggcgcgttcacctacgagcagctggccgccgcgacggacggcttctcggagtccagcctcgtcgggcgcggcgggttcggcgacgtgcacgtcggcacggtggacggcgccgcggtggccgtgaagcggctgcgggcagggagccagcagggggaccgggagttccaggcggagctgcggatcatcagccgcgtgcaccaccgcaacctcgtctcgctcgtcggctactgcgttggcgacggcggccagcgcctgctcgtctacgagttcgtgcccaacttgacgctgcaccaccacttgcacgcattcagcacaacaggggaggttgaaacagtactcggttggccgactagatggaaaattgctgttggagctgcaaaaggcttggcctaccttcatgaggactaatcatccaccgcgacatcaaggcagccaacattttgcttgaccctgacttcaaccccaaggtttctgattttggtatggcaaaattcgtacctagtagaggggatactcacattgcaacaaggatcgttggaactattggatacctcgcacccgagtacgccacatccggcaggcttagcgagaaatccgacgtgttttcttttggcgtcgtgctgctggagctcgtcaccggcatgagcgccgccctgtcgtcggatcgggaagaaggcactctagtaggctgggcacggccgttgctcaccaaggccatggagctccacgactacgacgagctcgtcgacccactgctgccgagcttcgacgccaagcagatggcgtgtctggtccggtgcgccgcggccgcggtcagcacgtcggcacgccaccgaccgcggatgagccagatcgtcaagcacttggagggcgacgcctctacagagcccttgggtcagactggttccagtcacgggcccggcggggacacttcggcccagtttcatagctacagcaagataagggcgtcgagaagctcggacgcgacgcgagggcattgggtcaccgttctgagcccaatgcatggcacggtccctagtgatttagtacgacacggtcataattcaaatagtgccactgcccataagacacggatctagaattggccgccacacatgtggctcaaaagtgtggcgcggtgtggcggcttaggcgccacaccaaacacgcccctaatgtcgtgattgagccaccaccctggcacgatgagctgacataagtataacacaattaattggccgatacggttaggcatggtttataccaaccggtggtatatagatttgattgtgatatatacatgtaattgtaaattattatttatcataattttaaacataatgaattcactttacaatggtataagtattcaagtttt

SEQ ID NO: 203574 - DNA, 2167 bp, Zea Mays
gccgattcggaacggatccattgccatcgctagctcttactactacggtcctcgtcaatcctcatataagcataggctgatgcgtgcagcgtgctagtggaaggctagctgtctaaaattttcagttcaccatgaggtcaccggctgctccggggccttctcacgattccctcgactcatcaccgccggcgcctggttttcgtagttaccagcagacaaaactggcggagcttgatctggattcatccttgtcgccggccaccgcggcgccaggttcgcagcctactccatcggagtcgccgctgccagctccgacaccaacacctgcgcccgcggcgacagggctgctgataccaataccagcgcggccagtgcttgctccatattcccagccggcgtcttcatcgggttcacctgccgacaagtcagtggcgggcattgctgctggctcagctgctgcgggcgcccttctcatcgtgctactggtagcagttggtttgtatgtggcgtcgcctatttggaagaggcgcactgggcgtgaccgcaggggagcaggcagctccggtggcggcggtgcctcacaacatgaatcgcagaaacgccactctgctgttcaaatcgaggtcgaagtgacgccgccgccaacagcgtcatcatcgtcctgggctacttccagagacagccacaagccggacacgcacggcgacggagcgggaccgcgcgtgcaggtgcagcccgtgcctggagctggaggtggcgactacgaggtccggtttagaggcgcgttcacctacgagcagctggccgccgcgacggacggcttctcggagtccagcctcgtcgggcgcggcgggttcggcgacgtgcacgtcggcacggtggacggcgccgcggtggccgtgaagcggctgcgggcagggagccagcagggggaccgggagttccaggcggagctgcggatcatcagccgcgtgcaccaccgcaacctcgtctcgctcgtcggctactgcgttggcgacggcggccagcgcctgctcgtctacgagttcgtgcccaacttgacgctgcaccaccacttgcacgcattcagcacaacaggggaggttgaaacagtactcggttggccgactagatggaaaattgctgttggagctgcaaaaggcttggcctaccttcatgaggactgtcatcccagaatcatccaccgcgacatcaaggcagccaacattttgcttgaccctgacttcaaccccaaggtttctgattttggtatggcaaaattcgtacctagtagaggggatactcacattgcaacaaggatcgttggaactattggatacctcgcacccgagtacgccacatccggcaggcttagcgagaaatccgacgtgttttcttttggcgtcgtgctgctggagctcgtcaccggcatgagcgccgccctgtcgtcggatcgggaagaaggcactctagtaggctgggcacggccgttgctcaccaaggccatggagctccacgactacgacgagctcgtcgacccactgctgccgagcttcgacgccaagcagatggcgtgtctggtccggtgcgccgcggccgcggtcagcacgtcggcacgccaccgaccgcggatgagccagatcgtcaagcacttggagggcgacgcctctacagagcccttgggtcagactggttccagtcacgggcccggcggggacacttcggcccagtttcatagctacagcaagataagggcgtcgagaagctcggacgcgacgcgagggcattgggtcaccgttctgagcccaatgcatggcacggtccctagtgatttagtacgacacggtcataattcaaatagtgccactgcccataagacacggatctagaattggccgccacacatgtggctcaaaagtgtggcgcggtgtggcggcttaggcgccacaccaaacacgcccctaatgtcgtgattgagccaccaccctggcacgatgagctgacataagtataacacaattaattggccgatacggttaggcatggtttataccaaccggtggtatatagatttgattgtgatatatacatgtaattgtaaattattatttatcataattttaaacataatgaattcactttacaatggtataagtattcaagtttt

SEQ ID NO: 203575 - DNA, 1502 bp, Zea Mays
gattcatttccgaacaagacgcggccaagaagcaccaccatcttgatgtcaacaccttgagggggcatactgactccgtcactgcacttgccttctccaatgacgcctgcaacctagttaccgtatgtgctgatggagccatcagggtattcaggatcgatgatacctctagcaagagcttcaagattcttaggataaacttgccagctggagcgcaccctacggctgttactttctcagaggggtcatcatctgttgttgtggcggcgcaggcgcttctgggatcatctctttatatgtatgcggatgttagcgctcctccaaccgcggaaaacaaactgcagggaaagctttctccacctgaaatcaagtggagtcaccccaagatacatggcaaggagtctgtgctcaaccttgcagcggcccgtgcaactcatgggtctggtgatgggagcactattatcatttcatgctcagaagcaactgatatcaaagtttggcatgggaagagtgggaaggagtttggtacagttgacaccaatcagttaaaaaataatatggctgacatatccccaaatggtcgcttcatagctgctgcggcttttactgctgatgtcaaggtgtgggagatagtttactcgaaggatggttcagtgaaggaggttaataaagttatgcaactcaagggtcataagagtgctgttacttgcttgtgctttgctcccaattctgagcaaattattactgcatccaaagatggttccattcgagtatggaacattaatgtaagataccaccttgatgaggatccaaaaaccttgagagttatgccaattccacttcatgactctaaaggttctgtttgccagtatgatcacatgacagtctctcctgatggtaaaattctggctgtaacaagtggatcaacgttgcaatggttacttgtggaaactggtgcagttttggatacagctgacaaagcacatgaaggtgatataactggcattgcttgggctccacggacaattcccaatggtggcgtgcatgtttttattttggcgactgctggtgtggacaaaaaggtgaaactttggacagctccagatgttggttcaacatgagtggtcgaggattgaatctgcataagacagctttgccaagggcacagaattgaagttttgttgcgtagagtttgagaggaggaagggaagggaggcctggctgttactgatgagaccccaatgcatcacgcaggcggcagccttggggctgtagtttcgctaccttttatacaataaactgaatgttgtctgcatttgtatttttttttctttccttcctttttactgttggaatgatctggctgtgtgatcaacataatttaagctgctgctgcttggaatagacgtcattttatttgtcaagcaaatgtgctgctttgcgcattgtttgacattatattgtttgataaagtgtgctaagtatgaaaatgccaaagcaag

SEQ ID NO: 203576 - DNA, 768 bp, Zea Mays
gaaaatctgctgcgagcaagatgaaggcggcgcctgctatctgccttcgctgtaagataccaccttgatgaggatccaaaaaccttgagagttatgccaattccacttcatgactctaaaggttctgtttgccagtatgatcacatgacagtctctcctgatggtaaaattctggctgtaacaagtggatcaacgttgcaatggttacttgtggaaactggtgcagttttggatacagctgacaaagcacatgaaggtgatataactggcattgcttgggctccacggacaattcccaatggtggcgtgcatgtttttattttggcgactgctggtgtggacaaaaaggtgaaactttggacagctccagatgttggttcaacatgagtggtcgaggattgaatctgcataagacagctttgccaagggcacagaattgaagttttgttgcgtagagtttgagaggaggaagggaagggaggcctggctgttactgatgagaccccaatgcatcacgcaggcggcagccttggggctgtagtttcgctaccttttatacaataaactgaatgttgtctgcatttgtatttttttttctttccttcctttttactgttggaatgatctggctgtgtgatcaacataatttaagctgctgctgcttggaatagacgtcattttatttgtcaagcaaatgtgctgctttgcgcattgtttgacattatattgtttgataaagtgtgctaagtatgaaaatgccaaagcaag

SEQ ID NO: 203577 - DNA, 729 bp, Zea Mays
atatataaacagcaataaacaaagctaaggaaattaaagaaaaacggtggactagaaacttccaaatcgaacggcacacaaaaatcacaacccggaaagggaccagcagcgcaaagagcagggtgttggcattgatcagacgcctgccatggcggatcagttcgtggattcggcgaacaatgtgatcattgaggaggtgaacaagggcctgaacccaggaatggtggttctgcttgtggttgcaagcttcctgctgctcttctttgtggggaactatgcgatgtatgtgtatgcgcagaagacgctcccgccaaagaagaagaagccggtgtcgaagaagaagctgaagagggaaaagctgaagcagggggtctctgcgccgggagagtaaacggccatgctgccgatcctcccgtccagagctcctattcacatgattattaaagaaaaaaatttatatatatataccagctggagccgtagtgttggagtaactttgttctgtagatgctctgtctttaatggtacatctgtattggagactttaatggcctgagccgagctagtatgcttcctgtttcgtacaagttcttgaaatgctggtgatggcgcatggctctagagaaaaactcaagggagctgagccagcgaaacatgatctacctctacctctagagttaccaactatatgcagttttaagagctgcagtagtattatttttggagtaa

SEQ ID NO: 203578 - DNA, 2598 bp, Zea Mays
cgcgtttcaggagcatatacacgctacgtggtgtgacgcttaacagcacggtatacgtggaggaaacggttactatatggccgggaaaaagttttatctttctttaacgcaagaaagaaggcagcaaagtcacacaattattcccccacgggtgaaaaatagaaaaatcaggagccggagaccacccgcgtgctctgctcacacatccttcagcagtcgtcgtcctcgttgataagcaggggaggtggatcactcgaacgaacctaataataagtgagcttccaggtcggggagagggaccgccggtggaaaaactttggaggcgcccaacttccaagatacccactagctccctcccagcctcccaccttgccctttccacccttcgctgatgctagaatgatgggatttttggagctctaagacaagtactactgatccttgcgcttcactcgccctcttgctccctgcgtgttcttgatttggcctcaaaatttgttgcttgttttctcgtgtttgaggtgacatctcggttctaaaaatctgccagatttcttctccctgtttgtatggacaaatttgggaacgaaccctagtctgtgtgtgaagcagccaaagtagtgttcttgcggagcaaagcaaagctaaagcggcagcagttgtacgcccatcttggattaaagcctctcaatttcaggattcggcacaagcacaataccatcaggtgaacaagagccatttggtcttgggcatggagaagcaatccagcacccggcatggtgccctagagaaattgaagagcttccgggggatagagaagcagagaagcttcaagttcttgtccatggagaagcagcagagcttcaaaaggaacaaggacagcccggggaagcggggtgacaccgcactccaccttgcggcgagggctggcagtgttgcacatgtccagaggatccttgcggagtgtgatccagagctgctggtggagttagctgcccgccagaatcaggacggtgagactgctttgtatgtgtctgctgagaagggccatgtcgaagttgtgtgtgagattttgaaggcttctgatgtgcagtcagctggactcaaggccagtaacagcttcgacgcattccatattgcggcaaagcagggccatttggatgtcttgaaggagctgttacatgccttcccctcactagcaatgacaacaaattctgtaaatgccacagctttggacactgctgcaactcagggccacattgacattgttaatcttctgctagaaacagatgcaagccttgctaggattgcaaaaaataatggaaagacagttttgcattcagcagcaagaatgggtcatgtggaggtggtaactgctctattaaataaggatccagggcttggtttcagaacagataagaagggacaaacagctctacacatggcttcaaaaggcctggcttcaaaaggccagaatgcagaaattctgctcgagttgttgaagcctgatgtctcagttatccatgtagaagacggcaaggggaatagaccattgcatgttgcaactcggaagggaaacaccattatggttcagaccctaatatcagttgaggggattgaaatcaacgcggttaatagagctggagagactgcttttgctattgcagagaaacaaggtaatgaagagctcgttaacatcctgagagaggctggtggagtaactgcaaaagagcaagtaaatcctcctaatccagcaaagcagcttaagcagacagtcagcgatatcaggcacgatgttcaatcacagatcaagcaaacacggcagaccaagatgcaattccagaaaatcaagaagagaatcgaaaagctccacatcggtgggctaaacaacgccatcaactccaacaccgtcatcatggtggccactctgggttcaatgtgctactgcattgtcgctcacaggatggaggagaagagcatgaggaggatcaggaggacctccacgagccagtcgtggtccatatcgatcgactccgaaacggagctgatgaacagcgagtacaagaagatgtacgccatttaggataggcaacggccatgcttgccatctgagtcctgtatatactggtacccaaagtccatggcattggattgactgagctatattttagtccgtagacatggcacctgtatgtaactgcagacagtctgcagcctccgcccacgaacgtagatagggtgtagccacctttttgttggcaaaatatgaacatttgccaagcacgatgcccctatcttatgctgtatttttgtgggtgcggcaatgaaaaccatgggattgtatctgtatagtagaatagtatggaataagttgaccttgtgtcaaaggttatgtggtcgtgcgtggatgctcttttgatgcgacattaggctggatggagtaggctgagggaaaagaaaagaaaaataacaatggtcacagatgacattttggacttggactggagcagactttgttgaccgttgtggttatgcggcatttgcagccgttctgtaaaaatgaaaatgcggagatgcctatgggctgaccgaaaattt

SEQ ID NO: 203579 - DNA, 2935 bp, Zea Mays
cgcgtttcaggagcatatacacgctacgtggtgtgacgcttaacagcacggtatacgtggaggaaacggttactatatggccgggaaaaagttttatctttctttaacgcaagaaagaaggcagcaaagtcacacaattattcccccacgggtgaaaaatagaaaaatcaggagccggagaccacccgcgtgctctgctcacacatccttcagcagtcgtcgtcctcgttgataagcaggggaggtggatcactcgaacgaacctaataataagtgagcttccaggtcggggagagggaccgccggtggaaaaactttggaggcgcccaacttccaagatacccactagctccctcccagcctcccaccttgccctttccacccttcgctgatgctagaatgatgggatttttggagctctaagacaagtactactgatccttgcgcttcactcgccctcttgctccctgcgtgttcttgatttggcctcaaaatttgttgcttgttttctcgtgtttgaggtgacatctcggttctaaaaatctgccagatttcttctccctgtttgtatggacaaatttgggaacgaaccctagtctgtgtgtgaagcagccaaagtagtgttcttgcggagcaaagcaaagctaaagcggcagcagttggattcggcacaagcacaataccatcaggtgaacaagagccatttggtcttgggcatggagaagcaatccagcacccggcatggtgccctagagaaattgaagagcttccgggggatagagaagcagagaagcttcaagttcttgtccatggagaagcagcagagcttcaaaaggaacaaggacagcccggggaagcggggtgacaccgcactccaccttgcggcgagggctggcagtgttgcacatgtccagaggatccttgcggagtgtgatccagagctgctggtggagttagctgcccgccagaatcaggacggtgagactgctttgtatgtgtctgctgagaagggccatgtcgaagttgtgtgtgagattttgaaggcttctgatgtgcagtcagctggactcaaggccagtaacagcttcgacgcattccatattgcggcaaagcagggccatttggatgtcttgaaggagctgttacatgccttcccctcactagcaatgacaacaaattctgtaaatgccacagctttggacactgctgcaactcagggccacattgacattgttaatcttctgctagaaacagatgcaagccttgctaggattgcaaaaaataatggaaagacagttttgcattcagcagcaagaatgggtcatgtggaggtggtaactgctctattaaataaggatccagggcttggtttcagaacagataagaagggacaaacagctctacacatggcttcaaaaggcctggcttcaaaaggccagaatgcagaaattctgctcgagttgttgaagcctgatgtctcagttatccatgtagaagacggcaaggggaatagaccattgcatgttgcaactcggaagggaaacaccattatggttcagaccctaatatcagttgaggggattgaaatcaacgcggttaatagagctggagagactgcttttgctattgcagagaaacaaggtaatgaagagctcgttaacatcctgagagaggctggtggagtaactgcaaaagagcaagtaaatcctcctaatccagcaaagcagcttaagcagacagtcagcgatatcaggcacgatgttcaatcacagatcaagcaaacacggcagaccaagatgcaattccagaaaatcaagaagagaatcgaaaagctccacatcggtgggctaaacaacgccatcaactccaacaccgttgtcgcggtgcttatcgccaccgttgcctttgccgccatattccagctccctggtaattttctggaggatatgagtcaggcacatggcccagacatgaccttggggcaagcatggatagccagtgagccagccttcataatcttcttggttttcgacgctctggctctcttcatctcgctcgcggtcgtcgtggtccagacgtctctgatcgtcgtcgaacagaaggccaagaagaagatggtcttcgtgataaacaagctgatgtggctcgcgtgcctctgcatctcggcggccttcatagcgctgacctacgtcgtcgtgggccgagacgacgagtggctggcctggtgtacgatggcgatcggcaccgtcatcatggtggccactctgggttcaatgtgctactgcattgtcgctcacaggatggaggagaagagcatgaggaggatcaggaggacctccacgagccagtcgtggtccatatcgatcgactccgaaacggagctgatgaacagcgagtacaagaagatgtacgccatttaggataggcaacggccatgcttgccatctgagtcctgtatatactggtacccaaagtccatggcattggattgactgagctatattttagtccgtagacatggcacctgtatgtaactgcagacagtctgcagcctccgcccacgaacgtagatagggtgtagccacctttttgttggcaaaatatgaacatttgccaagcacgatgcccctatcttatgctgtatttttgtgggtgcggcaatgaaaaccatgggattgtatctgtatagtagaatagtatggaataagttgaccttgtgtcaaaggttatgtggtcgtgcgtggatgctcttttgatgcgacattaggctggatggagtaggctgagggaaaagaaaagaaaaataacaatggtcacagatgacattttggacttggactggagcagactttgttgaccgttgtggttatgcggcatttgcagccgttctgtaaaaatgaaaatgcggagatgcctatgggctgaccgaaaattt

SEQ ID NO: 203580 - DNA, 2974 bp, Zea Mays
cgcgtttcaggagcatatacacgctacgtggtgtgacgcttaacagcacggtatacgtggaggaaacggttactatatggccgggaaaaagttttatctttctttaacgcaagaaagaaggcagcaaagtcacacaattattcccccacgggtgaaaaatagaaaaatcaggagccggagaccacccgcgtgctctgctcacacatccttcagcagtcgtcgtcctcgttgataagcaggggaggtggatcactcgaacgaacctaataataagtgagcttccaggtcggggagagggaccgccggtggaaaaactttggaggcgcccaacttccaagatacccactagctccctcccagcctcccaccttgccctttccacccttcgctgatgctagaatgatgggatttttggagctctaagacaagtactactgatccttgcgcttcactcgccctcttgctccctgcgtgttcttgatttggcctcaaaatttgttgcttgttttctcgtgtttgaggtgacatctcggttctaaaaatctgccagatttcttctccctgtttgtatggacaaatttgggaacgaaccctagtctgtgtgtgaagcagccaaagtagtgttcttgcggagcaaagcaaagctaaagcggcagcagttggtgaggatacaagagatacagaagggcttgttagattctgattcggcacaagcacaataccatcaggtgaacaagagccatttggtcttgggcatggagaagcaatccagcacccggcatggtgccctagagaaattgaagagcttccgggggatagagaagcagagaagcttcaagttcttgtccatggagaagcagcagagcttcaaaaggaacaaggacagcccggggaagcggggtgacaccgcactccaccttgcggcgagggctggcagtgttgcacatgtccagaggatccttgcggagtgtgatccagagctgctggtggagttagctgcccgccagaatcaggacggtgagactgctttgtatgtgtctgctgagaagggccatgtcgaagttgtgtgtgagattttgaaggcttctgatgtgcagtcagctggactcaaggccagtaacagcttcgacgcattccatattgcggcaaagcagggccatttggatgtcttgaaggagctgttacatgccttcccctcactagcaatgacaacaaattctgtaaatgccacagctttggacactgctgcaactcagggccacattgacattgttaatcttctgctagaaacagatgcaagccttgctaggattgcaaaaaataatggaaagacagttttgcattcagcagcaagaatgggtcatgtggaggtggtaactgctctattaaataaggatccagggcttggtttcagaacagataagaagggacaaacagctctacacatggcttcaaaaggcctggcttcaaaaggccagaatgcagaaattctgctcgagttgttgaagcctgatgtctcagttatccatgtagaagacggcaaggggaatagaccattgcatgttgcaactcggaagggaaacaccattatggttcagaccctaatatcagttgaggggattgaaatcaacgcggttaatagagctggagagactgcttttgctattgcagagaaacaaggtaatgaagagctcgttaacatcctgagagaggctggtggagtaactgcaaaagagcaagtaaatcctcctaatccagcaaagcagcttaagcagacagtcagcgatatcaggcacgatgttcaatcacagatcaagcaaacacggcagaccaagatgcaattccagaaaatcaagaagagaatcgaaaagctccacatcggtgggctaaacaacgccatcaactccaacaccgttgtcgcggtgcttatcgccaccgttgcctttgccgccatattccagctccctggtaattttctggaggatatgagtcaggcacatggcccagacatgaccttggggcaagcatggatagccagtgagccagccttcataatcttcttggttttcgacgctctggctctcttcatctcgctcgcggtcgtcgtggtccagacgtctctgatcgtcgtcgaacagaaggccaagaagaagatggtcttcgtgataaacaagctgatgtggctcgcgtgcctctgcatctcggcggccttcatagcgctgacctacgtcgtcgtgggccgagacgacgagtggctggcctggtgtacgatggcgatcggcaccgtcatcatggtggccactctgggttcaatgtgctactgcattgtcgctcacaggatggaggagaagagcatgaggaggatcaggaggacctccacgagccagtcgtggtccatatcgatcgactccgaaacggagctgatgaacagcgagtacaagaagatgtacgccatttaggataggcaacggccatgcttgccatctgagtcctgtatatactggtacccaaagtccatggcattggattgactgagctatattttagtccgtagacatggcacctgtatgtaactgcagacagtctgcagcctccgcccacgaacgtagatagggtgtagccacctttttgttggcaaaatatgaacatttgccaagcacgatgcccctatcttatgctgtatttttgtgggtgcggcaatgaaaaccatgggattgtatctgtatagtagaatagtatggaataagttgaccttgtgtcaaaggttatgtggtcgtgcgtggatgctcttttgatgcgacattaggctggatggagtaggctgagggaaaagaaaagaaaaataacaatggtcacagatgacattttggacttggactggagcagactttgttgaccgttgtggttatgcggcatttgcagccgttctgtaaaaatgaaaatgcggagatgcctatgggctgaccgaaaattt

SEQ ID NO: 203581 - DNA, 1228 bp, Zea Mays
gatgaaggtgtctatgcttgggttgcggcaaattatgctcttggaagacttggaggggatcctaacaaaaccgttggaataattgaacttgggggcgcttcagctcagcttacctttgtttctgatgaagtacttccacccaaactgtcatataattatacttttggtgaaacaacatacactctctataccaacagctttttaaactttggtcaaaatgcagctcaagactcattccatgaaatgctgaggtcaagaggctctttcaaaaatggtacacttgctgatccttgtgctcccagaggatattcacgcaatgaaggtgcttcaaggtcaacattagagaaccaaaaagtgccagtatcaacaatgtcacctgggatctacttttgtacctgagctgcgtggatacttcttgggaactgaaaatttatattttacttcaaaggtccattacatgtttcttttctccttttgcatgtcaaccttttcttctgactcttctaactcctgtgcattatgtgacagttctttggacttaagaagtcttcatcactatctgatttcatgtttgctggagaacaattttgcaaccagcatttgtcgagtcttagaaaaaggcatcctaataggtcagatgaggatttttcacggtattgcttctcgatggcatacattgtggctctactgcatgacagtcttggtgtaccactggatgacaagaggattgagtattcaaaccaggttggagacattcaggttgaatgggctctaggagctttcatcacactgatgcaaaatacgagtttaaagccattacacaccaccgcagaatcaacccatagcaatagaccattgtttgctgtgctgggaatgtttcttttatgtggagtactctttgtatcaagatggaggaagcccaagacgaaaatcatatacgacttagagaaaggccgatacatcataacacgcatcagctgacgctaaatcttgtgcagaagaactatatttatacgacatgaatagatgctgtgttgtgcaacaatgtacgagttcaattctttgtgtttttacctttaggtagcagagctgggtgggtggagcaggaagatagcgcatttgtgcgtatagaagaatgatgtgtagaacaaattgccatgtgttaattgaattatttgatgaataattatagttgctttgttcatctaatgaggtcgatatttctcac

SEQ ID NO: 203582 - DNA, 1674 bp, Zea Mays
cttttggtgaaacaacatacactctctataccaacagctttttaaactttggtcaaaatgcagctcaagactcattccatgaaatgctgaggtcaagaggtatttattttgccttactagtataggcagtctagacttcaccactcacctaagctttgtttttgagaccttgtggtgttcttttcctgtgtcattggggacatgcatttgtcctaggcacctaggcgtaactcgtaagtatgaccttgtgatgtcccatggtggtgggggcactcctggatgcctaaaaaacaatgcttgcaattataattaggaattcagtacctgatgtacaagggaactaaatctcacaaaatatatactctgaatgaagagttcattcacacgactagacactacttaatgaacaatgtgcgtataagtatttcttactacaattattttggtattctatgtaagtgcaaatgtacctggaccatagtttagggtatgagccatttcagcagtttgatgaagtggccacttgactgaaaattttctgaagtagttacttgttccattggcttattatatacttggtaactaaaaacagagtgtaagatgtgtgtgaaacaggaaggaattaataggtcgtgttttgtctgtggggctactaagtgctagtaattatcaagcgaagtatctcttcaagttcaccacccgcatttgcaggctctttcaaaaatggtacacttgctgatccttgtgctcccagaggatattcacgcaatgaaggtgcttcaaggtcaacattagagaaccagtatgttaataatgggactggaaactttacagagtgcatatcttcttcacaacttttactgcaaaaaggaaaggaaaagtgccagtatcaacaatgtcacctgggatctacttttgtacctgagctgcgtggatacttcttgggaactgaaaatttatattttacttcaaagttctttggacttaagaagtcttcatcactatctgatttcatgtttgctggagaacaattttgcaaccagcatttgtcgagtcttagaaaaaggcatcctaataggtcagatgaggatttttcacggtattgcttctcgatggcatacattgtggctctactgcatgacagtcttggtgtaccactggatgacaagaggattgagtattcaaaccaggttggagacattcaggttgaatgggctctaggagctttcatcacactgatgcaaaatacgagtttaaagccattacacaccaccgcagaatcaacccatagcaatagaccattgtttgctgtgctgggaatgtttcttttatgtggagtactctttgtatcaagatggaggaagcccaagacgaaaatcatatacgacttagagaaaggccgatacatcataacacgcatcagctgacgctaaatcttgtgcagaagaactatatttatacgacatgaatagatgctgtgttgtgcaacaatgtacgagttcaattctttgtgtttttacctttaggtagcagagctgggtgggtggagcaggaagatagcgcatttgtgcgtatagaagaatgatgtgtagaacaaattgccatgtgttaattgaattatttgatgaataattatagttgctttgttcatctaatgaggtcgatatttctcac

SEQ ID NO: 203583 - DNA, 1321 bp, Zea Mays
cgccacgatactcgctgtaatcatccctcccagcagccgaccgagagcaaggcggggctgtgcagcgtgaccggaggccgtctatcagtgaacagataaacagagaaagcggccacggttgagagttgagaggccacgaaccccaccaagattccacaaaactccatcaccagatccagaacccacttccacttcctctctcgtgttttcattttaggccagaataaactccagccacttcggcatgcgccgggaatttgattcttctgcctaaaatagtcacgctaccttccacctccccctactactctgactctccctcgtcttcttcgctaccaagatgatggcggaggcgtggacgccggtgctgttgccggcgacggcgccctgcttctggcagcaggacacgcactcggttttgtggcggagaggagacgcgtggacggcggaggagaacaagctgttcgagaaggacgtgggcgtcatcgaggccggcgggctcgtgccgttcccgcgctacagcggctcggtcccgccgccgtccgggttcgccctcgaggactggggcggcggcgaccgcgggttcaggcgcgcgcgcggctcggaggagatgcaggagcggaagaagggtgtcccctggacggaggaggagcacaagcttttcttgatggggctgaggaagtacgggagaggggactggaggaacatctcgcgcaagtacgtgacgacccggacgccgacgcaggtggccagccacgcgcagaagtacttcatccggctcagctccggcggcaaggacaagcggcggtccagcatccacgacatcaccaccgtcaacctcccaggcgacgccccgcgctcgtcgccgcccgcggccaccaccaacccctccgccggcgccctggtggtggacgtgaagcccttcgtgtgacgaggatgaagagtggcacagcctcgtcgtccagctgccagctcgcggcagctccgagcgactgcgttcatcgagaacaagacgccatgggcggcaatgcggcatccgtttcagttcagtgtacataattcggcaagtacagagcccaacaacttccacgtaaaagggtctcgcgaggtttttgtccgccagccattgctgcttgccgtacgtcgctgtagaagaaacctgaaacacggccagccacgatcacatgtgatgcgtttagggtttagtcactttagtgtgtgatgcttgcttgctcttgcagggtctcgcagtagtaggcactgagttggacgtccaccgaggaagaaggtatcatatgaaatctataaacaatactaaaat

SEQ ID NO: 203584 - DNA, 2315 bp, Zea Mays
cacaaaggccagtgaggagattgcacacctgtaaattccaagcaagtacgctctacaattttcacgaacatgggtttcattttagtattttactgttcatataggaaaacaaaaacaaaaaaagataggaaaacaaaaacaaaataaagaaaggaaaacgagtaaaaagatagccgtgccctagcttccattccgggcctcccgtcttcccgtcccttccagccagcgccgcttcatccttcgaaccccacgctaccgctcgtttatacggcagcgacgcctcccccgctcgcctcctctctcctcctcctcaaggctcaagcgaaggcgagcgcgagagaaagctcaagccacttcccaacccgctcccccctcgccgcgatttcctcacatggcagcgctgcgtctccgcgagtcactcgagaggaacagcccctcctcctgcttctccgacccctgtccctgcgccgccaacacgcgccgcccctgttccgatctcgccgcccccgccgctgggcccttctcgtccctccgcgtccatcgcccctgctcctgatccggctctcttcttcctcccttctcgcgccgtagattgcagccgcggctctgattctgctcccgccgtttgtctcgcggtcgcgggttcctgggagcttctgggttctggctccgtccctaaccggtgttgccatggggaagagcaagaagagcaaggcccgcggcggcggggacgacctgatcgacagcagcgacgccgacagcgtcggctcgtcgtccaccgcgctgtcggatctctccatctcgtacgccaccgagcacgtcaactcgcaggagttcgtcctcgacaagtacatcgacgcgctctacgagaagaggggatctacaagagaggcagcattggttaaactcgttgatgccttcgaaagttttatgctccatggccttgtggagaacaggtatgccactttgctgagtcaattcaacaattctgtcaaaaagggatctactaaggagttttttctggcatctcatgccattgggttactggctattacacttggtgctgggaacagttcacatgaaataatggaggagtcacatccccaactgtgtagggtgcttcaagcttggtccgatgcatcaaagatgatacctagtcatctttgaaagccatgtgggatgtgattcatccaaaatctggttcaaatgtgggaactgttcggaaacctagacctcctgtgttagcagctgctgtatctgcatggacgtttcttttgactactgttggttcatggaggataaatactgatagttggaaagagcccattgcatttctctctactcttttggaagcagatgatcgtgctgttagaatggctgctggtgaagcattggttttgtgctttgagctaaatctgcttgatgtttcttcttgtgaggatggtgatgttaacacagggggaactggtggttctaagaacaagcttttcctggatatgcaagcattaaaagccaaaatatcaggtctggcctcgaatctctctgctgaggctggggggaaaggtgcagataagaagaaccttactgaccaaagagacttgtttcaacgaatcttagattttgtcaagtatggtgactgccctgaagaatcaatcaagattgctggaaaacgtgatgttttaagggtgtcatcgtggtctgaattaatccagttgaatttcttaaagcggttcctggggaaaggctttctgaagcatgtgcaggagaatggacttctccaggatatctttgacattaaggttgacaaaactgaaaccttgtcgtccactgataagaaaatttttaggtccgaagaggaaaaagaaagagctctgagattaaacaaggaacgtcgtctagcccaggtaaggaagaatgccgtcatgttggatgagtaacaaggtcacgaggaagggaaaacaacatcgatttctgtatctcatttcatccgggcctttgtctctgcctgtgtaaactattacaggcacatcccattgtctttgcctttgtctttaaggatactggagttttatagtgcatctaaccgatatgcaagttcgtgcatattgaacgttagtatgatttgtgggaatagttaagttgatttggagtttagtatagtaagaactaaggttgattaaatgtaacgtatgtatgaaatgtaatgtaagtgtaatgatttatactggaggacgggtggtaacaaatttgaatagaatgatatcaattcctaatatgatagttggatctaaacaaacatgttttaacgttgtcag

SEQ ID NO: 203585 - DNA, 662 bp, Zea Mays
aaaggcttctcatcactgcgctaggatgggaggaggttctggaggaacttgcagtagaaattttggatgatcctgcccctaaaaggttatttctggcacgaggcaagctccaaaaactcctggtggaatttgtacctcctaaactaatactccagaagctcgtagaactcttcttgaagggaattcagactggcgtgaagagggaagtctactattggcatgcctactatgacaagaggttgcctgttggtgcaagtgctctgcttaaattggaagaattcgttgccaagttcatgagcatccaccggaagagcatgtcgcatgagcccaagattcctgaggtgccgcagtgaaacctggcagagcatgtcctcgtgcggttcggccgtgtcgaaatcccgtttgtggtggtggtttttctgttttatataattcaccttacgtgatcaactgtcatggtccatgtttttcttgttctatgtatatactatatggtacacatatatgctactactgagtacacaaatatgtccagccgaataaatgtctatacggctataccatctgtgttggcaatatcttgttgcaaaagtttgggagtggacgtataataatcttttgatttgaggtacgtgaattttggctatcagtttgttcttttc

SEQ ID NO: 203586 - DNA, 2631 bp, Zea Mays
aattgacttgtcaattgaaaggaaatcaactttggctctgcgactgggtgtttgaagaatgccatatgtttttccttgagggatttcaagtaataaagtatgctatctgcacagagcaacttagggcataataggcattctcgcaatgatgtttccacaaagcacaaaagtggctatgaaccttctgacacagaaactgagtggcatgaaagcccttggaacgatggagcattggcatcgaataggaatcgtcttcctaaagattctggtaggaatgaccaagttggtactaggaggcaaaacatatctcctaactgcacactagattatcatgctgagaaaacttcaaacttgagatacagtcgtactcctccaagggtcacagaacaaaggcgccatccttctccatttacagctgtgaagaatgaatcacgtaagaagagcagccggacgcctcccagatttcgttcttctatggaaacctttagtagatcatcaataaaggcaaggttttcccgcaatcgttcaatttctgcaccaaaattacggccacaagagaaggaacatcctgctagagctcctgcatttcctggcagtaaccctgtctcaacacatccagaaagagaagttgctgataatatagaagaagattcacatgcagaaaactgttcccaggagatcagtgaattgattgcaaatggcaagttacctaattccagatataatgagtatgcatttacgagcacagagtcgatacctgcaggtgatatcttcttctcccgtgattgcagggctccacttgagaaaacgtcaacaaagcttaacaatattgaccaatcatttacctctgactcaaatgtccatactgagaatgatggcactgttactcaaagtaatttgggccagccatcacaatttgtttcagctcggacaggtctttcgcgcacaactacgaaatccagttatgctactggtcgccattgccagatgagcaccaccaccactttgagtagcccatatagcaatggaaaattaagtggggagagtggaaagtttagtgaaatcactgggaaactagttggaggcgtcatgaaattcacatccagcaaggtgcaaaacgatacgtggcttccatgtatgactgggaaggcatgtcgaaaatcaagaacatcaaacaacaaaaaaaatgatgaatctgaatcaagtttcattcagaaggcacttgtcattgagaagattagacttttttgggctgataaatatcgtccacaaaatttaaatggatttacttgccacagggagcaagtccagcagcttaaacaatcggtctctgcagaattttgcccacatattattttcaaaggtcctccaggatcaggaaagagatctttgtgcagagctgtcctcactgaaatttttggcgattcatctttgaatgtctctcactatttgaagagctgcaatggccaggggtccatatctgtgcctattctcgtcccagtttcatccagcaataaccatgtggaactccacatgaggtttcaatcgaagaacgctagatatgctttgatgactctagcaaatgaaatgtctgataagtgtaaaatcactgagccaattgtgagaaagagctttaaagtgattgttctctatgatgttgataaagtcagccaaaataaccagcgtctgataaaatggataatagattcctcctctgatgcatgcaagataataatgacttgccaggatgaatctaatctcctagattctataaagagtcgttgcaagattatttcaattggtgtgcccagtacacgtgaggtggtagatatccttacctatacatcaagaaaagagagttttgatcttcctacaagttttgctactaccattgcgaatcaatccaggaagaacttgagggaggctatattggctctagaggcatgtaaagccaacaattatcccttcattgatggacaagctataccactaggatgggaggaggttctggaggaacttgcagtagaaattttggatgatcctgcccctaaaaggttatttctggcacgaggcaagctccaaaaactcctggtggaatttgtacctcctaaactaatactccagaagctcgtagaactcttcttgaagggaattcagactggcgtgaagagggaagtctactattggcatgcctactatgacaagaggttgcctgttggtgcaagtgctctgcttaaattggaagaattcgttgccaagttcatgagcatccaccggaagagcatgtcgcatgagcccaagattcctgaggtgccgcagtgaaacctggcagagcatgtcctcgtgcggttcggccgtgtcgaaatcccgtttgtggtggtggtttttctgttttatataattcaccttacgtgatcaactgtcatggtccatgtttttcttgttctatgtatatactatatggtacacatatatgctactactgagtacacaaatatgtccagccgaataaatgtctatacggctataccatctgtgttggcaatatcttgttgcaaaagtttgggagtggacgtataataatcttttgatttgaggtacgtgaattttggctatcagtttgttcttttc

SEQ ID NO: 203587 - DNA, 2605 bp, Zea Mays
gcgctcgagcagaagcccctgcttcgggctataaaggaagctggatgcgtgaagggatttcaagtaataaagtatgctatctgcacagagcaacttagggcataataggcattctcgcaatgatgtttccacaaagcacaaaagtggctatgaaccttctgacacagaaactgagtggcatgaaagcccttggaacgatggagcattggcatcgaataggaatcgtcttcctaaagattctggtaggaatgaccaagttggtactaggaggcaaaacatatctcctaactgcacactagattatcatgctgagaaaacttcaaacttgagatacagtcgtactcctccaagggtcacagaacaaaggcgccatccttctccatttacagctgtgaagaatgaatcacgtaagaagagcagccggacgcctcccagatttcgttcttctatggaaacctttagtagatcatcaataaaggcaaggttttcccgcaatcgttcaatttctgcaccaaaattacggccacaagagaaggaacatcctgctagagctcctgcatttcctggcagtaaccctgtctcaacacatccagaaagagaagttgctgataatatagaagaagattcacatgcagaaaactgttcccaggagatcagtgaattgattgcaaatggcaagttacctaattccagatataatgagtatgcatttacgagcacagagtcgatacctgcaggtgatatcttcttctcccgtgattgcagggctccacttgagaaaacgtcaacaaagcttaacaatattgaccaatcatttacctctgactcaaatgtccatactgagaatgatggcactgttactcaaagtaatttgggccagccatcacaatttgtttcagctcggacaggtctttcgcgcacaactacgaaatccagttatgctactggtcgccattgccagatgagcaccaccaccactttgagtagcccatatagcaatggaaaattaagtggggagagtggaaagtttagtgaaatcactgggaaactagttggaggcgtcatgaaattcacatccagcaaggtgcaaaacgatacgtggcttccatgtatgactgggaaggcatgtcgaaaatcaagaacatcaaacaacaaaaaaaatgatgaatctgaatcaagtttcattcagaaggcacttgtcattgagaagattagacttttttgggctgataaatatcgtccacaaaatttaaatggatttacttgccacagggagcaagtccagcagcttaaacaatcggtctctgcagaattttgcccacatattattttcaaaggtcctccaggatcaggaaagagatctttgtgcagagctgtcctcactgaaatttttggcgattcatctttgaatgtctctcactatttgaagagctgcaatggccaggggtccatatctgtgcctattctcgtcccagtttcatccagcaataaccatgtggaactccacatgaggtttcaatcgaagaacgctagatatgctttgatgactctagcaaatgaaatgtctgataagtgtaaaatcactgagccaattgtgagaaagagctttaaagtgattgttctctatgatgttgataaagtcagccaaaataaccagcgtctgataaaatggataatagattcctcctctgatgcatgcaagataataatgacttgccaggatgaatctaatctcctagattctataaagagtcgttgcaagattatttcaattggtgtgcccagtacacgtgaggtggtagatatccttacctatacatcaagaaaagagagttttgatcttcctacaagttttgctactaccattgcgaatcaatccaggaagaacttgagggaggctatattggctctagaggcatgtaaagccaacaattatcccttcattgatggacaagctataccactaggatgggaggaggttctggaggaacttgcagtagaaattttggatgatcctgcccctaaaaggttatttctggcacgaggcaagctccaaaaactcctggtggaatttgtacctcctaaactaatactccagaagctcgtagaactcttcttgaagggaattcagactggcgtgaagagggaagtctactattggcatgcctactatgacaagaggttgcctgttggtgcaagtgctctgcttaaattggaagaattcgttgccaagttcatgagcatccaccggaagagcatgtcgcatgagcccaagattcctgaggtgccgcagtgaaacctggcagagcatgtcctcgtgcggttcggccgtgtcgaaatcccgtttgtggtggtggtttttctgttttatataattcaccttacgtgatcaactgtcatggtccatgtttttcttgttctatgtatatactatatggtacacatatatgctactactgagtacacaaatatgtccagccgaataaatgtctatacggctataccatctgtgttggcaatatcttgttgcaaaagtttgggagtggacgtataataatcttttgatttgaggtacgtgaattttggctatcagtttgttcttttc

SEQ ID NO: 203588 - DNA, 2618 bp, Zea Mays
cacgaagcaggcgctcgagcagaagcccctgcttcgggctataaaggaagctggatgcgtgaagggatttcaagtaataaagtatgctatctgcacagagcaacttagggcataataggcattctcgcaatgatgtttccacaaagcacaaaagtggctatgaaccttctgacacagaaactgagtggcatgaaagcccttggaacgatggagcattggcatcgaataggaatcgtcttcctaaagattctggtaggaatgaccaagttggtactaggaggcaaaacatatctcctaactgcacactagattatcatgctgagaaaacttcaaacttgagatacagtcgtactcctccaagggtcacagaacaaaggcgccatccttctccatttacagctgtgaagaatgaatcacgtaagaagagcagccggacgcctcccagatttcgttcttctatggaaacctttagtagatcatcaataaaggcaaggttttcccgcaatcgttcaatttctgcaccaaaattacggccacaagagaaggaacatcctgctagagctcctgcatttcctggcagtaaccctgtctcaacacatccagaaagagaagttgctgataatatagaagaagattcacatgcagaaaactgttcccaggagatcagtgaattgattgcaaatggcaagttacctaattccagatataatgagtatgcatttacgagcacagagtcgatacctgcaggtgatatcttcttctcccgtgattgcagggctccacttgagaaaacgtcaacaaagcttaacaatattgaccaatcatttacctctgactcaaatgtccatactgagaatgatggcactgttactcaaagtaatttgggccagccatcacaatttgtttcagctcggacaggtctttcgcgcacaactacgaaatccagttatgctactggtcgccattgccagatgagcaccaccaccactttgagtagcccatatagcaatggaaaattaagtggggagagtggaaagtttagtgaaatcactgggaaactagttggaggcgtcatgaaattcacatccagcaaggtgcaaaacgatacgtggcttccatgtatgactgggaaggcatgtcgaaaatcaagaacatcaaacaacaaaaaaaatgatgaatctgaatcaagtttcattcagaaggcacttgtcattgagaagattagacttttttgggctgataaatatcgtccacaaaatttaaatggatttacttgccacagggagcaagtccagcagcttaaacaatcggtctctgcagaattttgcccacatattattttcaaaggtcctccaggatcaggaaagagatctttgtgcagagctgtcctcactgaaatttttggcgattcatctttgaatgtctctcactatttgaagagctgcaatggccagcaggggtccatatctgtgcctattctcgtcccagtttcatccagcaataaccatgtggaactccacatgaggtttcaatcgaagaacgctagatatgctttgatgactctagcaaatgaaatgtctgataagtgtaaaatcactgagccaattgtgagaaagagctttaaagtgattgttctctatgatgttgataaagtcagccaaaataaccagcgtctgataaaatggataatagattcctcctctgatgcatgcaagataataatgacttgccaggatgaatctaatctcctagattctataaagagtcgttgcaagattatttcaattggtgtgcccagtacacgtgaggtggtagatatccttacctatacatcaagaaaagagagttttgatcttcctacaagttttgctactaccattgcgaatcaatccaggaagaacttgagggaggctatattggctctagaggcatgtaaagccaacaattatcccttcattgatggacaagctataccactaggatgggaggaggttctggaggaacttgcagtagaaattttggatgatcctgcccctaaaaggttatttctggcacgaggcaagctccaaaaactcctggtggaatttgtacctcctaaactaatactccagaagctcgtagaactcttcttgaagggaattcagactggcgtgaagagggaagtctactattggcatgcctactatgacaagaggttgcctgttggtgcaagtgctctgcttaaattggaagaattcgttgccaagttcatgagcatccaccggaagagcatgtcgcatgagcccaagattcctgaggtgccgcagtgaaacctggcagagcatgtcctcgtgcggttcggccgtgtcgaaatcccgtttgtggtggtggtttttctgttttatataattcaccttacgtgatcaactgtcatggtccatgtttttcttgttctatgtatatactatatggtacacatatatgctactactgagtacacaaatatgtccagccgaataaatgtctatacggctataccatctgtgttggcaatatcttgttgcaaaagtttgggagtggacgtataataatcttttgatttgaggtacgtgaattttggctatcagtttgttcttttc

SEQ ID NO: 203589 - DNA, 2582 bp, Zea Mays
cgccactctgctcgagttggctctgcgactgggtgtttgaagaatgccatatgtttttccttgagagcaacttagggcataataggcattctcgcaatgatgtttccacaaagcacaaaagtggctatgaaccttctgacacagaaactgagtggcatgaaagcccttggaacgatggagcattggcatcgaataggaatcgtcttcctaaagattctggtaggaatgaccaagttggtactaggaggcaaaacatatctcctaactgcacactagattatcatgctgagaaaacttcaaacttgagatacagtcgtactcctccaagggtcacagaacaaaggcgccatccttctccatttacagctgtgaagaatgaatcacgtaagaagagcagccggacgcctcccagatttcgttcttctatggaaacctttagtagatcatcaataaaggcaaggttttcccgcaatcgttcaatttctgcaccaaaattacggccacaagagaaggaacatcctgctagagctcctgcatttcctggcagtaaccctgtctcaacacatccagaaagagaagttgctgataatatagaagaagattcacatgcagaaaactgttcccaggagatcagtgaattgattgcaaatggcaagttacctaattccagatataatgagtatgcatttacgagcacagagtcgatacctgcaggtgatatcttcttctcccgtgattgcagggctccacttgagaaaacgtcaacaaagcttaacaatattgaccaatcatttacctctgactcaaatgtccatactgagaatgatggcactgttactcaaagtaatttgggccagccatcacaatttgtttcagctcggacaggtctttcgcgcacaactacgaaatccagttatgctactggtcgccattgccagatgagcaccaccaccactttgagtagcccatatagcaatggaaaattaagtggggagagtggaaagtttagtgaaatcactgggaaactagttggaggcgtcatgaaattcacatccagcaaggtgcaaaacgatacgtggcttccatgtatgactgggaaggcatgtcgaaaatcaagaacatcaaacaacaaaaaaaatgatgaatctgaatcaagtttcattcagaaggcacttgtcattgagaagattagacttttttgggctgataaatatcgtccacaaaatttaaatggatttacttgccacagggagcaagtccagcagcttaaacaatcggtctctgcagaattttgcccacatattattttcaaaggtcctccaggatcaggaaagagatctttgtgcagagctgtcctcactgaaatttttggcgattcatctttgaatgtctctcactatttgaagagctgcaatggccaggggtccatatctgtgcctattctcgtcccagtttcatccagcaataaccatgtggaactccacatgaggtttcaatcgaagaacgctagatatgctttgatgactctagcaaatgaaatgtctgataagtgtaaaatcactgagccaattgtgagaaagagctttaaagtgattgttctctatgatgttgataaagtcagccaaaataaccagcgtctgataaaatggataatagattcctcctctgatgcatgcaagataataatgacttgccaggatgaatctaatctcctagattctataaagagtcgttgcaagattatttcaattggtgtgcccagtacacgtgaggtggtagatatccttacctatacatcaagaaaagagagttttgatcttcctacaagttttgctactaccattgcgaatcaatccaggaagaacttgagggaggctatattggctctagaggcatgtaaagccaacaattatcccttcattgatggacaagctataccactaggatgggaggaggttctggaggaacttgcagtagaaattttggatgatcctgcccctaaaaggttatttctggcacgaggcaagctccaaaaactcctggtggaatttgtacctcctaaactaatactccagaagctcgtagaactcttcttgaagggaattcagactggcgtgaagagggaagtctactattggcatgcctactatgacaagaggttgcctgttggtgcaagtgctctgcttaaattggaagaattcgttgccaagttcatgagcatccaccggaagagcatgtcgcatgagcccaagattcctgaggtgccgcagtgaaacctggcagagcatgtcctcgtgcggttcggccgtgtcgaaatcccgtttgtggtggtggtttttctgttttatataattcaccttacgtgatcaactgtcatggtccatgtttttcttgttctatgtatatactatatggtacacatatatgctactactgagtacacaaatatgtccagccgaataaatgtctatacggctataccatctgtgttggcaatatcttgttgcaaaagtttgggagtggacgtataataatcttttgatttgaggtacgtgaattttggctatcagtttgttcttttc

SEQ ID NO: 203590 - DNA, 4510 bp, Zea Mays
ctgacgccactctgctcgaggtggacgttgtcatctacgcggtgcccacgaagcaggcgctcgagcagaagcccctgcttcgggctataaaggaagctggatgcgtgaagagtatatggtggatgcagctggagcatgccaggctatatggctcgtgcagctgctgggggacatcaccggcgtcaaagtctagccatcgctgctgaagatggacaattagtatttttttaaaagagaatgatgttgctaaattgacaatatgcaccatagaagattccaggacattgaacaagatgttgtatctgaggcctctaggaaatgtctgctcaatgactgaattggctgacctctaggagacaaaaatcaagaaatccctgaaaaagttatatgtaacagaagatcaacttcttaaagaaatccatggttcgaagcaggctctccgcatttgcgggggcaaagcttgcctcgatttatcccttcctagacccgactcacgtgggagcatccgacactgcaaatgtggagaggctacttcgaacccgcgacctgatgactttgagatagctttcaccactacccttggtctatccttttgtgagttactgatactttataatttagtcaatctgtttcagttttttataccttcactttttttttctcgaacacgcaggagagctgcgtatcatttcattagaagaaagatggtatttatagtgacctaacacactactcacacacacacacaaacaacaagaggtataaccgcctcctagccggggttgaacacaaaagctaggtccgaaagacgggtgaagcctttggcccccgcaaaacaccacatattgaactcatcactggctgaggtaagcaatccaactatataaggctgagcaccattgaaaacacaatcattgcggtgtctccagatagtccaagcccccaggatcacggagttataggtacaattacatttgattatggcgtagaagtttggtgctatgtgtacgaagaacaaggttgataaaaacatgaagaagctgtgaaacctcgcttttcctagttgcaatttgcaaatcattttctgaaagacgattgtttcatgcataaaaaatgtacactcattctttctttgtcctcgttgcagatgctccatttctcttgaagatggatttaatttttatatattcagcatttgttaagggtgataacacatattttgaaattgacttgtcaattgaaaggaaatcaactgtatccccatgtaaattatacaacagtgaacgagtaattggatactctagtttagaatatttgatcaatttatatctttcttgtaagtcataaacaatgctttttttgttccaaatggagtattaaaagaagtggagtcatgaatacctgtccatctttgtttgttctgacaagtgaatgtggtgatgatctgacattttttatcctgcataattgatgtgatcttaggtcacgcgtaaatcataatgggcccatatccaagcaaaagacaaatcttaaacaaataaaaactctctgacaattcagtaggcatcttgaactttccttaccgaagtttgtaaggttcacagaatgataaaacggtgtgaaagaatagatatcagtgttaggaagtcatagaacagtattttattgctgctagatcctacataagctgtctcctttaaatatatgttttatgttcctaggaatatatgatgatttttggaataagtggcctaggtaatggggtagaatggcttcttctctcctttggtttattctgcacttggagtagaagaagaggacaagaatgccatctggcaaaacagaaaggatgtttttttcttgtcttccttctttgttgtctccttataactcttgcttttgtccttcagttggctctgcgactgggtgtttgaagaatgccatatgtttttccttgagggatttcaagtaataaagtatgctatctgcacagagcaacttagggcataataggcattctcgcaatgatgtttccacaaagcacaaaagtggctatgaaccttctgacacagaaactgagtggcatgaaagcccttggaacgatggagcattggcatcgaataggaatcgtcttcctaaagattctggtaggaatgaccaagttggtactaggaggcaaaacatatctcctaactgcacactagattatcatgctgagaaaacttcaaacttgagatacagtcgtactcctccaagggtcacagaacaaaggcgccatccttctccatttacagctgtgaagaatgaatcacgtaagaagagcagccggacgcctcccagatttcgttcttctatggaaacctttagtagatcatcaataaaggcaaggttttcccgcaatcgttcaatttctgcaccaaaattacggccacaagagaaggaacatcctgctagagctcctgcatttcctggcagtaaccctgtctcaacacatccagaaagagaagttgctgataatatagaagaagattcacatgcagaaaactgttcccaggagatcagtgaattgattgcaaatggcaagttacctaattccagatataatgagtatgcatttacgagcacagagtcgatacctgcaggtgatatcttcttctcccgtgattgcagggctccacttgagaaaacgtcaacaaagcttaacaatattgaccaatcatttacctctgactcaaatgtccatactgagaatgatggcactgttactcaaagtaatttgggccagccatcacaatttgtttcagctcggacaggtctttcgcgcacaactacgaaatccagttatgctactggtcgccattgccagatgagcaccaccaccactttgagtagcccatatagcaatggaaaattaagtggggagagtggaaagtttagtgaaatcactgggaaactagttggaggcgtcatgaaattcacatccagcaaggtgcaaaacgatacgtggcttccatgtatgactgggaaggcatgtcgaaaatcaagaacatcaaacaacaaaaaaaatgatgaatctgaatcaagtttcattcagaaggcacttgtcattgagaagattagacttttttgggctgataaatatcgtccacaaaatttaaatggatttacttgccacagggagcaagtccagcagcttaaacaatcggtctctgcagaattttgcccacatattattttcaaaggtcctccaggatcaggaaagagatctttgtgcagagctgtcctcactgaaatttttggcgattcatctttgaatgtctctcactatttgaagagctgcaatggccaggggtccatatctgtgcctattctcgtcccagtttcatccagcaataaccatgtggaactccacatgaggtttcaatcgaagaacgctagatatgctttgatgactctagcaaatgaaatgtctgataagtgtaaaatcactgagccaattgtgagaaagagctttaaagtgattgttctctatgatgttgataaagtcagccaaaataaccagcgtctgataaaatggataatagattcctcctctgatgcatgcaagataataatgacttgccaggatgaatctaatctcctagattctataaagagtcgttgcaagattatttcaattggtgtgcccagtacacgtgaggtggtagatatccttacctatacatcaagaaaagagagttttgatcttcctacaagttttgctactaccattgcgaatcaatccaggaagaacttgagggaggctatattggctctagaggcatgtaaagccaacaattatcccttcattgatggacaagctataccactaggatgggaggaggttctggaggaacttgcagtagaaattttggatgatcctgcccctaaaaggttatttctggcacgaggcaagctccaaaaactcctggtggaatttgtacctcctaaactaatactccagaagctcgtagaactcttcttgaagggaattcagactggcgtgaagagggaagtctactattggcatgcctactatgacaagaggttgcctgttggtgcaagtgctctgcttaaattggaagaattcgttgccaagttcatgagcatccaccggaagagcatgtcgcatgagcccaagattcctgaggtgccgcagtgaaacctggcagagcatgtcctcgtgcggttcggccgtgtcgaaatcccgtttgtggtggtggtttttctgttttatataattcaccttacgtgatcaactgtcatggtccatgtttttcttgttctatgtatatactatatggtacacatatatgctactactgagtacacaaatatgtccagccgaataaatgtctatacggctataccatctgtgttggcaatatcttgttgcaaaagtttgggagtggacgtataataatcttttgatttgaggtacgtgaattttggctatcagtttgttcttttc

SEQ ID NO: 203591 - DNA, 4411 bp, Zea Mays
ctcgtagccgctgacgccactctgctcgaggtggacgttgtcatctacgcggtgcccacgaagcaggcgctcgagcagaagcccctgcttcgggctataaaggaagctggatgcgtgaaggtatttttttaaaagagaatgatgttgctaaattgacaatatgcaccatagaagattccaggacattgaacaagatgttgtatctgaggcctctaggaaatgtctgctcaatgactgaattggctgacctctaggagacaaaaatcaagaaatccctgaaaaagttatatgtaacagaagatcaacttcttaaagaaatccatggttcgaagcaggctctccgcatttgcgggggcaaagcttgcctcgatttatcccttcctagacccgactcacgtgggagcatccgacactgcaaatgtggagaggctacttcgaacccgcgacctgatgactttgagatagctttcaccactacccttggtctatccttttgtgagttactgatactttataatttagtcaatctgtttcagttttttataccttcactttttttttctcgaacacgcaggagagctgcgtatcatttcattagaagaaagatggtatttatagtgacctaacacactactcacacacacacacaaacaacaagaggtataaccgcctcctagccggggttgaacacaaaagctaggtccgaaagacgggtgaagcctttggcccccgcaaaacaccacatattgaactcatcactggctgaggtaagcaatccaactatataaggctgagcaccattgaaaacacaatcattgcggtgtctccagatagtccaagcccccaggatcacggagttataggtacaattacatttgattatggcgtagaagtttggtgctatgtgtacgaagaacaaggttgataaaaacatgaagaagctgtgaaacctcgcttttcctagttgcaatttgcaaatcattttctgaaagacgattgtttcatgcataaaaaatgtacactcattctttctttgtcctcgttgcagatgctccatttctcttgaagatggatttaatttttatatattcagcatttgttaagggtgataacacatattttgaaattgacttgtcaattgaaaggaaatcaactgtatccccatgtaaattatacaacagtgaacgagtaattggatactctagtttagaatatttgatcaatttatatctttcttgtaagtcataaacaatgctttttttgttccaaatggagtattaaaagaagtggagtcatgaatacctgtccatctttgtttgttctgacaagtgaatgtggtgatgatctgacattttttatcctgcataattgatgtgatcttaggtcacgcgtaaatcataatgggcccatatccaagcaaaagacaaatcttaaacaaataaaaactctctgacaattcagtaggcatcttgaactttccttaccgaagtttgtaaggttcacagaatgataaaacggtgtgaaagaatagatatcagtgttaggaagtcatagaacagtattttattgctgctagatcctacataagctgtctcctttaaatatatgttttatgttcctaggaatatatgatgatttttggaataagtggcctaggtaatggggtagaatggcttcttctctcctttggtttattctgcacttggagtagaagaagaggacaagaatgccatctggcaaaacagaaaggatgtttttttcttgtcttccttctttgttgtctccttataactcttgcttttgtccttcagttggctctgcgactgggtgtttgaagaatgccatatgtttttccttgagggatttcaagtaataaagtatgctatctgcacagagcaacttagggcataataggcattctcgcaatgatgtttccacaaagcacaaaagtggctatgaaccttctgacacagaaactgagtggcatgaaagcccttggaacgatggagcattggcatcgaataggaatcgtcttcctaaagattctggtaggaatgaccaagttggtactaggaggcaaaacatatctcctaactgcacactagattatcatgctgagaaaacttcaaacttgagatacagtcgtactcctccaagggtcacagaacaaaggcgccatccttctccatttacagctgtgaagaatgaatcacgtaagaagagcagccggacgcctcccagatttcgttcttctatggaaacctttagtagatcatcaataaaggcaaggttttcccgcaatcgttcaatttctgcaccaaaattacggccacaagagaaggaacatcctgctagagctcctgcatttcctggcagtaaccctgtctcaacacatccagaaagagaagttgctgataatatagaagaagattcacatgcagaaaactgttcccaggagatcagtgaattgattgcaaatggcaagttacctaattccagatataatgagtatgcatttacgagcacagagtcgatacctgcaggtgatatcttcttctcccgtgattgcagggctccacttgagaaaacgtcaacaaagcttaacaatattgaccaatcatttacctctgactcaaatgtccatactgagaatgatggcactgttactcaaagtaatttgggccagccatcacaatttgtttcagctcggacaggtctttcgcgcacaactacgaaatccagttatgctactggtcgccattgccagatgagcaccaccaccactttgagtagcccatatagcaatggaaaattaagtggggagagtggaaagtttagtgaaatcactgggaaactagttggaggcgtcatgaaattcacatccagcaaggtgcaaaacgatacgtggcttccatgtatgactgggaaggcatgtcgaaaatcaagaacatcaaacaacaaaaaaaatgatgaatctgaatcaagtttcattcagaaggcacttgtcattgagaagattagacttttttgggctgataaatatcgtccacaaaatttaaatggatttacttgccacagggagcaagtccagcagcttaaacaatcggtctctgcagaattttgcccacatattattttcaaaggtcctccaggatcaggaaagagatctttgtgcagagctgtcctcactgaaatttttggcgattcatctttgaatgtctctcactatttgaagagctgcaatggccaggggtccatatctgtgcctattctcgtcccagtttcatccagcaataaccatgtggaactccacatgaggtttcaatcgaagaacgctagatatgctttgatgactctagcaaatgaaatgtctgataagtgtaaaatcactgagccaattgtgagaaagagctttaaagtgattgttctctatgatgttgataaagtcagccaaaataaccagcgtctgataaaatggataatagattcctcctctgatgcatgcaagataataatgacttgccaggatgaatctaatctcctagattctataaagagtcgttgcaagattatttcaattggtgtgcccagtacacgtgaggtggtagatatccttacctatacatcaagaaaagagagttttgatcttcctacaagttttgctactaccattgcgaatcaatccaggaagaacttgagggaggctatattggctctagaggcatgtaaagccaacaattatcccttcattgatggacaagctataccactaggatgggaggaggttctggaggaacttgcagtagaaattttggatgatcctgcccctaaaaggttatttctggcacgaggcaagctccaaaaactcctggtggaatttgtacctcctaaactaatactccagaagctcgtagaactcttcttgaagggaattcagactggcgtgaagagggaagtctactattggcatgcctactatgacaagaggttgcctgttggtgcaagtgctctgcttaaattggaagaattcgttgccaagttcatgagcatccaccggaagagcatgtcgcatgagcccaagattcctgaggtgccgcagtgaaacctggcagagcatgtcctcgtgcggttcggccgtgtcgaaatcccgtttgtggtggtggtttttctgttttatataattcaccttacgtgatcaactgtcatggtccatgtttttcttgttctatgtatatactatatggtacacatatatgctactactgagtacacaaatatgtccagccgaataaatgtctatacggctataccatctgtgttggcaatatcttgttgcaaaagtttgggagtggacgtataataatcttttgatttgaggtacgtgaattttggctatcagtttgttcttttc

SEQ ID NO: 203592 - DNA, 3198 bp, Zea Mays
ccgactctcctacttgctcgtagccgctgacgccactctgctcgaggcggtgcggcaggtggacgttgtcatctacgcggtgcccacgaagcaggcgctcgagcagaagcccctgcttcgggctataaaggaagctggatgcgtgaagagtatatggtggatgcagctggagcatgccaggctatatggctcgtgcagctgctgggggacatcaccggcgtcaaagtctagccatcgctgctgaagatggacaattagtatttttttaaaagagaatgatgttgctaaattgacaatatgcaccatagaagattccaggacattgaacaagatgttgtatctgaggcctctaggaaatgtctgctcaatgactgaattggctgacctctaggagacaaaaatcaagaaatccctgaaaaagttatatgtaacagaagatcaacttcttaaagaaatccatggttcgaagcaggctctccgcatttgcgggggcaaagcttgcctcgatttatcccttcctagacccgactcacgtgggagcatccgacactgcaaatgtggagaggctacttcgaacccgcgacctgatgactttgagatagctttcaccactacccttggtctatccttttttggctctgcgactgggtgtttgaagaatgccatatgtttttccttgagagcaacttagggcataataggcattctcgcaatgatgtttccacaaagcacaaaagtggctatgaaccttctgacacagaaactgagtggcatgaaagcccttggaacgatggagcattggcatcgaataggaatcgtcttcctaaagattctggtaggaatgaccaagttggtactaggaggcaaaacatatctcctaactgcacactagattatcatgctgagaaaacttcaaacttgagatacagtcgtactcctccaagggtcacagaacaaaggcgccatccttctccatttacagctgtgaagaatgaatcacgtaagaagagcagccggacgcctcccagatttcgttcttctatggaaacctttagtagatcatcaataaaggcaaggttttcccgcaatcgttcaatttctgcaccaaaattacggccacaagagaaggaacatcctgctagagctcctgcatttcctggcagtaaccctgtctcaacacatccagaaagagaagttgctgataatatagaagaagattcacatgcagaaaactgttcccaggagatcagtgaattgattgcaaatggcaagttacctaattccagatataatgagtatgcatttacgagcacagagtcgatacctgcaggtgatatcttcttctcccgtgattgcagggctccacttgagaaaacgtcaacaaagcttaacaatattgaccaatcatttacctctgactcaaatgtccatactgagaatgatggcactgttactcaaagtaatttgggccagccatcacaatttgtttcagctcggacaggtctttcgcgcacaactacgaaatccagttatgctactggtcgccattgccagatgagcaccaccaccactttgagtagcccatatagcaatggaaaattaagtggggagagtggaaagtttagtgaaatcactgggaaactagttggaggcgtcatgaaattcacatccagcaaggtgcaaaacgatacgtggcttccatgtatgactgggaaggcatgtcgaaaatcaagaacatcaaacaacaaaaaaaatgatgaatctgaatcaagtttcattcagaaggcacttgtcattgagaagattagacttttttgggctgataaatatcgtccacaaaatttaaatggatttacttgccacagggagcaagtccagcagcttaaacaatcggtctctgcagaattttgcccacatattattttcaaaggtcctccaggatcaggaaagagatctttgtgcagagctgtcctcactgaaatttttggcgattcatctttgaatgtctctcactatttgaagagctgcaatggccaggggtccatatctgtgcctattctcgtcccagtttcatccagcaataaccatgtggaactccacatgaggtttcaatcgaagaacgctagatatgctttgatgactctagcaaatgaaatgtctgataagtgtaaaatcactgagccaattgtgagaaagagctttaaagtgattgttctctatgatgttgataaagtcagccaaaataaccagcgtctgataaaatggataatagattcctcctctgatgcatgcaagataataatgacttgccaggatgaatctaatctcctagattctataaagagtcgttgcaagattatttcaattggtgtgcccagtacacgtgaggtggtagatatccttacctatacatcaagaaaagagagttttgatcttcctacaagttttgctactaccattgcgaatcaatccaggaagaacttgagggaggctatattggctctagaggcatgtaaagccaacaattatcccttcattgatggacaagctataccactaggatgggaggaggttctggaggaacttgcagtagaaattttggatgatcctgcccctaaaaggttatttctggcacgaggcaagctccaaaaactcctggtggaatttgtacctcctaaactaatactccagaagctcgtagaactcttcttgaagggaattcagactggcgtgaagagggaagtctactattggcatgcctactatgacaagaggttgcctgttggtgcaagtgctctgcttaaattggaagaattcgttgccaagttcatgagcatccaccggaagagcatgtcgcatgagcccaagattcctgaggtgccgcagtgaaacctggcagagcatgtcctcgtgcggttcggccgtgtcgaaatcccgtttgtggtggtggtttttctgttttatataattcaccttacgtgatcaactgtcatggtccatgtttttcttgttctatgtatatactatatggtacacatatatgctactactgagtacacaaatatgtccagccgaataaatgtctatacggctataccatctgtgttggcaatatcttgttgcaaaagtttgggagtggacgtataataatcttttgatttgaggtacgtgaattttggctatcagtttgttcttttc

SEQ ID NO: 203593 - DNA, 3233 bp, Zea Mays
caggccaccacttagcacgccccgactctcctacttgctcgtagccgctgacgccactctgctcgagagtatatggtggatgcagctggagcatgccaggctatatggctcgtgcagctgctgggggacatcaccggcgtcaaagtctagccatcgctgctgaagatggacaattagtattatttctctattctaatagtcttatatctgaatttacatgtaaattttgttacctcagggaagaacatttatttgcaggtatttttttaaaagagaatgatgttgctaaattgacaatatgcaccatagaagattccaggacattgaacaagatgttgtatctgaggcctctaggaaatgtctgctcaatgactgaattggctgacctctaggagacaaaaatcaagaaatccctgaaaaagttatatgtaacagaagatcaacttcttaaagaaatccatggttcgaagcaggctctccgcatttgcgggggcaaagcttgcctcgatttatcccttcctagacccgactcacgtgggagcatccgacactgcaaatgtggagaggctacttcgaacccgcgacctgatgactttgagatagctttcaccactacccttggtctatccttttttggctctgcgactgggtgtttgaagaatgccatatgtttttccttgagggatttcaagtaataaagtatgctatctgcacagagcaacttagggcataataggcattctcgcaatgatgtttccacaaagcacaaaagtggctatgaaccttctgacacagaaactgagtggcatgaaagcccttggaacgatggagcattggcatcgaataggaatcgtcttcctaaagattctggtaggaatgaccaagttggtactaggaggcaaaacatatctcctaactgcacactagattatcatgctgagaaaacttcaaacttgagatacagtcgtactcctccaagggtcacagaacaaaggcgccatccttctccatttacagctgtgaagaatgaatcacgtaagaagagcagccggacgcctcccagatttcgttcttctatggaaacctttagtagatcatcaataaaggcaaggttttcccgcaatcgttcaatttctgcaccaaaattacggccacaagagaaggaacatcctgctagagctcctgcatttcctggcagtaaccctgtctcaacacatccagaaagagaagttgctgataatatagaagaagattcacatgcagaaaactgttcccaggagatcagtgaattgattgcaaatggcaagttacctaattccagatataatgagtatgcatttacgagcacagagtcgatacctgcaggtgatatcttcttctcccgtgattgcagggctccacttgagaaaacgtcaacaaagcttaacaatattgaccaatcatttacctctgactcaaatgtccatactgagaatgatggcactgttactcaaagtaatttgggccagccatcacaatttgtttcagctcggacaggtctttcgcgcacaactacgaaatccagttatgctactggtcgccattgccagatgagcaccaccaccactttgagtagcccatatagcaatggaaaattaagtggggagagtggaaagtttagtgaaatcactgggaaactagttggaggcgtcatgaaattcacatccagcaaggtgcaaaacgatacgtggcttccatgtatgactgggaaggcatgtcgaaaatcaagaacatcaaacaacaaaaaaaatgatgaatctgaatcaagtttcattcagaaggcacttgtcattgagaagattagacttttttgggctgataaatatcgtccacaaaatttaaatggatttacttgccacagggagcaagtccagcagcttaaacaatcggtctctgcagaattttgcccacatattattttcaaaggtcctccaggatcaggaaagagatctttgtgcagagctgtcctcactgaaatttttggcgattcatctttgaatgtctctcactatttgaagagctgcaatggccaggggtccatatctgtgcctattctcgtcccagtttcatccagcaataaccatgtggaactccacatgaggtttcaatcgaagaacgctagatatgctttgatgactctagcaaatgaaatgtctgataagtgtaaaatcactgagccaattgtgagaaagagctttaaagtgattgttctctatgatgttgataaagtcagccaaaataaccagcgtctgataaaatggataatagattcctcctctgatgcatgcaagataataatgacttgccaggatgaatctaatctcctagattctataaagagtcgttgcaagattatttcaattggtgtgcccagtacacgtgaggtggtagatatccttacctatacatcaagaaaagagagttttgatcttcctacaagttttgctactaccattgcgaatcaatccaggaagaacttgagggaggctatattggctctagaggcatgtaaagccaacaattatcccttcattgatggacaagctataccactaggatgggaggaggttctggaggaacttgcagtagaaattttggatgatcctgcccctaaaaggttatttctggcacgaggcaagctccaaaaactcctggtggaatttgtacctcctaaactaatactccagaagctcgtagaactcttcttgaagggaattcagactggcgtgaagagggaagtctactattggcatgcctactatgacaagaggttgcctgttggtgcaagtgctctgcttaaattggaagaattcgttgccaagttcatgagcatccaccggaagagcatgtcgcatgagcccaagattcctgaggtgccgcagtgaaacctggcagagcatgtcctcgtgcggttcggccgtgtcgaaatcccgtttgtggtggtggtttttctgttttatataattcaccttacgtgatcaactgtcatggtccatgtttttcttgttctatgtatatactatatggtacacatatatgctactactgagtacacaaatatgtccagccgaataaatgtctatacggctataccatctgtgttggcaatatcttgttgcaaaagtttgggagtggacgtataataatcttttgatttgaggtacgtgaattttggctatcagtttgttcttttc

SEQ ID NO: 203594 - DNA, 3160 bp, Zea Mays
gttcgtccggccccaccaggccaccacttagcacgccccgactctcctacttgctcgtagccgctgacgccactctgctcgaggcggtgcggcaggtggacgttgtcatctacgcggtgcccacgaagcaggcgctcgagcagaagcccctgcttcgggctataaaggaagctggatgcgtgaaggtatttttttaaaagagaatgatgttgctaaattgacaatatgcaccatagaagattccaggacattgaacaagatgttgtatctgaggcctctaggaaatgtctgctcaatgactgaattggctgacctctaggagacaaaaatcaagaaatccctgaaaaagttatatgtaacagaagatcaacttcttaaagaaatccatggttcgaagcaggctctccgcatttgcgggggcaaagcttgcctcgatttatcccttcctagacccgactcacgtgggagcatccgacactgcaaatgtggagaggctacttcgaacccgcgacctgatgactttgagatagctttcaccactacccttggtctatccttttttggctctgcgactgggtgtttgaagaatgccatatgtttttccttgagggatttcaagtaataaagtatgctatctgcacagagcaacttagggcataataggcattctcgcaatgatgtttccacaaagcacaaaagtggctatgaaccttctgacacagaaactgagtggcatgaaagcccttggaacgatggagcattggcatcgaataggaatcgtcttcctaaagattctggtaggaatgaccaagttggtactaggaggcaaaacatatctcctaactgcacactagattatcatgctgagaaaacttcaaacttgagatacagtcgtactcctccaagggtcacagaacaaaggcgccatccttctccatttacagctgtgaagaatgaatcacgtaagaagagcagccggacgcctcccagatttcgttcttctatggaaacctttagtagatcatcaataaaggcaaggttttcccgcaatcgttcaatttctgcaccaaaattacggccacaagagaaggaacatcctgctagagctcctgcatttcctggcagtaaccctgtctcaacacatccagaaagagaagttgctgataatatagaagaagattcacatgcagaaaactgttcccaggagatcagtgaattgattgcaaatggcaagttacctaattccagatataatgagtatgcatttacgagcacagagtcgatacctgcaggtgatatcttcttctcccgtgattgcagggctccacttgagaaaacgtcaacaaagcttaacaatattgaccaatcatttacctctgactcaaatgtccatactgagaatgatggcactgttactcaaagtaatttgggccagccatcacaatttgtttcagctcggacaggtctttcgcgcacaactacgaaatccagttatgctactggtcgccattgccagatgagcaccaccaccactttgagtagcccatatagcaatggaaaattaagtggggagagtggaaagtttagtgaaatcactgggaaactagttggaggcgtcatgaaattcacatccagcaaggtgcaaaacgatacgtggcttccatgtatgactgggaaggcatgtcgaaaatcaagaacatcaaacaacaaaaaaaatgatgaatctgaatcaagtttcattcagaaggcacttgtcattgagaagattagacttttttgggctgataaatatcgtccacaaaatttaaatggatttacttgccacagggagcaagtccagcagcttaaacaatcggtctctgcagaattttgcccacatattattttcaaaggtcctccaggatcaggaaagagatctttgtgcagagctgtcctcactgaaatttttggcgattcatctttgaatgtctctcactatttgaagagctgcaatggccaggggtccatatctgtgcctattctcgtcccagtttcatccagcaataaccatgtggaactccacatgaggtttcaatcgaagaacgctagatatgctttgatgactctagcaaatgaaatgtctgataagtgtaaaatcactgagccaattgtgagaaagagctttaaagtgattgttctctatgatgttgataaagtcagccaaaataaccagcgtctgataaaatggataatagattcctcctctgatgcatgcaagataataatgacttgccaggatgaatctaatctcctagattctataaagagtcgttgcaagattatttcaattggtgtgcccagtacacgtgaggtggtagatatccttacctatacatcaagaaaagagagttttgatcttcctacaagttttgctactaccattgcgaatcaatccaggaagaacttgagggaggctatattggctctagaggcatgtaaagccaacaattatcccttcattgatggacaagctataccactaggatgggaggaggttctggaggaacttgcagtagaaattttggatgatcctgcccctaaaaggttatttctggcacgaggcaagctccaaaaactcctggtggaatttgtacctcctaaactaatactccagaagctcgtagaactcttcttgaagggaattcagactggcgtgaagagggaagtctactattggcatgcctactatgacaagaggttgcctgttggtgcaagtgctctgcttaaattggaagaattcgttgccaagttcatgagcatccaccggaagagcatgtcgcatgagcccaagattcctgaggtgccgcagtgaaacctggcagagcatgtcctcgtgcggttcggccgtgtcgaaatcccgtttgtggtggtggtttttctgttttatataattcaccttacgtgatcaactgtcatggtccatgtttttcttgttctatgtatatactatatggtacacatatatgctactactgagtacacaaatatgtccagccgaataaatgtctatacggctataccatctgtgttggcaatatcttgttgcaaaagtttgggagtggacgtataataatcttttgatttgaggtacgtgaattttggctatcagtttgttcttttc

SEQ ID NO: 203595 - DNA, 4591 bp, Zea Mays
cttcgcgttcgtccggccccaccaggccaccacttagcacgccccgactctcctacttgctcgtagccgctgacgccactctgctcgaggcggtgcggcaggtggacgttgtcatctacgcggtgcccacgaagcaggcgctcgagcagaagcccctgcttcgggctataaaggaagctggatgcgtgaagagtatatggtggatgcagctggagcatgccaggctatatggctcgtgcagctgctgggggacatcaccggcgtcaaagtctagccatcgctgctgaagatggacaattagtatttttttaaaagagaatgatgttgctaaattgacaatatgcaccatagaagattccaggacattgaacaagatgttgtatctgaggcctctaggaaatgtctgctcaatgactgaattggctgacctctaggagacaaaaatcaagaaatccctgaaaaagttatatgtaacagaagatcaacttcttaaagaaatccatggttcgaagcaggctctccgcatttgcgggggcaaagcttgcctcgatttatcccttcctagacccgactcacgtgggagcatccgacactgcaaatgtggagaggctacttcgaacccgcgacctgatgactttgagatagctttcaccactacccttggtctatccttttgtgagttactgatactttataatttagtcaatctgtttcagttttttataccttcactttttttttctcgaacacgcaggagagctgcgtatcatttcattagaagaaagatggtatttatagtgacctaacacactactcacacacacacacaaacaacaagaggtataaccgcctcctagccggggttgaacacaaaagctaggtccgaaagacgggtgaagcctttggcccccgcaaaacaccacatattgaactcatcactggctgaggtaagcaatccaactatataaggctgagcaccattgaaaacacaatcattgcggtgtctccagatagtccaagcccccaggatcacggagttataggtacaattacatttgattatggcgtagaagtttggtgctatgtgtacgaagaacaaggttgataaaaacatgaagaagctgtgaaacctcgcttttcctagttgcaatttgcaaatcattttctgaaagacgattgtttcatgcataaaaaatgtacactcattctttctttgtcctcgttgcagatgctccatttctcttgaagatggatttaatttttatatattcagcatttgttaagggtgataacacatattttgaaattgacttgtcaattgaaaggaaatcaactgtatccccatgtaaattatacaacagtgaacgagtaattggatactctagtttagaatatttgatcaatttatatctttcttgtaagtcataaacaatgctttttttgttccaaatggagtattaaaagaagtggagtcatgaatacctgtccatctttgtttgttctgacaagtgaatgtggtgatgatctgacattttttatcctgcataattgatgtgatcttaggtcacgcgtaaatcataatgggcccatatccaagcaaaagacaaatcttaaacaaataaaaactctctgacaattcagtaggcatcttgaactttccttaccgaagtttgtaaggttcacagaatgataaaacggtgtgaaagaatagatatcagtgttaggaagtcatagaacagtattttattgctgctagatcctacataagctgtctcctttaaatatatgttttatgttcctaggaatatatgatgatttttggaataagtggcctaggtaatggggtagaatggcttcttctctcctttggtttattctgcacttggagtagaagaagaggacaagaatgccatctggcaaaacagaaaggatgtttttttcttgtcttccttctttgttgtctccttataactcttgcttttgtccttcagttggctctgcgactgggtgtttgaagaatgccatatgtttttccttgagggatttcaagtaataaagtatgctatctgcacagagcaacttagggcataataggcattctcgcaatgatgtttccacaaagcacaaaagtggctatgaaccttctgacacagaaactgagtggcatgaaagcccttggaacgatggagcattggcatcgaataggaatcgtcttcctaaagattctggtaggaatgaccaagttggtactaggaggcaaaacatatctcctaactgcacactagattatcatgctgagaaaacttcaaacttgagatacagtcgtactcctccaagggtcacagaacaaaggcgccatccttctccatttacagctgtgaagaatgaatcacgtaagaagagcagccggacgcctcccagatttcgttcttctatggaaacctttagtagatcatcaataaaggcaaggttttcccgcaatcgttcaatttctgcaccaaaattacggccacaagagaaggaacatcctgctagagctcctgcatttcctggcagtaaccctgtctcaacacatccagaaagagaagttgctgataatatagaagaagattcacatgcagaaaactgttcccaggagatcagtgaattgattgcaaatggcaagttacctaattccagatataatgagtatgcatttacgagcacagagtcgatacctgcaggtgatatcttcttctcccgtgattgcagggctccacttgagaaaacgtcaacaaagcttaacaatattgaccaatcatttacctctgactcaaatgtccatactgagaatgatggcactgttactcaaagtaatttgggccagccatcacaatttgtttcagctcggacaggtctttcgcgcacaactacgaaatccagttatgctactggtcgccattgccagatgagcaccaccaccactttgagtagcccatatagcaatggaaaattaagtggggagagtggaaagtttagtgaaatcactgggaaactagttggaggcgtcatgaaattcacatccagcaaggtgcaaaacgatacgtggcttccatgtatgactgggaaggcatgtcgaaaatcaagaacatcaaacaacaaaaaaaatgatgaatctgaatcaagtttcattcagaaggcacttgtcattgagaagattagacttttttgggctgataaatatcgtccacaaaatttaaatggatttacttgccacagggagcaagtccagcagcttaaacaatcggtctctgcagaattttgcccacatattattttcaaaggtcctccaggatcaggaaagagatctttgtgcagagctgtcctcactgaaatttttggcgattcatctttgaatgtctctcactatttgaagagctgcaatggccaggggtccatatctgtgcctattctcgtcccagtttcatccagcaataaccatgtggaactccacatgaggtttcaatcgaagaacgctagatatgctttgatgactctagcaaatgaaatgtctgataagtgtaaaatcactgagccaattgtgagaaagagctttaaagtgattgttctctatgatgttgataaagtcagccaaaataaccagcgtctgataaaatggataatagattcctcctctgatgcatgcaagataataatgacttgccaggatgaatctaatctcctagattctataaagagtcgttgcaagattatttcaattggtgtgcccagtacacgtgaggtggtagatatccttacctatacatcaagaaaagagagttttgatcttcctacaagttttgctactaccattgcgaatcaatccaggaagaacttgagggaggctatattggctctagaggcatgtaaagccaacaattatcccttcattgatggacaagctataccactaggatgggaggaggttctggaggaacttgcagtagaaattttggatgatcctgcccctaaaaggttatttctggcacgaggcaagctccaaaaactcctggtggaatttgtacctcctaaactaatactccagaagctcgtagaactcttcttgaagggaattcagactggcgtgaagagggaagtctactattggcatgcctactatgacaagaggttgcctgttggtgcaagtgctctgcttaaattggaagaattcgttgccaagttcatgagcatccaccggaagagcatgtcgcatgagcccaagattcctgaggtgccgcagtgaaacctggcagagcatgtcctcgtgcggttcggccgtgtcgaaatcccgtttgtggtggtggtttttctgttttatataattcaccttacgtgatcaactgtcatggtccatgtttttcttgttctatgtatatactatatggtacacatatatgctactactgagtacacaaatatgtccagccgaataaatgtctatacggctataccatctgtgttggcaatatcttgttgcaaaagtttgggagtggacgtataataatcttttgatttgaggtacgtgaattttggctatcagtttgttcttttc

SEQ ID NO: 203596 - DNA, 3280 bp, Zea Mays
cgaaccttcgcgttcgtccggccccaccaggccaccacttagcacgccccgactctcctacttgctcgtagccgctgacgccactctgctcgaggcggtgcggcaggtggacgttgtcatctacgcggtgcccacgaagcaggcgctcgagcagaagcccctgcttcgggctataaaggaagctggatgcgtgaagagtatatggtggatgcagctggagcatgccaggctatatggctcgtgcagctgctgggggacatcaccggcgtcaaagtctagccatcgctgctgaagatggacaattagtatttttttaaaagagaatgatgttgctaaattgacaatatgcaccatagaagattccaggacattgaacaagatgttgtatctgaggcctctaggaaatgtctgctcaatgactgaattggctgacctctaggagacaaaaatcaagaaatccctgaaaaagttatatgtaacagaagatcaacttcttaaagaaatccatggttcgaagcaggctctccgcatttgcgggggcaaagcttgcctcgatttatcccttcctagacccgactcacgtgggagcatccgacactgcaaatgtggagaggctacttcgaacccgcgacctgatgactttgagatagctttcaccactacccttggtctatccttttttggctctgcgactgggtgtttgaagaatgccatatgtttttccttgagggatttcaagtaataaagtatgctatctgcacagagcaacttagggcataataggcattctcgcaatgatgtttccacaaagcacaaaagtggctatgaaccttctgacacagaaactgagtggcatgaaagcccttggaacgatggagcattggcatcgaataggaatcgtcttcctaaagattctggtaggaatgaccaagttggtactaggaggcaaaacatatctcctaactgcacactagattatcatgctgagaaaacttcaaacttgagatacagtcgtactcctccaagggtcacagaacaaaggcgccatccttctccatttacagctgtgaagaatgaatcacgtaagaagagcagccggacgcctcccagatttcgttcttctatggaaacctttagtagatcatcaataaaggcaaggttttcccgcaatcgttcaatttctgcaccaaaattacggccacaagagaaggaacatcctgctagagctcctgcatttcctggcagtaaccctgtctcaacacatccagaaagagaagttgctgataatatagaagaagattcacatgcagaaaactgttcccaggagatcagtgaattgattgcaaatggcaagttacctaattccagatataatgagtatgcatttacgagcacagagtcgatacctgcaggtgatatcttcttctcccgtgattgcagggctccacttgagaaaacgtcaacaaagcttaacaatattgaccaatcatttacctctgactcaaatgtccatactgagaatgatggcactgttactcaaagtaatttgggccagccatcacaatttgtttcagctcggacaggtctttcgcgcacaactacgaaatccagttatgctactggtcgccattgccagatgagcaccaccaccactttgagtagcccatatagcaatggaaaattaagtggggagagtggaaagtttagtgaaatcactgggaaactagttggaggcgtcatgaaattcacatccagcaaggtgcaaaacgatacgtggcttccatgtatgactgggaaggcatgtcgaaaatcaagaacatcaaacaacaaaaaaaatgatgaatctgaatcaagtttcattcagaaggcacttgtcattgagaagattagacttttttgggctgataaatatcgtccacaaaatttaaatggatttacttgccacagggagcaagtccagcagcttaaacaatcggtctctgcagaattttgcccacatattattttcaaaggtcctccaggatcaggaaagagatctttgtgcagagctgtcctcactgaaatttttggcgattcatctttgaatgtctctcactatttgaagagctgcaatggccaggggtccatatctgtgcctattctcgtcccagtttcatccagcaataaccatgtggaactccacatgaggtttcaatcgaagaacgctagatatgctttgatgactctagcaaatgaaatgtctgataagtgtaaaatcactgagccaattgtgagaaagagctttaaagtgattgttctctatgatgttgataaagtcagccaaaataaccagcgtctgataaaatggataatagattcctcctctgatgcatgcaagataataatgacttgccaggatgaatctaatctcctagattctataaagagtcgttgcaagattatttcaattggtgtgcccagtacacgtgaggtggtagatatccttacctatacatcaagaaaagagagttttgatcttcctacaagttttgctactaccattgcgaatcaatccaggaagaacttgagggaggctatattggctctagaggcatgtaaagccaacaattatcccttcattgatggacaagctataccactaggatgggaggaggttctggaggaacttgcagtagaaattttggatgatcctgcccctaaaaggttatttctggcacgaggcaagctccaaaaactcctggtggaatttgtacctcctaaactaatactccagaagctcgtagaactcttcttgaagggaattcagactggcgtgaagagggaagtctactattggcatgcctactatgacaagaggttgcctgttggtgcaagtgctctgcttaaattggaagaattcgttgccaagttcatgagcatccaccggaagagcatgtcgcatgagcccaagattcctgaggtgccgcagtgaaacctggcagagcatgtcctcgtgcggttcggccgtgtcgaaatcccgtttgtggtggtggtttttctgttttatataattcaccttacgtgatcaactgtcatggtccatgtttttcttgttctatgtatatactatatggtacacatatatgctactactgagtacacaaatatgtccagccgaataaatgtctatacggctataccatctgtgttggcaatatcttgttgcaaaagtttgggagtggacgtataataatcttttgatttgaggtacgtgaattttggctatcagtttgttcttttc

SEQ ID NO: 203597 - DNA, 1871 bp, Zea Mays
gtactggagtacttgccttgatcaccagttggtactattgtgtgcataatgtatgagatcaacttatgagattatggtagaagagtggaatgcccctaagccaatgcatccttctcttttgaatgaggccttgcgatggacagctacagacggacaaaagaaagatctatggtcacccttgccatatcaggggtggaaaccatgcttaacgccatcagtttctcacaaattacctctggaaccaagtggatacatccaagtatttcttgatggtggattgaaccaacaaagaatggggatatgtgatgccattgcagttgcaaagattcttaatgctactcttgtgatcccacatcttgaagtaaaccctgtttggaaggattcaagctcatttgaagaaatttttgatgtggatcactttatcaactccctaaaagatgaagtttccattatcaaagtgcttccaaaagaattttcttggagcacaagagagtactatggcacaggcatccgtgctacaagaataaaaactgcacctcttcatgcctcagcaaattggtatttggagaatgtcagtcctatcctgcaaagctatgggattgttgcgatcgctcccttttctcaccgccttgcatttgatgatttgcctgtggatcttcaacgcttgcgttgtaaagttaacttccaagctctggtcttccgttctcacattatctcacttggagaaacacttgtgaagcgcttgaggtctccggtccgggttcattccagtaaatctatccatcaagttgtaggagacacaaatcaagctgaaaaatatgcagttttgcatctccgttttgataaggatatggctgcacattctgcatgtgactttggaggtggcagagctgaacagctagctcttgctaagtacaggcaagttatatggcaaggaagggtattaaattcacagctaactgatgaggagcttcggaacacaggacgctgcccattgaccccagaagagattgggctgttactggtagcccttggctttgacaacagaactcgactctatcttgcatctcacaaggtttgactcttctgtgctctaaccttttcttgcaggggaaatcaggaagttttaagagcatctccaccagatctcctatttcttctcccctataattagttataagaaacctttcaaaagtaactctatgatataagagacctttgctccagcaaattaccaaaactcatcctgatttaggagagggagaggtctcccctttatttaggagagttggtggtggatttaggagatctcctaaaatatagggataggatatgtgataagagatctactgcagctgttgccttcctatttgatggatagggagagtataggagatctggtggagatgctctaacacgcctcacatatccaggtatatggtggagaagccaggatctctagcttgcgcaaactatttccgttgatggaggacaagaggagccttgcatctgaagatgaacttgctaatgttgaagggaaggcttctgttctagcagctcttgactattatatcagcatgcatagcgacattttcatatctgcatctcctggaaacatgcacaatgctttggtggctcaccgaagctatgagaacttgaagaccataaggccaaacatggcactgcttgggcgcacctttgcgaataagagcatggagtggccagagtttcagcaggttgtacaggcaggacacaaaggaagatacgggcaaatccggttgagaaaggcaacgcaatccatctacacttatcctgcacctgacttgccgaactatgtgcttggagcgaaactgaccctgttcgaggtttag

SEQ ID NO: 203598 - DNA, 1949 bp, Zea Mays
aagaaatccaaatttgtcacgaatctgatggtatatgtattccctgttaatccaaatttctcacgaatcagatggtatccgtattccctgttgttccctctccgaattcgaccccgccgctaaaccccgcaccggttgccgaggcgtctcccgctccagctccgactctcacgcgactagggttctgtgcgtccacttccccgtcggcgcaatggaggtcaagaagtgaagccaggagccacggtttcttgcaaagttggtgatggcttggttatccacctttcacaggctgcactgggggaatcaaagaaagcgagtgagaatgccattttgtctgttaatattgatgataagaaactagtgcttggaaccttatcagttgagaagcatcctcagatctcttgtgatcttgtatttgataaggattttgagctaccacacaattcaaaaacacgtagcgttttcttccgtggctacaagtcccctgttcctctgtttgagtctaattctggtgaagatagttccgatgaagagctaaaaaccgatcaaattccattgcagaataatgaaattaaaatttctgcggcaaaggttcctgcgaaggatgatgatgatgatgttttcattattctagcgatgatgatgatgatttatagcagtgatgatgatgatgatgatttcactactagtgatagtgataatgaaatgtctgaggaagatgactccagtgatgaagatgaaatgtctgaggaagatgactccagtgatgaagatgaaatgtcaggtggtgctgatcctagtgatgattccagtgatgaatctggttcagaacatacttctgccccaaagaagactgatgtagtagttggcaagaagagagcaatcaaagctgaggcaccttatggtaagaaggctaagtctgaacaatcttctcagaaaacaggtgagctactacttttatgttcttataaagcccaactaaaaacaggtgagctactacttttatgtagactatcttcagtagacgaccatatctcactctctatttcaaacttcactctgcaaacagtgcaatctacagtataaaacaatattttacacggcctgctggagatggccttaaagcccaactaatggatgtgtaacgttaacatgtgaattgaactcttttttgtccttacaaagaccactctttttatgttcttataaagcccaaactctaagggatgtgtaaggttaacatgtgaatgtttaactatattttcgtttacctaaggtgacaaggcttcaacttctcatcctgcaaagcagtccatcaagactcctgcagacaaatctaggaagacccccacagctgacaagaaatcccccaaatctgggagccatggctgcaagtaacgcaacaaatctttcagcagtgcgtcagcactttagtcccatcagaagccaaaaaagcatgaagcctagaggagcatgtgctgtaccttataggttgatctacttgaattatcaaaatcagtggtcttatttttgaacttgaaaatatcaagtttggaacttgcctagtagttatgcgattagtggtcttactatttttaaacttaggaaatctcaagtttggaacatacctggtatgtcttgttaataacatggcaaatagctaacaatgggaaacgtcaaaggttggcccagtattggtcgtggttgaatgatgctaatgtttgaattgagtatgtgacccgtaagggagaatctttgctatctggtagtggcctaacgaagaccagagcatataaggctgcccgcagtggaggactgggtgctggactctatcccatatagcgtaaagaaacacctacagcgggtgactgggtgctagactctaagcgtgatcgagctgcaaatatagagttcggacgcacatgcgctaaacgaggcatgcaagcaag

SEQ ID NO: 203599 - DNA, 1099 bp, Zea Mays
ccctgttgttccctctccgaattcgaccccgccgctaaaccccgcaccggttgccgaggcgtctcccgctccagctccgactctcacgcgactagggttctgtgcgtccacttccccgtcggcgcaatggaggtcaagaagtgaagccaggagccacggtttcttgcaaagttggtgatggcttggttatccacctttcacaggctgcactgggggaatcaaagaaagcgagtgagaatgccattttgtctgttaatattgatgataagaaactagtgcttggaaccttatcagttgagaagcatcctcagatctcttgtgatcttgtatttgataaggattttgagctaccacacaattcaaaaacacgtagcgttttcttccgtggctacaagtcccctgttcctctgtttgagtctaattctggtgaagatagttccgatgaagagctaaaaaccgatcaaattccattgcagaataatgaaattaaaatttctgcggcaaaggttcctgcgaaggatgatgatgatgatgttttcattattctagcgatgatgatgatgatttatagcagtgatgatgatgatgatgatttcactactagtgatagtgataatgaaatgtctgaggaagatgactccagtgatgaagatgaaatgtctgaggaagatgactccagtgatgaagatgaaatgtcaggtggtgctgatcctagtgatgattccagtgatgaatctggttcagaacatacttctgccccaaagaagactgatgtagtagttggcaagaagagagcaatcaaagctgaggcaccttatggtaagaaggctaagtctgaacaatcttctcagaaaacaggtgacaaggcttcaacttctcatcctgcaaagcagtccatcaagactcctgcagacaaatctaggaagacccccacagctgacaagaaatcccccaaatctgggagccatggctgcaagtaacgcaacaagtcggtgctgagaaaaggaagtaaagtccatcgtgttcgtactcttcgtcttcgattctgtcaaaggtcgtcgatccaagccatcgaaggtgattggagtctcctccttgc

SEQ ID NO: 203600 - DNA, 1433 bp, Zea Mays
tagttcgcaaaaaaacctgaatacatagaaacaatgttcaacagtgaatgcaggaattttgtgcatgaattgagctgggaacaaataaagtatacttcaggttcaggggtagtggaaactttttatttgaatgctggaccaaagtgtcattcaataatcaatatacatggtcatgtgctgaacctagccatccagcaacaaagaaagtgatcctctcctcaagagtcaagactgctgaaggcattgatcatataattatacttgtgtgtgtgaaaagtttcacacgatgattatgatgtcttggatgaatcatcatgttctggatttttttttggttttgtattttgttactaactgcttcagctgcctcctgaaattctcaagttgcatgactaatccaggagcatcagatctctaaaagaatgtaaaacaagaattgaaagacttattttatgtgctgatttctaacgaaaccattagtttttaccataccaccattattacttttaaataaagttaaattgttttataaaatttctaggagtttctaggatgcaatttggtttctcaacctaccattcatattctttttatgcatgtatatatatttttttcactcagtaagtattgtttcagtgcataactatgcaatgagggcatgaggcctgtttgccatctcaatatgcgcagtgcaccgtggagatacttagttgaaaagatgaggctgatgctatcatgtccagattgaacattgatgattatcagaaagaaggcagtcaaccaacactcctgatcacatctgacatagtggtcgtccatgaagggattattagagaaaaaccaaccaccaaggaagaagcacggcaattcctgaaaggtttatttccacgatataccagatgaggtcatcaagagcttgatcgatgagggagtagtatttagggtcgcaggtggtttgctgcttgaacatccattgacgctgccgtttgtcgaagcagtggttggttctagtgacagtgtcatggggctgtcaaaggaggttgcaaacaagttaattcacgacgcactgtctacttagcgtagcaatttcagcactactgtttctgatcaaattcttactgcactcacctggagatgtgatcaagcagagagcatatctggggatacccatagtgattcatgtatttttaaacgttaaaccaagacaggcgcacctggcattgcaaattgtgatcaggttgtacttgccttctgtttcacttgaaggatacgttgatgcttcttttagtgggtcagttggtatgatttgtaatatactgatatacataatctcgtctctgatatgtgactgttcgttgcaattgttaaagaacacaacaaatgcatggatgaaaatggatccgatatgaacagctacgcggaataaaaagttg

SEQ ID NO: 203601 - DNA, 1444 bp, Zea Mays
tagttcgcaaaaaaacctgaatacatagaaacaatgttcaacagtgaatgcaggaattttgtgcatgaattgagctgggaacaaataaagtatacttcaggttcaggggtagtggaaactttttatttgaatgctggaccaaagtgtcattcaataatcaatatacatggtcatgtgctgaacctagccatccagcaacaaagaaagtgatcctctcctcaagagtcaagactgctgaaggcattgatcatataattatacttgtgtgtgtgaaaagtttcacacgatgattatgatgtcttggatgaatcatcatgttctggatttttttttggttttgtattttgttactaactgcttcagctgcctcctgaaattctcaagttgcatgactaatccaggagcatcagatctctaaaagaatgtaaaacaagaattgaaagacttattttatgtgctgatttctaacgaaaccattagtttttaccataccaccattattacttttaaataaagttaaattgttttataaaatttctaggagtttctaggatgcaatttggtttctcaacctaccattcatattctttttatgcatgtatatatatttttttcactcagtaagtattgtttcagtgcataactatgcaatgagggcatgaggcctgtttgccatctcaatatgcgcagtgcaccgtggagatacttagttgaaaagatgaggctgatgctatcatgtccagattgaacattgatgattatcagaaagaaggcagtcaaccaacactcctgatcacatctgacatattgactttgaggtggtcgtccatgaagggattattagagaaaaaccaaccaccaaggaagaagcacggcaattcctgaaaggtttatttccacgatataccagatgaggtcatcaagagcttgatcgatgagggagtagtatttagggtcgcaggtggtttgctgcttgaacatccattgacgctgccgtttgtcgaagcagtggttggttctagtgacagtgtcatggggctgtcaaaggaggttgcaaacaagttaattcacgacgcactgtctacttagcgtagcaatttcagcactactgtttctgatcaaattcttactgcactcacctggagatgtgatcaagcagagagcatatctggggatacccatagtgattcatgtatttttaaacgttaaaccaagacaggcgcacctggcattgcaaattgtgatcaggttgtacttgccttctgtttcacttgaaggatacgttgatgcttcttttagtgggtcagttggtatgatttgtaatatactgatatacataatctcgtctctgatatgtgactgttcgttgcaattgttaaagaacacaacaaatgcatggatgaaaatggatccgatatgaacagctacgcggaataaaaagttg

SEQ ID NO: 203602 - DNA, 1573 bp, Zea Mays
attaaaaaatgtttataattttaggatttttgtagcttctgtgaaattttggtgcaaatttatgactaaagttcacttggggtctgatttatgttgatcttctaactatgttgtaatgggtcagttgatagctattaaggcggcgtttggttcctagcagattttgagtattggatactgtacaaaacccaatgcaaaatccattatcaggttatggatagattctgagattctggcacacaatccaatgcagaatttaagaggtgtttggttcataatgggattctagaatgaaattctgaaaatgaagtacgaaacaaacagggcttaagttggccaagtttgcaactgctttaggtggccatctgaagcataaattaggaagttccttaaagtgcatgtaaattttctaggtgaatacgatattacacaacaaattaaattcgcaaaatggtccagcaatgtgttgcaattgatggcattcacatttttttcttgttccttggcccatttagttgactacatcagtctgcctgaattaggatcaacttcaacatgggtttcagttttgttagtgttagacaaacaaattttgcacacatacttgtttttaaagctacatgaaaactaatacttctttctgtcggagaacaaggtggtggaagaaatgtccaaccaaattgggccatggctgttttttctatcatcaattgtttttttctcccccagcatggaattaaccactttaagcatctttcaggctgatgctatcatgtccagattgaacattgatgattatcagaaagaaggcagtcaaccaacactcctgatcacatctgacatattgactttgaggtggtcgtccatgaagggattattagagaaaaaccaaccaccaaggaagaagcacggcaattcctgaaaggctattccggaggtcacgtgtcaactgttgggtctgttgttgtaactaatcttacaactgggaagagacttggaagtttggacaaagctgaggtttatttccacgatataccagatgaggtcatcaagagcttgatcgatgagggagtagtatttagggtcgcaggtggtttgctgcttgaacatccattgacgctgccgtttgtcgaagcagtggttggttctagtgacagtgtcatggggctgtcaaaggaggttgcaaacaagttaattcacgacgcactgtctacttagcgtagcaatttcagcactactgtttctgatcaaattcttactgcactcacctggagatgtgatcaagcagagagcatatctggggatacccatagtgattcatgtatttttaaacgttaaaccaagacaggcgcacctggcattgcaaattgtgatcaggttgtacttgccttctgtttcacttgaaggatacgttgatgcttcttttagtgggtcagttggtatgatttgtaatatactgatatacataatctcgtctctgatatgtgactgttcgttgcaattgttaaagaacacaacaaatgcatggatgaaaatggatccgatatgaacagctacgcggaataaaaagttg

SEQ ID NO: 203603 - DNA, 1202 bp, Zea Mays
ctttctgtcggagaacaaggtggtggaagaaatgtccaaccaaattgggccatggctgttttttctatcatcaattgtttttttctcccccagcatggaattaaccactttaagcatctttcaggctgatgctatcatgtccagattgaacattgatgattatcagaaagaaggcagtcaaccaacactcctgatcacatctgacataggattattagagaaaaaccaaccaccaaggaagaagcacggcaattcctgaaaggctattccggaggtcacgtgtcaactgttgggtctgttgttgtaactaatcttacaactgggaagagacttggaagtttggacaaagctgaggcaattttcactttttagccaaaagactctttcatcaaggctacttttgttatattgccattcaaatcagatttattagtgcagaaggatatatggtccaatttagatgcgtaatctctaatatcggtaatacttatttaatagaaatgaattcaccaatgtagggtgatgaatattggtagatgaggttcttcaaatttattgtgtgaaaaggaagtttttgtcttgaatgtgatatttatggatgataattgaccaaggaagttttgcattatcattctacactgtgcaggtttatttccacgatataccagatgaggtcatcaagagcttgatcgatgagggagtagtatttagggtcgcaggtggtttgctgcttgaacatccattgacgctgccgtttgtcgaagcagtggttggttctagtgacagtgtcatggggctgtcaaaggaggttgcaaacaagttaattcacgacgcactgtctacttagcgtagcaatttcagcactactgtttctgatcaaattcttactgcactcacctggagatgtgatcaagcagagagcatatctggggatacccatagtgattcatgtatttttaaacgttaaaccaagacaggcgcacctggcattgcaaattgtgatcaggttgtacttgccttctgtttcacttgaaggatacgttgatgcttcttttagtgggtcagttggtatgatttgtaatatactgatatacataatctcgtctctgatatgtgactgttcgttgcaattgttaaagaacacaacaaatgcatggatgaaaatggatccgatatgaacagctacgcggaataaaaagttg

SEQ ID NO: 203604 - DNA, 814 bp, Zea Mays
ctgtcggagaacaaggtggtggaagaaatgtccaaccaaattgggccatggctgttttttctatcatcaattgtttttttctcccccagcatggaattaaccactttaagcatctttcaggctgatgctatcatgtccagattgaacattgatgattatcagaaagaaggcagtcaaccaacactcctgatcacatctgacataggattattagagaaaaaccaaccaccaaggaagaagcacggcaattcctgaaaggtttatttccacgatataccagatgaggtcatcaagagcttgatcgatgagggagtagtatttagggtcgcaggtggtttgctgcttgaacatccattgacgctgccgtttgtcgaagcagtggttggttctagtgacagtgtcatggggctgtcaaaggaggttgcaaacaagttaattcacgacgcactgtctacttagcgtagcaatttcagcactactgtttctgatcaaattcttactgcactcacctggagatgtgatcaagcagagagcatatctggggatacccatagtgattcatgtatttttaaacgttaaaccaagacaggcgcacctggcattgcaaattgtgatcaggttgtacttgccttctgtttcacttgaaggatacgttgatgcttcttttagtgggtcagttggtatgatttgtaatatactgatatacataatctcgtctctgatatgtgactgttcgttgcaattgttaaagaacacaacaaatgcatggatgaaaatggatccgatatgaacagctacgcggaataaaaagttg

SEQ ID NO: 203605 - DNA, 760 bp, Zea Mays
ctgtcggagaacaaggtggtggaagaaatgtccaaccaaattgggccatggctgttttttctatcatcaattgtttttttctcccccagcatggaattaaccactttaagcatctttcaggctgatgctatcatgtccagattgaacattgatgattatcagaaagaaggcagtcaaccaacactcctgatcacatctgacatagtttatttccacgatataccagatgaggtcatcaagagcttgatcgatgagggagtagtatttagggtcgcaggtggtttgctgcttgaacatccattgacgctgccgtttgtcgaagcagtggttggttctagtgacagtgtcatggggctgtcaaaggaggttgcaaacaagttaattcacgacgcactgtctacttagcgtagcaatttcagcactactgtttctgatcaaattcttactgcactcacctggagatgtgatcaagcagagagcatatctggggatacccatagtgattcatgtatttttaaacgttaaaccaagacaggcgcacctggcattgcaaattgtgatcaggttgtacttgccttctgtttcacttgaaggatacgttgatgcttcttttagtgggtcagttggtatgatttgtaatatactgatatacataatctcgtctctgatatgtgactgttcgttgcaattgttaaagaacacaacaaatgcatggatgaaaatggatccgatatgaacagctacgcggaataaaaagttg

SEQ ID NO: 203606 - DNA, 3501 bp, Zea Mays
caaaaagtttctgccgacctcagcggacccgagggccaacgaagcccaaagcccacagacgacgctacggcctcgccttccgtttctgcacgttccttctctggaagccgaggcccgctcgctcgaagcggctgttgcgccgctcaatttcaatccggaggctgaagccacgggggagaagggcgcatggtttccgcagcgcgcgctgcatcccttctggccttgttgcggcctccggagcgcggatcttgacatcggcgacgacaacggcgaggaggaggatcttctcacggcactgcgaccctgcgagatgatattgtttggacccggtaatttatgatgcctcagcaattgaatggttgtgtgacgattgtcctccaaaacataatgaagaaacacaaaaggcagtgggtgctgttgggcctaccatgaacacaatggagtgtctggacctctcaatgggaaaagatggctgctctttttcacagaattgtgttgaaggcttcacccaaggaacaaagtctgactttttttcttcaatcaatgatgttgagacatcatatccatttgttaagggtagttcttgtcctacactaccgaatatggagcaaaaagatggtgtattggaaaatgcggaacaacctcatcttttggagatggttaatcttgatggtacaagccattcacttgtggaccctccattagaaatcaaagaacaaggagcggaagctggcttatttgcttcagttgaagatgtcgagcaaacccatcccattttaactgatgaaactagtcctatatggtcaagtgaggagcaagtagacggttcttgtcctgcatcggaaagccgggagcaacctgttcctttcaaggtggttatactcggaccatggcatgatgtgccaaatagcatcctaagatcaaggcctccttcaaactactcacagtccatgcaaggatcagatctatatgttggaaatgtggatgtattggatctttctaaggagcagttggactcgaggttaaaacctgaagaacaaggagcggaggatggcttatttgcctcagtggaatatgttgagcaaacacatcccaattttactgaggagaaagtagatggttctattcctacaccagcaagttcggagcaacctgatcagttggaggtggttagaccatgggatgatgcgccgaatagtaccctaaggtcaaagcctccatcaaactactcacagccaatgcaaggatcagatctagatgttaggaatatggatgccttggatccatctaaggagtggttggactcaaggttattgtcaaatacggtagagccatcaagttcctcaaatggaggaggcacatctgttgagaaagacaacattgaaaaaacagaacgcttgtcaggcattgacaccgtcacccctggactggataatgtccagggatcaaatccctcagcagagccatcaagttcctcaactggagaaggaaactcagctgttgaaaaacacagtgctgaaatgacagaatgcttgttaggcatgggaattttgaaccctgcactgcataatgtccaggtattgagtccctcgacaccaaaagaatgcttggtttctagcgcagacaagtcagatgtagcaaataggtcagatgaaattaatcacagtctcgatgattttaaccaaagtaatcccaagccagtgctgaagggaagagtctccaaaatgatgtgcccaagacttgcgtttcaactgccaaaagtgttgcctgtatgcgaacatcacaaaagggagatgtcattgccttccaagcatgttagtccacggaaagcaacaaaaagtagctttagaaagcaatatgaaggaccaaacagacatgtttcacgtcatactgaacatcagaaaaccaaactcgttatgaaggacagaaatacaggtcctgctcatatgagaagttgtaggccaacaaagcaaattgattgtacttgctcaagtgcttccttggattcatctacaaagactaaggaagtaaatgatgcagaaccaagatgttctaaatctgtaaaaacttttgagaatgtcatggccaagaaaagaaaacgacctattctatcatatgatgaagatgccaaggccatgcagatggaagtgaggatgcgcaggagacacagggaaagtggtgtgatgaagctgcgaagatccacagaaaattctgatgaagcgatgtgtccaggaaattcaaataatcaacttaccaatgatcatacgaaggcaaggaagcagagaagggccaacaaagacaataaaacaccaccagtgaacgctagtgttccatgcacacagattgatgctgcacgattagcatcagatcagcaaagctttatttgcacgcgacccattgatagaccttactggactggaatcatgaagattggccaggaatatatttcattggttgcacacctgtcaaatcaagcatgcaagaaggtgcaggaattatcgatgtcattaccaccactaatgaaagtaacaaagcattcaaagttgaaagcctggccagggaggtggaaggcatcggaacctactgctgaatgcgttggcttgtatttcttctcagataatatgagggaactggatcaacttgtgcattatctcaatgatcatagcttagtcctaaaatatgtcgttggctttgccaagctgctgatctccccgtctgttttcctaccagagcaatgccaaacgttccaagggaaacgctatctgtggggagtgttcaagcgcaggatgaatacggggagaatacatcatgtgaatgcaaagtgacaccctagtccaataaatccatgttgtgaagggtatcgctagctcaaagagacaacagttcgccaagcactgttgatgcctttttgagctgagaccgacccctgtgatcataagcagccccgcgagaactctcccctacccaggctatcgggccttgtcattgtgcggacgtctgaggtcggagcacttcatttgtttgggagctggaaaaatgaaggtgcactggttggtttctctgaacttgtgaaagggttagcgaaggaccgtactgtaatgttcatggcctggaggaatgatgcagcaagtaggatcagaaatcagaactagccagcgacaatcacgctccagcttctgaaacgttgctgtagccttttgttgatgttcaggactgggagctagattgtcacgatttgacactgaggacgttactgtgcctgcaagcctaacctaagatgtatcaagcatcaagtgctgctgctgctgctatggaaggtcttagccaaaattaaattatgtttctaagctctgcatgcatcttaacctgcgctaataggttttcttgatggcctcaatgggagcagcaggaacctactactttttatgcgcataaactggcacttcgcatgatgtacttgttcataagttggtcaaaaagtcggttccgtggggtaaatcc

SEQ ID NO: 203607 - DNA, 3547 bp, Zea Mays
gaagcccaaagcccacagacgacgctacggcctcgccttccgtttctgcacgttccttctctggaagccgaggcccgctcgctcgaagcggctgttgcgccgctcaatttcaatccggaggctgaagccacgggggagaagggcgcatggtttccgcagcgcgcgctgcatcccttctggccttgttgcggcctccggagcgcggatcttgacatcggcgacgacaacggcgaggaggaggatcttctcacggcactgcgaccctgcgagatggacatcgtatgtgaagtgtgtggtgttgttggctacaggcaacttttaatacaatgtagcaattgcaaaaatgctgcaaggcacctatattgtttggacccggtaatttatgatgcctcagcaattgaatggttgtgtgacgattgtcctccaaaacataatgaagaaacacaaaaggcagtgggtgctgttgggcctaccatgaacacaatggagtgtctggacctctcaatgggaaaagatggctgctctttttcacagaattgtgttgaaggcttcacccaaggaacaaagtctgactttttttcttcaatcaatgatgttgagacatcatatccatttgttaagggtagttcttgtcctacactaccgaatatggagcaaaaagatggtgtattggaaaatgcggaacaacctcatcttttggagatggttaatcttgatggtacaagccattcacttgtggaccctccattagaaatcaaagaacaaggagcggaagctggcttatttgcttcagttgaagatgtcgagcaaacccatcccattttaactgatgaaactagtcctatatggtcaagtgaggagcaagtagacggttcttgtcctgcatcggaaagccgggagcaacctgttcctttcaaggtggttatactcggaccatggcatgatgtgccaaatagcatcctaagatcaaggcctccttcaaactactcacagtccatgcaaggatcagatctatatgttggaaatgtggatgtattggatctttctaaggagcagttggactcgaggttaaaacctgaagaacaaggagcggaggatggcttatttgcctcagtggaatatgttgagcaaacacatcccaattttactgaggagaaagtagatggttctattcctacaccagcaagttcggagcaacctgatcagttggaggtggttagaccatgggatgatgcgccgaatagtaccctaaggtcaaagcctccatcaaactactcacagccaatgcaaggatcagatctagatgttaggaatatggatgccttggatccatctaaggagtggttggactcaaggttattgtcaaatacggtagagccatcaagttcctcaaatggaggaggcacatctgttgagaaagacaacattgaaaaaacagaacgcttgtcaggcattgacaccgtcacccctggactggataatgtccagggatcaaatccctcagcagagccatcaagttcctcaactggagaaggaaactcagctgttgaaaaacacagtgctgaaatgacagaatgcttgttaggcatgggaattttgaaccctgcactgcataatgtccaggtattgagtccctcgacaccaaaagaatgcttggtttctagcgcagacaagtcagatgtagcaaataggtcagatgaaattaatcacagtctcgatgattttaaccaaagtaatcccaagccagtgctgaagggaagagtctccaaaatgatgtgcccaagacttgcgtttcaactgccaaaagtgttgcctgtatgcgaacatcacaaaagggagatgtcattgccttccaagcatgttagtccacggaaagcaacaaaaagtagctttagaaagcaatatgaaggaccaaacagacatgtttcacgtcatactgaacatcagaaaaccaaactcgttatgaaggacagaaatacaggtcctgctcatatgagaagttgtaggccaacaaagcaaattgattgtacttgctcaagtgcttccttggattcatctacaaagactaaggaagtaaatgatgcagaaccaagatgttctaaatctgtaaaaacttttgagaatgtcatggccaagaaaagaaaacgacctattctatcatatgatgaagatgccaaggccatgcagatggaagtgaggatgcgcaggagacacagggaaagtggtgtgatgaagctgcgaagatccacagaaaattctgatgaagcgatgtgtccaggaaattcaaataatcaacttaccaatgatcatacgaaggcaaggaagcagagaagggccaacaaagacaataaaacaccaccagtgaacgctagtgttccatgcacacagattgatgctgcacgattagcatcagatcagcaaagctttatttgcacgcgacccattgatagaccttactggactggaatcatgaagattggccaggaatatatttcattggttgcacacctgtcaaatcaagcatgcaagaaggtgcaggaattatcgatgtcattaccaccactaatgaaagtaacaaagcattcaaagttgaaagcctggccagggaggtggaaggcatcggaacctactgctgaatgcgttggcttgtatttcttctcagataatatgagggaactggatcaacttgtgcattatctcaatgatcatagcttagtcctaaaatatgtcgttggctttgccaagctgctgatctccccgtctgttttcctaccagagcaatgccaaacgttccaagggaaacgctatctgtggggagtgttcaagcgcaggatgaatacggggagaatacatcatgtgaatgcaaagtgacaccctagtccaataaatccatgttgtgaagggtatcgctagctcaaagagacaacagttcgccaagcactgttgatgcctttttgagctgagaccgacccctgtgatcataagcagccccgcgagaactctcccctacccaggctatcgggccttgtcattgtgcggacgtctgaggtcggagcacttcatttgtttgggagctggaaaaatgaaggtgcactggttggtttctctgaacttgtgaaagggttagcgaaggaccgtactgtaatgttcatggcctggaggaatgatgcagcaagtaggatcagaaatcagaactagccagcgacaatcacgctccagcttctgaaacgttgctgtagccttttgttgatgttcaggactgggagctagattgtcacgatttgacactgaggacgttactgtgcctgcaagcctaacctaagatgtatcaagcatcaagtgctgctgctgctgctatggaaggtcttagccaaaattaaattatgtttctaagctctgcatgcatcttaacctgcgctaataggttttcttgatggcctcaatgggagcagcaggaacctactactttttatgcgcataaactggcacttcgcatgatgtacttgttcataagttggtcaaaaagtcggttccgtggggtaaatcc

SEQ ID NO: 203608 - DNA, 3136 bp, Zea Mays
cccaaagcccacagacgacgctacggcctcgccttccgtttctgcacgttccttctctggaagccgaggcccgctcgctcgaagcggctgttgcgccgctcaatttcaatccggaggctgaagccacgggggagaagggcgcatggtttccgcagcgcgcgctgcatcccttctggccttgttgcggcctccggagcgcggatcttgacatcggcgacgacaacggcgaggaggaggatcttctcacggcactgcgaccctgcgagatgatattgtttggacccggtaatttatgatgcctcagcaattgaatggttgtgtgacgattgtcctccaaaacataatgaagaaacacaaaaggcagtgggtgctgttgggcctaccatgaacacaatggagtgtctggacctctcaatgggaaaagatggctgctctttttcacagaattgtgttgaaggcttcacccaaggaacaaagtctgactttttttcttcaatcaatgatgttgagacatcatatccatttgttaagggtagttcttgtcctacactaccgaatatggagcaaaaagatggtgtattggaaaatgcggaacaacctcatcttttggagatggttaatcttgatggtacaagccattcacttgtggaccctccattagaaatcaaagaacaaggagcggaagatggcttatttgcctcagtggaatatgttgagcaaacacatcccaattttactgaggagaaagtagatggttctattcctacaccagcaagttcggagcaacctgatcagttggaggtggttagaccatgggatgatgcgccgaatagtaccctaaggtcaaagcctccatcaaactactcacagccaatgcaaggatcagatctagatgttaggaatatggatgccttggatccatctaaggagtggttggactcaaggttattgtcaaatacggtagagccatcaagttcctcaaatggaggaggcacatctgttgagaaagacaacattgaaaaaacagaacgcttgtcaggcattgacaccgtcacccctggactggataatgtccagggatcaaatccctcagcagagccatcaagttcctcaactggagaaggaaactcagctgttgaaaaacacagtgctgaaatgacagaatgcttgttaggcatgggaattttgaaccctgcactgcataatgtccaggtattgagtccctcgacaccaaaagaatgcttggtttctagcgcagacaagtcagatgtagcaaataggtcagatgaaattaatcacagtctcgatgattttaaccaaagtaatcccaagccagtgctgaagggaagagtctccaaaatgatgtgcccaagacttgcgtttcaactgccaaaagtgttgcctgtatgcgaacatcacaaaagggagatgtcattgccttccaagcatgttagtccacggaaagcaacaaaaagtagctttagaaagcaatatgaaggaccaaacagacatgtttcacgtcatactgaacatcagaaaaccaaactcgttatgaaggacagaaatacaggtcctgctcatatgagaagttgtaggccaacaaagcaaattgattgtacttgctcaagtgcttccttggattcatctacaaagactaaggaagtaaatgatgcagaaccaagatgttctaaatctgtaaaaacttttgagaatgtcatggccaagaaaagaaaacgacctattctatcatatgatgaagatgccaaggccatgcagatggaagtgaggatgcgcaggagacacagggaaagtggtgtgatgaagctgcgaagatccacagaaaattctgatgaagcgatgtgtccaggaaattcaaataatcaacttaccaatgatcatacgaaggcaaggaagcagagaagggccaacaaagacaataaaacaccaccagtgaacgctagtgttccatgcacacagattgatgctgcacgattagcatcagatcagcaaagctttatttgcacgcgacccattgatagaccttactggactggaatcatgaagattggccaggaatatatttcattggttgcacacctgtcaaatcaagcatgcaagaaggtgcaggaattatcgatgtcattaccaccactaatgaaagtaacaaagcattcaaagttgaaagcctggccagggaggtggaaggcatcggaacctactgctgaatgcgttggcttgtatttcttctcagataatatgagggaactggatcaacttgtgcattatctcaatgatcatagcttagtcctaaaatatgtcgttggctttgccaagctgctgatctccccgtctgttttcctaccagagcaatgccaaacgttccaagggaaacgctatctgtggggagtgttcaagcgcaggatgaatacggggagaatacatcatgtgaatgcaaagtgacaccctagtccaataaatccatgttgtgaagggtatcgctagctcaaagagacaacagttcgccaagcactgttgatgcctttttgagctgagaccgacccctgtgatcataagcagccccgcgagaactctcccctacccaggctatcgggccttgtcattgtgcggacgtctgaggtcggagcacttcatttgtttgggagctggaaaaatgaaggtgcactggttggtttctctgaacttgtgaaagggttagcgaaggaccgtactgtaatgttcatggcctggaggaatgatgcagcaagtaggatcagaaatcagaactagccagcgacaatcacgctccagcttctgaaacgttgctgtagccttttgttgatgttcaggactgggagctagattgtcacgatttgacactgaggacgttactgtgcctgcaagcctaacctaagatgtatcaagcatcaagtgctgctgctgctgctatggaaggtcttagccaaaattaaattatgtttctaagctctgcatgcatcttaacctgcgctaataggttttcttgatggcctcaatgggagcagcaggaacctactactttttatgcgcataaactggcacttcgcatgatgtacttgttcataagttggtcaaaaagtcggttccgtggggtaaatcc

SEQ ID NO: 203609 - DNA, 3559 bp, Zea Mays
caaagcccacagacgacgctacggcctcgccttccgtttctgcacgttccttctctggaagccgaggcccgctcgctcgaagcggctgttgcgccgctcaatttcaatccggaggctgaagccacgggggagaagggcgcatggtttccgcagcgcgcgctgcatcccttctggccttgttgcggcctccggagcgcggatcttgacatcggcgacgacaacggcgaggaggaggatcttctcacggcactgcgaccctgcgagatggacatcgtatgtgaagtgtgtggtgttgttggctacaggcaacttttaatacaatgtagcaattgcaaaaatgctgcaaggcacctatattgtttggacccggtaatttatgatgcctcagcaattgaatggttgtgtgacgattgtcctccaaaacataatgaagcttctgatcttactgtagaaacacaaaaggcagtgggtgctgttgggcctaccatgaacacaatggagtgtctggacctctcaatgggaaaagatggctgctctttttcacagaattgtgttgaaggcttcacccaaggaacaaagtctgactttttttcttcaatcaatgatgttgagacatcatatccatttgttaagggtagttcttgtcctacactaccgaatatggagcaaaaagatggtgtattggaaaatgcggaacaacctcatcttttggagatggttaatcttgatggtacaagccattcacttgtggaccctccattagaaatcaaagaacaaggagcggaagctggcttatttgcttcagttgaagatgtcgagcaaacccatcccattttaactgatgaaactagtcctatatggtcaagtgaggagcaagtagacggttcttgtcctgcatcggaaagccgggagcaacctgttcctttcaaggtggttatactcggaccatggcatgatgtgccaaatagcatcctaagatcaaggcctccttcaaactactcacagtccatgcaaggatcagatctatatgttggaaatgtggatgtattggatctttctaaggagcagttggactcgaggttaaaacctgaagaacaaggagcggaggatggcttatttgcctcagtggaatatgttgagcaaacacatcccaattttactgaggagaaagtagatggttctattcctacaccagcaagttcggagcaacctgatcagttggaggtggttagaccatgggatgatgcgccgaatagtaccctaaggtcaaagcctccatcaaactactcacagccaatgcaaggatcagatctagatgttaggaatatggatgccttggatccatctaaggagtggttggactcaaggttattgtcaaatacggtagagccatcaagttcctcaaatggaggaggcacatctgttgagaaagacaacattgaaaaaacagaacgcttgtcaggcattgacaccgtcacccctggactggataatgtccagggatcaaatccctcagcagagccatcaagttcctcaactggagaaggaaactcagctgttgaaaaacacagtgctgaaatgacagaatgcttgttaggcatgggaattttgaaccctgcactgcataatgtccaggtattgagtccctcgacaccaaaagaatgcttggtttctagcgcagacaagtcagatgtagcaaataggtcagatgaaattaatcacagtctcgatgattttaaccaaagtaatcccaagccagtgctgaagggaagagtctccaaaatgatgtgcccaagacttgcgtttcaactgccaaaagtgttgcctgtatgcgaacatcacaaaagggagatgtcattgccttccaagcatgttagtccacggaaagcaacaaaaagtagctttagaaagcaatatgaaggaccaaacagacatgtttcacgtcatactgaacatcagaaaaccaaactcgttatgaaggacagaaatacaggtcctgctcatatgagaagttgtaggccaacaaagcaaattgattgtacttgctcaagtgcttccttggattcatctacaaagactaaggaagtaaatgatgcagaaccaagatgttctaaatctgtaaaaacttttgagaatgtcatggccaagaaaagaaaacgacctattctatcatatgatgaagatgccaaggccatgcagatggaagtgaggatgcgcaggagacacagggaaagtggtgtgatgaagctgcgaagatccacagaaaattctgatgaagcgatgtgtccaggaaattcaaataatcaacttaccaatgatcatacgaaggcaaggaagcagagaagggccaacaaagacaataaaacaccaccagtgaacgctagtgttccatgcacacagattgatgctgcacgattagcatcagatcagcaaagctttatttgcacgcgacccattgatagaccttactggactggaatcatgaagattggccaggaatatatttcattggttgcacacctgtcaaatcaagcatgcaagaaggtgcaggaattatcgatgtcattaccaccactaatgaaagtaacaaagcattcaaagttgaaagcctggccagggaggtggaaggcatcggaacctactgctgaatgcgttggcttgtatttcttctcagataatatgagggaactggatcaacttgtgcattatctcaatgatcatagcttagtcctaaaatatgtcgttggctttgccaagctgctgatctccccgtctgttttcctaccagagcaatgccaaacgttccaagggaaacgctatctgtggggagtgttcaagcgcaggatgaatacggggagaatacatcatgtgaatgcaaagtgacaccctagtccaataaatccatgttgtgaagggtatcgctagctcaaagagacaacagttcgccaagcactgttgatgcctttttgagctgagaccgacccctgtgatcataagcagccccgcgagaactctcccctacccaggctatcgggccttgtcattgtgcggacgtctgaggtcggagcacttcatttgtttgggagctggaaaaatgaaggtgcactggttggtttctctgaacttgtgaaagggttagcgaaggaccgtactgtaatgttcatggcctggaggaatgatgcagcaagtaggatcagaaatcagaactagccagcgacaatcacgctccagcttctgaaacgttgctgtagccttttgttgatgttcaggactgggagctagattgtcacgatttgacactgaggacgttactgtgcctgcaagcctaacctaagatgtatcaagcatcaagtgctgctgctgctgctatggaaggtcttagccaaaattaaattatgtttctaagctctgcatgcatcttaacctgcgctaataggttttcttgatggcctcaatgggagcagcaggaacctactactttttatgcgcataaactggcacttcgcatgatgtacttgttcataagttggtcaaaaagtcggttccgtggggtaaatcc

SEQ ID NO: 203610 - DNA, 3521 bp, Zea Mays
gacgctacggcctcgccttccgtttctgcacgttccttctctggaagccgaggcccgctcgctcgaagcggctgttgcgccgctcaatttcaatccggaggctgaagccacgggggagaagggcgcatggtttccgcagcgcgcgctgcatcccttctggccttgttgcggcctccggagcgcggatcttgacatcggcgacgacaacggcgaggaggaggatcttctcacggcactgcgaccctgcgagatggacatcgtatgtgaagtgtgtggtgttgttggctacaggcaacttttaatacaatgtagcaattgcaaaaatgctgcaagatattgtttggacccggtaatttatgatgcctcagcaattgaatggttgtgtgacgattgtcctccaaaacataatgaagaaacacaaaaggcagtgggtgctgttgggcctaccatgaacacaatggagtgtctggacctctcaatgggaaaagatggctgctctttttcacagaattgtgttgaaggcttcacccaaggaacaaagtctgactttttttcttcaatcaatgatgttgagacatcatatccatttgttaagggtagttcttgtcctacactaccgaatatggagcaaaaagatggtgtattggaaaatgcggaacaacctcatcttttggagatggttaatcttgatggtacaagccattcacttgtggaccctccattagaaatcaaagaacaaggagcggaagctggcttatttgcttcagttgaagatgtcgagcaaacccatcccattttaactgatgaaactagtcctatatggtcaagtgaggagcaagtagacggttcttgtcctgcatcggaaagccgggagcaacctgttcctttcaaggtggttatactcggaccatggcatgatgtgccaaatagcatcctaagatcaaggcctccttcaaactactcacagtccatgcaaggatcagatctatatgttggaaatgtggatgtattggatctttctaaggagcagttggactcgaggttaaaacctgaagaacaaggagcggaggatggcttatttgcctcagtggaatatgttgagcaaacacatcccaattttactgaggagaaagtagatggttctattcctacaccagcaagttcggagcaacctgatcagttggaggtggttagaccatgggatgatgcgccgaatagtaccctaaggtcaaagcctccatcaaactactcacagccaatgcaaggatcagatctagatgttaggaatatggatgccttggatccatctaaggagtggttggactcaaggttattgtcaaatacggtagagccatcaagttcctcaaatggaggaggcacatctgttgagaaagacaacattgaaaaaacagaacgcttgtcaggcattgacaccgtcacccctggactggataatgtccagggatcaaatccctcagcagagccatcaagttcctcaactggagaaggaaactcagctgttgaaaaacacagtgctgaaatgacagaatgcttgttaggcatgggaattttgaaccctgcactgcataatgtccaggtattgagtccctcgacaccaaaagaatgcttggtttctagcgcagacaagtcagatgtagcaaataggtcagatgaaattaatcacagtctcgatgattttaaccaaagtaatcccaagccagtgctgaagggaagagtctccaaaatgatgtgcccaagacttgcgtttcaactgccaaaagtgttgcctgtatgcgaacatcacaaaagggagatgtcattgccttccaagcatgttagtccacggaaagcaacaaaaagtagctttagaaagcaatatgaaggaccaaacagacatgtttcacgtcatactgaacatcagaaaaccaaactcgttatgaaggacagaaatacaggtcctgctcatatgagaagttgtaggccaacaaagcaaattgattgtacttgctcaagtgcttccttggattcatctacaaagactaaggaagtaaatgatgcagaaccaagatgttctaaatctgtaaaaacttttgagaatgtcatggccaagaaaagaaaacgacctattctatcatatgatgaagatgccaaggccatgcagatggaagtgaggatgcgcaggagacacagggaaagtggtgtgatgaagctgcgaagatccacagaaaattctgatgaagcgatgtgtccaggaaattcaaataatcaacttaccaatgatcatacgaaggcaaggaagcagagaagggccaacaaagacaataaaacaccaccagtgaacgctagtgttccatgcacacagattgatgctgcacgattagcatcagatcagcaaagctttatttgcacgcgacccattgatagaccttactggactggaatcatgaagattggccaggaatatatttcattggttgcacacctgtcaaatcaagcatgcaagaaggtgcaggaattatcgatgtcattaccaccactaatgaaagtaacaaagcattcaaagttgaaagcctggccagggaggtggaaggcatcggaacctactgctgaatgcgttggcttgtatttcttctcagataatatgagggaactggatcaacttgtgcattatctcaatgatcatagcttagtcctaaaatatgtcgttggctttgccaagctgctgatctccccgtctgttttcctaccagagcaatgccaaacgttccaagggaaacgctatctgtggggagtgttcaagcgcaggatgaatacggggagaatacatcatgtgaatgcaaagtgacaccctagtccaataaatccatgttgtgaagggtatcgctagctcaaagagacaacagttcgccaagcactgttgatgcctttttgagctgagaccgacccctgtgatcataagcagccccgcgagaactctcccctacccaggctatcgggccttgtcattgtgcggacgtctgaggtcggagcacttcatttgtttgggagctggaaaaatgaaggtgcactggttggtttctctgaacttgtgaaagggttagcgaaggaccgtactgtaatgttcatggcctggaggaatgatgcagcaagtaggatcagaaatcagaactagccagcgacaatcacgctccagcttctgaaacgttgctgtagccttttgttgatgttcaggactgggagctagattgtcacgatttgacactgaggacgttactgtgcctgcaagcctaacctaagatgtatcaagcatcaagtgctgctgctgctgctatggaaggtcttagccaaaattaaattatgtttctaagctctgcatgcatcttaacctgcgctaataggttttcttgatggcctcaatgggagcagcaggaacctactactttttatgcgcataaactggcacttcgcatgatgtacttgttcataagttggtcaaaaagtcggttccgtggggtaaatcc

SEQ ID NO: 203611 - DNA, 3489 bp, Zea Mays
gcacgttccttctctggaagccgaggcccgctcgctcgaagcggctgttgcgccgctcaatttcaatccggaggctgaagccacgggggagaagggcgcatggtttccgcagcgcgcgctgcatcccttctggccttgttgcggcctccggagcgcggatcttgacatcggcgacgacaacggcgaggaggaggatcttctcacggcactgcgaccctgcgagatggacatcgtatgtgaagtgtgtggtgttgttggctacaggcaacttttaatacaatgtagcaattgcaaaaatgctgcaaggcacctatattgtttggacccggtaatttatgatgcctcagcaattgaatggttgtgtgacgattgtcctccaaaacataatgaaggcagtgggtgctgttgggcctaccatgaacacaatggagtgtctggacctctcaatgggaaaagatggctgctctttttcacagaattgtgttgaaggcttcacccaaggaacaaagtctgactttttttcttcaatcaatgatgttgagacatcatatccatttgttaagggtagttcttgtcctacactaccgaatatggagcaaaaagatggtgtattggaaaatgcggaacaacctcatcttttggagatggttaatcttgatggtacaagccattcacttgtggaccctccattagaaatcaaagaacaaggagcggaagctggcttatttgcttcagttgaagatgtcgagcaaacccatcccattttaactgatgaaactagtcctatatggtcaagtgaggagcaagtagacggttcttgtcctgcatcggaaagccgggagcaacctgttcctttcaaggtggttatactcggaccatggcatgatgtgccaaatagcatcctaagatcaaggcctccttcaaactactcacagtccatgcaaggatcagatctatatgttggaaatgtggatgtattggatctttctaaggagcagttggactcgaggttaaaacctgaagaacaaggagcggaggatggcttatttgcctcagtggaatatgttgagcaaacacatcccaattttactgaggagaaagtagatggttctattcctacaccagcaagttcggagcaacctgatcagttggaggtggttagaccatgggatgatgcgccgaatagtaccctaaggtcaaagcctccatcaaactactcacagccaatgcaaggatcagatctagatgttaggaatatggatgccttggatccatctaaggagtggttggactcaaggttattgtcaaatacggtagagccatcaagttcctcaaatggaggaggcacatctgttgagaaagacaacattgaaaaaacagaacgcttgtcaggcattgacaccgtcacccctggactggataatgtccagggatcaaatccctcagcagagccatcaagttcctcaactggagaaggaaactcagctgttgaaaaacacagtgctgaaatgacagaatgcttgttaggcatgggaattttgaaccctgcactgcataatgtccaggtattgagtccctcgacaccaaaagaatgcttggtttctagcgcagacaagtcagatgtagcaaataggtcagatgaaattaatcacagtctcgatgattttaaccaaagtaatcccaagccagtgctgaagggaagagtctccaaaatgatgtgcccaagacttgcgtttcaactgccaaaagtgttgcctgtatgcgaacatcacaaaagggagatgtcattgccttccaagcatgttagtccacggaaagcaacaaaaagtagctttagaaagcaatatgaaggaccaaacagacatgtttcacgtcatactgaacatcagaaaaccaaactcgttatgaaggacagaaatacaggtcctgctcatatgagaagttgtaggccaacaaagcaaattgattgtacttgctcaagtgcttccttggattcatctacaaagactaaggaagtaaatgatgcagaaccaagatgttctaaatctgtaaaaacttttgagaatgtcatggccaagaaaagaaaacgacctattctatcatatgatgaagatgccaaggccatgcagatggaagtgaggatgcgcaggagacacagggaaagtggtgtgatgaagctgcgaagatccacagaaaattctgatgaagcgatgtgtccaggaaattcaaataatcaacttaccaatgatcatacgaaggcaaggaagcagagaagggccaacaaagacaataaaacaccaccagtgaacgctagtgttccatgcacacagattgatgctgcacgattagcatcagatcagcaaagctttatttgcacgcgacccattgatagaccttactggactggaatcatgaagattggccaggaatatatttcattggttgcacacctgtcaaatcaagcatgcaagaaggtgcaggaattatcgatgtcattaccaccactaatgaaagtaacaaagcattcaaagttgaaagcctggccagggaggtggaaggcatcggaacctactgctgaatgcgttggcttgtatttcttctcagataatatgagggaactggatcaacttgtgcattatctcaatgatcatagcttagtcctaaaatatgtcgttggctttgccaagctgctgatctccccgtctgttttcctaccagagcaatgccaaacgttccaagggaaacgctatctgtggggagtgttcaagcgcaggatgaatacggggagaatacatcatgtgaatgcaaagtgacaccctagtccaataaatccatgttgtgaagggtatcgctagctcaaagagacaacagttcgccaagcactgttgatgcctttttgagctgagaccgacccctgtgatcataagcagccccgcgagaactctcccctacccaggctatcgggccttgtcattgtgcggacgtctgaggtcggagcacttcatttgtttgggagctggaaaaatgaaggtgcactggttggtttctctgaacttgtgaaagggttagcgaaggaccgtactgtaatgttcatggcctggaggaatgatgcagcaagtaggatcagaaatcagaactagccagcgacaatcacgctccagcttctgaaacgttgctgtagccttttgttgatgttcaggactgggagctagattgtcacgatttgacactgaggacgttactgtgcctgcaagcctaacctaagatgtatcaagcatcaagtgctgctgctgctgctatggaaggtcttagccaaaattaaattatgtttctaagctctgcatgcatcttaacctgcgctaataggttttcttgatggcctcaatgggagcagcaggaacctactactttttatgcgcataaactggcacttcgcatgatgtacttgttcataagttggtcaaaaagtcggttccgtggggtaaatcc

SEQ ID NO: 203612 - DNA, 3246 bp, Zea Mays
ctcatccaaactaccaccagtgtcacaaagtttcttgtatgaagggcacaaggaatggatattgtttggacccggtaatttatgatgcctcagcaattgaatggttgtgtgacgattgtcctccaaaacataatgaagaaacacaaaaggcagtgggtgctgttgggcctaccatgaacacaatggagtgtctggacctctcaatgggaaaagatggctgctctttttcacagaattgtgttgaaggcttcacccaaggaacaaagtctgactttttttcttcaatcaatgatgttgagacatcatatccatttgttaagggtagttcttgtcctacactaccgaatatggagcaaaaagatggtgtattggaaaatgcggaacaacctcatcttttggagatggttaatcttgatggtacaagccattcacttgtggaccctccattagaaatcaaagaacaaggagcggaagctggcttatttgcttcagttgaagatgtcgagcaaacccatcccattttaactgatgaaactagtcctatatggtcaagtgaggagcaagtagacggttcttgtcctgcatcggaaagccgggagcaacctgttcctttcaaggtggttatactcggaccatggcatgatgtgccaaatagcatcctaagatcaaggcctccttcaaactactcacagtccatgcaaggatcagatctatatgttggaaatgtggatgtattggatctttctaaggagcagttggactcgaggttaaaacctgaagaacaaggagcggaggatggcttatttgcctcagtggaatatgttgagcaaacacatcccaattttactgaggagaaagtagatggttctattcctacaccagcaagttcggagcaacctgatcagttggaggtggttagaccatgggatgatgcgccgaatagtaccctaaggtcaaagcctccatcaaactactcacagccaatgcaaggatcagatctagatgttaggaatatggatgccttggatccatctaaggagtggttggactcaaggttattgtcaaatacggtagagccatcaagttcctcaaatggaggaggcacatctgttgagaaagacaacattgaaaaaacagaacgcttgtcaggcattgacaccgtcacccctggactggataatgtccagggatcaaatccctcagcagagccatcaagttcctcaactggagaaggaaactcagctgttgaaaaacacagtgctgaaatgacagaatgcttgttaggcatgggaattttgaaccctgcactgcataatgtccaggtattgagtccctcgacaccaaaagaatgcttggtttctagcgcagacaagtcagatgtagcaaataggtcagatgaaattaatcacagtctcgatgattttaaccaaagtaatcccaagccagtgctgaagggaagagtctccaaaatgatgtgcccaagacttgcgtttcaactgccaaaagtgttgcctgtatgcgaacatcacaaaagggagatgtcattgccttccaagcatgttagtccacggaaagcaacaaaaagtagctttagaaagcaatatgaaggaccaaacagacatgtttcacgtcatactgaacatcagaaaaccaaactcgttatgaaggacagaaatacaggtcctgctcatatgagaagttgtaggccaacaaagcaaattgattgtacttgctcaagtgcttccttggattcatctacaaagactaaggaagtaaatgatgcagaaccaagatgttctaaatctgtaaaaacttttgagaatgtcatggccaagaaaagaaaacgacctattctatcatatgatgaagatgccaaggccatgcagatggaagtgaggatgcgcaggagacacagggaaagtggtgtgatgaagctgcgaagatccacagaaaattctgatgaagcgatgtgtccaggaaattcaaataatcaacttaccaatgatcatacgaaggcaaggaagcagagaagggccaacaaagacaataaaacaccaccagtgaacgctagtgttccatgcacacagattgatgctgcacgattagcatcagatcagcaaagctttatttgcacgcgacccattgatagaccttactggactggaatcatgaagattggccaggaatatatttcattggttgcacacctgtcaaatcaagcatgcaagaaggtgcaggaattatcgatgtcattaccaccactaatgaaagtaacaaagcattcaaagttgaaagcctggccagggaggtggaaggcatcggaacctactgctgaatgcgttggcttgtatttcttctcagataatatgagggaactggatcaacttgtgcattatctcaatgatcatagcttagtcctaaaatatgtcgttggctttgccaagctgctgatctccccgtctgttttcctaccagagcaatgccaaacgttccaagggaaacgctatctgtggggagtgttcaagcgcaggatgaatacggggagaatacatcatgtgaatgcaaagtgacaccctagtccaataaatccatgttgtgaagggtatcgctagctcaaagagacaacagttcgccaagcactgttgatgcctttttgagctgagaccgacccctgtgatcataagcagccccgcgagaactctcccctacccaggctatcgggccttgtcattgtgcggacgtctgaggtcggagcacttcatttgtttgggagctggaaaaatgaaggtgcactggttggtttctctgaacttgtgaaagggttagcgaaggaccgtactgtaatgttcatggcctggaggaatgatgcagcaagtaggatcagaaatcagaactagccagcgacaatcacgctccagcttctgaaacgttgctgtagccttttgttgatgttcaggactgggagctagattgtcacgatttgacactgaggacgttactgtgcctgcaagcctaacctaagatgtatcaagcatcaagtgctgctgctgctgctatggaaggtcttagccaaaattaaattatgtttctaagctctgcatgcatcttaacctgcgctaataggttttcttgatggcctcaatgggagcagcaggaacctactactttttatgcgcataaactggcacttcgcatgatgtacttgttcataagttggtcaaaaagtcggttccgtggggtaaatcc

SEQ ID NO: 203613 - DNA, 1918 bp, Zea Mays
cgattgtgtggcttccaatcagagcgttctcccgctacctccgagcctctcggccctcaggctctgaccttaaatgggatctgccgcactcctgctctctatctctctctctgcaacgactgggttaccgacgcagccgccctcagccaggtgcgcgcgtcttctttgggcccttcgctggtgacgagcgcccactaggatcgaggcgtggtgatggtcgttgggtacttccatttggtgctaatctgtgtgggaggtggaattcatggacgttgttaccgggcccaagtttaatcctagcaatttcagggtttctggtgcctgctcattctgaatggcagaccttacggacatcggttgctgcagttgctttagctttttaaggaagcccagtgtacctgtacgtcaacatcaggatgctgatggcatgttatctgaagatttactgaagcgtcaatcagctgaagatcctgatggaagtttctacactggggatgatcctgatgtaagcttttataacggggatgatcttgatagaagcttctacaatggagatgatcctgatagaagcttttacgatagagatgatactgattatattgagggaagcgatgatggaccaccaaggaagagttctgaagatattgtacagttaagaactcaaaatggctttgcatgtagagaaatctcagttaaagagactaaaaaagtatttcgctcagaggatgaaaatggtaataagatggtcaatcaatatgtccacttgggaaagattggttctggaagctacggaaaagtggttctgtacagaaacattaaagatgggaagttgtatgccatcaaggttctgaataagccttacatgatgaaagtacgtgttgtacgcacagaaactgccatgacagatgttcttcgggaggtgtccataatgaaaatgctgaatcaccctaacattgtcaatcttgttgaagtgattgatgacccaaacatagataaattctacatggttcttgactatgttgaaggaaaaatggtttgcgataatggtttagaagaaggtactgcaagaaattatttgcgagacataatatctggtcttatgtatcttcactctcataatgttattcatggtgatatcaaaccagacaatctcttggttaccagtgccggcaatgtgaagattggggatttcagtgttagccaggtttttgaggatgatgatgatatgctttggagatctcctggcactcctgttttcactgccccggagtgctgtcaaggttcagcctaccatggtcgggcctctgatacatgggcagttggtgtaactttatattgtatggtttctgggcattatccatttcttggggatacattgcaggaaacttatgataagattgccaatgatcctgtgcaaatacctggagacatgaacccccaacttgctgatttgctcctaaggcttctctgcaaagatccaggggatcgcatcacgctgcaggctgcggctgagcatccttgggttgctggtgatgaggggccagtccctgaattcatctgtagatgtgggtttggccgcaggaagaggaatgatgtccgcgaagaagtacaataacaaagcatcctcggatagtccacaggtctagtgtagataattgataaaggttggcaaaacgtagccctgacgatgagtttgttttttgtttgtttgtttgtttgtttgtttgttgtttcgtgttcctaatttccaacgagtgttgggcgctcgactgaacatgtttcttttagtaagagaatctcgagtgtaaccctaatgacagtaaaacccaccgtctgcccccaattttttgttgccctgtataggacatacatacggtcagaaaccaccaaggtgccgtaaacctgcactgccattcag

SEQ ID NO: 203614 - DNA, 1117 bp, Zea Mays
gtgacttagttctcttttaaagtttttgcccatgctttcaagatacgatctctctaggatctatcctgcataagctagccattccaaatgctaattgatcttgttctgtctgataattgaacatgtgtccataatgaaaatgctgaatcaccctaacattgtcaatcttgttgaagtgattgatgacccaaacatagataaattctacatggttcttgactatgttgaaggaaaaatggtttgcgataatggtttagaagaaggtactgcaagaaattatttgcgagacataatatctggtcttatgtatcttcactctcataatgttattcatggtgatatcaaaccagacaatctcttggttaccagtgccggcaatgtgaagattggggatttcagtgttagccaggtttttgaggatgatgatgatatgctttggagatctcctggcactcctgttttcactgccccggagtgctgtcaaggttcagcctaccatggtcgggcctctgatacatgggcagttggtgtaactttatattgtatggtttctgggcattatccatttcttggggatacattgcaggaaacttatgataagattgccaatgatcctgtgcaaatacctggagacatgaacccccaacttgctgatttgctcctaaggcttctctgcaaaggggatcgcatcacgctgcaggctgcggctgagcatccttgggttgctggtgatgaggggccagtccctgaattcatctgtagatgtgggtttggccgcaggaagaggaatgatgtccgcgaagaagtacaataacaaagcatcctcggatagtccacaggtctagtgtagataattgataaaggttggcaaaacgtagccctgacgatgagtttgttttttgtttgtttgtttgtttgtttgtttgttgtttcgtgttcctaatttccaacgagtgttgggcgctcgactgaacatgtttcttttagtaagagaatctcgagtgtaaccctaatgacagtaaaacccaccgtctgcccccaattttttgttgccctgtataggacatacatacggtcagaaaccaccaaggtgccgtaaacctgcactgccattcag

SEQ ID NO: 203615 - DNA, 455 bp, Zea Mays
aagccagcaacaattcaggctttggtgtgtgcttctagttggatacgcgggtctcgaagttcacctattcttttaactggagaaggtgatgatggtgacatcgagtccgtggaatttccaaagtgtgtggtggcaagtaattaggcacatggtcacatactcacatggaggagatggaggagagggagagataggacccgagagaggagacatgagaggcacatggtcaatatattttgttggctgtaattgtaagcctgtaattgttggttgcaaccgttgctaacctggcatattttgttggctccctacaactttgtcctgaactcctgaacctgaagtcctgatctataattgttggctacatcactgcgtgtattttggttctagaactgaaactctgaaagtatgaaattatggattatggaatggaactattatgaactataagtcta

SEQ ID NO: 203616 - DNA, 548 bp, Zea Mays
aagaggttcttggatgttccagctagcagtgtgtcatcagaatccacttttagcactaggggtaggatccttgatgattacaggagttcattgaagccagcaacaattcaggctttggtgtgtgcttctagttggatacgcgggtctcgaagttcacctattcttttaactggagaaggtgatgatggtgacatcgagtccgtggaatttccaaagtgtgtggtggcaagtaattaggcacatggtcacatactcacatggaggagatggaggagagggagagataggacccgagagaggagacatgagaggcacatggtcaatatattttgttggctgtaattgtaagcctgtaattgttggttgcaaccgttgctaacctggcatattttgttggctccctacaactttgtcctgaactcctgaacctgaagtcctgatctataattgttggctacatcactgcgtgtattttggttctagaactgaaactctgaaagtatgaaattatggattatggaatggaactattatgaactataagtcta

SEQ ID NO: 203617 - DNA, 544 bp, Zea Mays
ggttcttggatgttccagctagcagtgtgtcatcagaatccacttttagcactaggggtaggatccttgatgattacaggagttcattgaagccagcaacaattcaggctttggtgtgtgcttctagttggatacgcgggtctcgaagttcacctattcttttaactggagaaggtgatgatggtgacatcgagtccgtggaatttccaaagtgtgtggtggcaagtaattaggcacatggtcacatactcacatggaggagatggaggagagggagagataggacccgagagaggagacatgagaggcacatggtcaatatattttgttggctgtaattgtaagcctgtaattgttggttgcaaccgttgctaacctggcatattttgttggctccctacaactttgtcctgaactcctgaacctgaagtcctgatctataattgttggctacatcactgcgtgtattttggttctagaactgaaactctgaaagtatgaaattatggattatggaatggaactattatgaactataagtcta

SEQ ID NO: 203618 - DNA, 3347 bp, Zea Mays
aacagtttgacccaagcccctccggcactccacacgtttcagaccagacaacggcgaagaaggcagaagaaagaagacgactcgaccgtcggcggaaacagaaaaggagccacgccggcgcggcgcgcatccagaaagcgctcgggattcgcacacacacatgcccacgcgcggcgcggcgcggtatattccaccagaaccagatcaccaccttcccggggcaatccggtaactgtatacagttgcaagatgcacgatgggaaagaaggaaaaaaatccgacgcttgtcacaggataggagtgagtaaaaatcaatgaccatagcagcagaagcggcgaaacttccaccccaccttcacctccttgcttatatatactcgccccgccgccccggggccggctcccacctcgctccagtctagacggcggtttgactttccgaccggggaatcggcgctgcgtttgatttgaggaggcgacacgagacgggacgggagggatctcttcgctggagcgttgcccgattcgtcgcggttctcggacaagggagggagggcacacctcgggctccgatcgaagagctttgttaacattagagattaaaaggtagcgccgtagcaaaatgaaggcaccatcactactggttcagtgtttccctggcttgcttcccagcaaggccactagttgcgtgccaattgtatctgagaaggatctgcagctaccatcaccagctgttgaaataatcccctcaaagagtgttcatccatacaaatatgctggagagaaggttgatgtgcaaggtcttaatattttcaagggtaaagtcagtgtagcagatatgatagttatctcgccttctgaagtagcatcatcaaaatatgatggaactctgaaatactgggagagttccattacccttgtcgacattcttaaaaatgagatccgtgatgggcagttgagcttcaggggcaagcgggttctagagcttggatgtggatatggcctctctgggatttttgcctgcttgaagggtgcatccacagttcactttcaggacataaatgcagaaacgatacggtgcagaacaatacccaatgttcttgcaaatcttgagcaggctcaggaccgacagaacagaccatcagagagccctgttacaccatctaggcagctcttggctcctaatgtacatttctatgctggagagtgggatgaactcccaacaattctctcagttgtgcagccacctgcagcaccaacaaacctcagcttctctgaggatgattttatggatggctgcagtagccatgatggaagcagtgtagttggtcatgactactgccccaggagatctaggaagctttctggtagccgtgcatgggagagagctagtgagaccgaccaggcagatagtggctatgatgtgatcttgatttctgatgtcccctacgcagctaactctctgaagaagctctatgcgcttatttcaaagtgcctacgtcctccttatggagtcctgtacgtggcttccaagaagaacttggttggttccaatggtggcgccaggcagcttcgagctctcatggaagaggaaggtgtccttggtggccacttcttgactgaggttgcaatccctgttgtgccaacagtgagggtggttatcactttcaccaagtttgtccccctcatcgagcctgaggagttcttcaccccaatgtcgagccccagcctcttagcgagctcagggtcgggaagcatcatggcgaagcctaacacccaaaagagctcctacctgaagtgggtctcgaagaactcaagaccagaggccgtgaacctgtcacaagtcgcggacaacggcgaccctttcttgtccatccaatatattctaagcattacatgatctgtaatggatgcgcttgttgtggtgcgctgagtgccagtgtagctcgggtgctgcacaagatggtcagtgacatcatgtgtggcttcatccttatgatgtacacgaaggttggactctttggccctattactagctccattgatgttactaaattcatagtaagtgcttttgtatcctttgtgttcaagtctctatgcctaggtagcaaaaggatctagtgaggacatctatttcatgaatgtcatgcttacagaatattacacttatatttccactattgactaatgaagttatttttagaaacaatggtcaagggaccccactctggctctgcagtatataacggaagctcaccacacaagatcgataacccttttagatcatactgtaccaagctgtcgctccacttcaatagaacacttgatcacatacaggaagtttagatcagaaaatgcaggctgccgctactcccgtcaggttctcagatgtgttcccatcaagggccggtcgtggagaagagcacggtggtggttagtgtccctgttgttgtcatggttgagactgctgagatcgactacaactcgagcttctcggtgttcacaatggaggcctacgacctactcgatggcgacgcgtgcaacgcgcagatatactcggtggcatcggcagtgagcaggagggtggagaaggtggagagggactacttgtcgtacgacgagccaagaacgtgttctcgggcgaggcatgcaacgaccttggtggcgagttctgcgatgcgtcgtaccatgtcgacgtctttagggagctagcgcacacctgaagcctgatcctaattcccatccatggtgttcacaatggaggcctacgacctactcgatggcgacgcgtgcaacgcgcagatatactcggtggcatcggcagtgagcaggagggtggagaaggtggagagggactacttgtcgtacgatgagccaagaacggtgttctcgggcgaggtatgcaacgaccttggtggcgagttctgcgatgtgtcgtaccatgccgacgtctttagggagctagcgcagacctgaagcctgatcctaattcccatccatgtttgtccagaaccaagttgatctcacagtcgggtagatgttcacacattgtatctacgtgtagccaagcaagaccaagggtgtatgtaatgtatataggcatgtcttgggttggctcagctgccaaggtatgtagtataaaccaagatgaaatggtactggtgttattccctgttttacgatgttagaagatggaacacaaagctatgcaagtactatgctatgcccgatctgttccctgcacttgcaagccaatggatgaatggagtgtgtgctgcttaagctgacctggatactagccaccatccaactccacaaatggtatggcgggcttgacctaccattac

SEQ ID NO: 203619 - DNA, 2997 bp, Zea Mays
aacagtttgacccaagcccctccggcactccacacgtttcagaccagacaacggcgaagaaggcagaagaaagaagacgactcgaccgtcggcggaaacagaaaaggagccacgccggcgcggcgcgcatccagaaagcgctcgggattcgcacacacacatgcccacgcgcggcgcggcgcggtatattccaccagaaccagatcaccaccttcccggggcaatccggtaactgtatacagttgcaagatgcacgatgggaaagaaggaaaaaaatccgacgcttgtcacaggataggagtgagtaaaaatcaatgaccatagcagcagaagcggcgaaacttccaccccaccttcacctccttgcttatatatactcgccccgccgccccggggccggctcccacctcgctccagtctagacggcggtttgactttccgaccggggaatcggcgctgcgtttgatttgaggaggcgacacgagacgggacgggagggatctcttcgctggagcgttgcccgattcgtcgcggttctcggacaagggagggagggcacacctcgggctccgatcgaagagctttgttaacattagagattaaaaggtagcgccgtagcaaaatgaaggcaccatcactactggttcagtgtttccctggcttgcttcccagcaaggccactagttgcgtgccaattgtatctgagaaggatctgcagctaccatcaccagctgttgaaataatcccctcaaagagtgttcatccatacaaatatgctggagagaaggttgatgtgcaaggtcttaatattttcaagggtaaagtcagtgtagcagatatgatagttatctcgccttctgaagtagcatcatcaaaatatgatggaactctgaaatactgggagagttccattacccttgtcgacattcttaaaaatgagatccgtgatgggcagttgagcttcaggggcaagcgggttctagagcttggatgtggatatggcctctctgggatttttgcctgcttgaagggtgcatccacagttcactttcaggacataaatgcagaaacgatacggtgcagaacaatacccaatgttcttgcaaatcttgagcaggctcaggaccgacagaacagaccatcagagagccctgttacaccatctaggcagctcttggctcctaatgtacatttctatgctggagagtgggatgaactcccaacaattctctcagttgtgcagccacctgcagcaccaacaaacctcagcttctctgaggatgattttatggatggctgcagtagccatgatggaagcagtgtagttggtcatgactactgccccaggagatctaggaagctttctggtagccgtgcatgggagagagctagtgagaccgaccaggcagatagtggctatgatgtgatcttgatttctgatgtcccctacgcagctaactctctgaagaagctctatgcgcttatttcaaagtgcctacgtcctccttatggagtcctgtacgtggcttccaagaagaacttggttggttccaatggtggcgccaggcagcttcgagctctcatggaagaggaaggtgtccttggtggccacttcttgactgaggttgcaatccctgttgtgccaacagtgagggtggttatcactttcaccaagtttgtccccctcatcgagcctgaggagttcttcaccccaatgtcgagccccagcctcttagcgagctcagggtcgggaagcatcatggcgaagcctaacacccaaaagagctcctacctgaagtgggtctcgaagaactcaagaccagaggccgtgaacctgtcacaagtcgcggacaacggcgaccctttcttgtccatccaatatattctaagcattacatgatctgtaatggatgcgcttgttgtggtgcgctgagtgccagtgtagctcgggtgctgcacaagatggtcagtgacatcatgtgtggcttcatccttatgatgtacacgaaggttggactctttggccctattactagctccattgatgttactaaattcataaaacaatggtcaagggaccccactctggctctgcagtatataacggaagctcaccacacaagatcgataacccttttagatcatactgtaccaagctgtcgctccacttcaatagaacacttgatcacatacaggaagtttagatcagaaaatgcaggctgccgctactcccgtcaggttctcagatgtgttcccatcaagggccggtcgtggagaagagcacggtggtggttagtgtccctgttgttgtcatggttgagactgctgagatcgactacaactcgagcttctcagttcgaatcggtaacacacacgtgtgtgttgctgatgctgcagggtgttcacaatggaggcctacgacctactcgatggcgacgcgtgcaacgcgcagatatactcggtggcatcggcagtgagcaggagggtggagaaggtggagagggactacttgtcgtacgatgagccaagaacggtgttctcgggcgaggtatgcaacgaccttggtggcgagttctgcgatgtgtcgtaccatgccgacgtctttagggagctagcgcagacctgaagcctgatcctaattcccatccatgtttgtccagaaccaagttgatctcacagtcgggtagatgttcacacattgtatctacgtgtagccaagcaagaccaagggtgtatgtaatgtatataggcatgtcttgggttggctcagctgccaaggtatgtagtataaaccaagatgaaatggtactggtgttattccctgttttacgatgttagaagatggaacacaaagctatgcaagtactatgctatgcccgatctgttccctgcacttgcaagccaatggatgaatggagtgtgtgctgcttaagctgacctggatactagccaccatccaactccacaaatggtatggcgggcttgacctaccattac

SEQ ID NO: 203620 - DNA, 3095 bp, Zea Mays
aacagtttgacccaagcccctccggcactccacacgtttcagaccagacaacggcgaagaaggcagaagaaagaagacgactcgaccgtcggcggaaacagaaaaggagccacgccggcgcggcgcgcatccagaaagcgctcgggattcgcacacacacatgcccacgcgcggcgcggcgcggtatattccaccagaaccagatcaccaccttcccggggcaatccggtaactgtatacagttgcaagatgcacgatgggaaagaaggaaaaaaatccgacgcttgtcacaggataggagtgagtaaaaatcaatgaccatagcagcagaagcggcgaaacttccaccccaccttcacctccttgcttatatatactcgccccgccgccccggggccggctcccacctcgctccagtctagacggcggtttgactttccgaccggggaatcggcgctgcgtttgatttgaggaggcgacacgagacgggacgggagggatctcttcgctggagcgttgcccgattcgtcgcggttctcggacaagggagggagggcacacctcgggctccgatcgaagagctttgttaacattagagattaaaaggtagcgccgtagcaaaatgaaggcaccatcactactggttcagtgtttccctggcttgcttcccagcaaggccactagttgcgtgccaattgtatctgagaaggatctgcagctaccatcaccagctgttgaaataatcccctcaaagagtgttcatccatacaaatatgctggagagaaggttgatgtgcaaggtcttaatattttcaagggtaaagtcagtgtagcagatatgatagttatctcgccttctgaagtagcatcatcaaaatatgatggaactctgaaatactgggagagttccattacccttgtcgacattcttaaaaatgagatccgtgatgggcagttgagcttcaggggcaagcgggttctagagcttggatgtggatatggcctctctgggatttttgcctgcttgaagggtgcatccacagttcactttcaggacataaatgcagaaacgatacggtgcagaacaatacccaatgttcttgcaaatcttgagcaggctcaggaccgacagaacagaccatcagagagccctgttacaccatctaggcagctcttggctcctaatgtacatttctatgctggagagtgggatgaactcccaacaattctctcagttgtgcagccacctgcagcaccaacaaacctcagcttctctgaggatgattttatggatggctgcagtagccatgatggaagcagtgtagttggtcatgactactgccccaggagatctaggaagctttctggtagccgtgcatgggagagagctagtgagaccgaccaggcagatagtggctatgatgtgatcttgatttctgatgtcccctacgcagctaactctctgaagaagctctatgcgcttatttcaaagtgcctacgtcctccttatggagtcctgtacgtggcttccaagaagaacttggttggttccaatggtggcgccaggcagcttcgagctctcatggaagaggaaggtgtccttggtggccacttcttgactgaggttgcaatccctgttgtgccaacagtgagggtggttatcactttcaccaagtttgtccccctcatcgagcctgaggagttcttcaccccaatgtcgagccccagcctcttagcgagctcagggtcgggaagcatcatggcgaagcctaacacccaaaagagctcctacctgaagtgggtctcgaagaactcaagaccagaggccgtgaacctgtcacaagtcgcggacaacggcgaccctttcttgtccatccaatatattctaagcattacatgatctgtaatggatgcgcttgttgtggtgcgctgagtgccagtgtagctcgggtgctgcacaagatggtcagtgacatcatgtgtggcttcatccttatgatgtacacgaaggttggactctttggccctattactagctccattgatgttactaaattcatagtaagtgcttttgtatcctttgtgttcaagtctctatgcctaggtagcaaaaggatctagtgaggacatctatttcatgaatgtcatgcttacagaatattacacttatatttccactattgactaatgaagttatttttagaaacaatggtcaagggaccccactctggctctgcagtatataacggaagctcaccacacaagatcgataacccttttagatcatactgtaccaagctgtcgctccacttcaatagaacacttgatcacatacaggaagtttagatcagaaaatgcaggctgccgctactcccgtcaggttctcagatgtgttcccatcaagggccggtcgtggagaagagcacggtggtggttagtgtccctgttgttgtcatggttgagactgctgagatcgactacaactcgagcttctcggtgttcacaatggaggcctacgacctactcgatggcgacgcgtgcaacgcgcagatatactcggtggcatcggcagtgagcaggagggtggagaaggtggagagggactacttgtcgtacgatgagccaagaacggtgttctcgggcgaggtatgcaacgaccttggtggcgagttctgcgatgtgtcgtaccatgccgacgtctttagggagctagcgcagacctgaagcctgatcctaattcccatccatgtttgtccagaaccaagttgatctcacagtcgggtagatgttcacacattgtatctacgtgtagccaagcaagaccaagggtgtatgtaatgtatataggcatgtcttgggttggctcagctgccaaggtatgtagtataaaccaagatgaaatggtactggtgttattccctgttttacgatgttagaagatggaacacaaagctatgcaagtactatgctatgcccgatctgttccctgcacttgcaagccaatggatgaatggagtgtgtgctgcttaagctgacctggatactagccaccatccaactccacaaatggtatggcgggcttgacctaccattac

SEQ ID NO: 203621 - DNA, 537 bp, Zea Mays
  misc_feature (536)..(537): n is a, c, g, or t
caaaatcttatttggcatatgccaattctgaaacttgtctaattccaagccacatttgagaacttgcaccaccagttcagaagcatacaagagccaaccggaagcatatagatagcattactttagttgatatagctcagtacttccatcttccaatccgagatgcatcaaagacactcaagattggggtcagcatattgaagaggaaatgccgacagtatgggatacctcgttggcctcaccggaagatcaagtcacttgactctctcattcatgaccttgagttcgtgctagcaagagaggatgaggatgaggaggaggagaagcagctgcagaaggacaggctggctgctgcgataaacgccctcacaaaacggaagagcatgctggagagcgagaaggaaaccatacagcagaaaccggccatggacctgatggctgaaaccaagctattcagggaagatgttttcaagaggagatatagggccaaaagttcagtcatggatatggattagcatttctctttagctgataann

SEQ ID NO: 203622 - DNA, 3744 bp, Zea Mays
caactgcccatcagccacgttcacgcacccctccagcctccaggcttcatctgttcgccagttcgctcccccctccctcacaaagtctcaagacgtctgatggcccctgagtagtgtaaatgtccaagaaacaaacattctctttcgagtcatattctttccgcggaaagcaaaggggtgacagtgaggggatggcgaggcgcaaggatggctggggcgacggcgacaagatcaagattggtgtctgcgtcatggaaaaaaaggtgtcgtgttctcccatggaacagattcttgagaggctgcgtgcgttcggcgagttcgagattataatttttggtgacaaagtgattcttgaagatcccattgaaagttggcctatatgtgattgtctaatcgccttttactcgtctgggtatccactagaaaaggcagagaaatatgctgctttacgaaggccctttttggtgaacgagttggcccctcaataccttcttcatgaccgcagcaaagtatatcagcaacttaagttgtatggggttcctgttccaacctatgctgttgtcagaagagaatatcctaatcaagaattaagctattttcttgaggaagacgattttattgagatccatgggaagcggttttgcaagcctttcgtggagaaacccattgatggtgatgaccataacataatgatatactatcccagctcagctggtggaggaatgaaagaactgtttcgtaaggttggtaatcgatctagtgagttttatccttatgtgaggaaggtgaggcgagatggatcttacatttacgaggagttcatgcctacaggagggacagatgtcaaggtttatacagttgggcctgtatatgcacatgctgaagcacggaagtctccagttgtggatggggttgtcacaaggaattctgatggaaaagaggtgcgctatccggttctattaaccccttctgagaaacaaatcgcaaggagcatttgccaagccttcagacaagcggtgtgcggttttgatcttctaaggtgcgacatgggagaggcaacatcctatgtatgtgatgtcaatggctggagtttcgtgaaaagttcatacaagtactatgatgatgctgcatgcattctgaggaaaatatttcttgatgagaaagctccacatattccatcaaccattcctactaatctcccatggaaaatcagtgagccagctcaagcatctgatactgcgagatgtcgtgagagggtaactgttggattatctaggccatcagaagagctgcgctgtgtcatagctgttatacgccatggggatcgcacaccgaagcagaaggtgaagctaaaagtaactgaagaaaagcttttgaaattgatgttgaaatacaatggtggaaaggcccatgcagaggctaagcttaaaagtgctttgcagctgcaagatctattagatgcaacaagaattctggttccacgtgctagatctggtcgtgaaagtgatagcgacattgaagttgagcacgcagagaagctacgccaagttagagccgtccttgaagagggtggacatttttctggtatctataggaaggtacagctaaaaccatcaaactgggttcgcgttcctaaagataacagagaaggggaggagtatccagttgaagccctaatggttcttaagtatggtggtgttctaactcatgcaggaaggaagcaggcagaagaattgggaagatatttcagaaataatatgtatccaagtgaagggccaggattgcttcgcctccacagtacatataggcatgatctgaagatatacagttcagatgaaggccgcgttcagatgtctgctgcggcttttgctaaaggtcttcttgatttagagggggagttgacaccaatcctggtttcacttgttagtaaggactcgtctatgctagatggacttcaggatggaactattgacataaatgaagcaaaggctcagttgcatgatattattacatcttcagaagttgcacattataatgaacctatggaattcccatggatggttgatggagctagagtgcctaaaaatgctgctcagcttctcacagatttggctgagttgacaaaagaaataaccgcgcaagtaaagatgctttctgatgatgaagatgagaaagctgccataggtagtgattcaccaaatcctccttacgatatagccaaggcactggggaaagcagaaattgatacggatcgtcttttggctggattaccttgtggtagtgaaagctttcttttgatgtttgcccgttggaagaaactagagagggatctctacaatgaaaggaaaaagcgctttgacactacacaaattcctgacatatatgactcttgcaagtatgaccttcttcataactcacatctcaaccttactggtctgagtgatctcttcgaagtttctcagttgctagctgatagtgtcattccaaatgaatatggaataaatccaaagcagaaactcaaaattggctcaaagatagcacgccgtttattggggaagattctaattgacctgcataacacaagacgagaggttgctgctgctgctgctgaatctgacatatataatgatataatgacagtgtcatctgcaaaacggaaggagaggagttactatgaggaggttaagcatgaatgtgttgaaagatctatctctaacaagaagggcattgatctagatgactcccacgaggaaacaaaatactgcttggatccaaaatatgctaatgtggttgaacctgagcgacgtgttcgaacaaggctctattttacatcggaatcacacatacactctctaatgaatgtacttcgctattgcaatttagatgaatctctgaatggagaagagagtcttgtttgcagaagttctctagatctgctatttaaaacacgtgaactcgactacatgagttacattgtcttgcgtatgtttgaaaatacagaggtacctttggaagacccaaagagattccgtatagagatgacatttagtcgcggtgcagatataagttccttggagggtggaggcaaagaatctttgctgcctgatgaccacacaatgccgattatggagccagaaagattgcaggaagttggatcgtatatcaccttagacaaattcgataaaatggctcgcccatttgcaatgccagctgaagattttcctccagctgctcctcaacctttgcctgttcgcttctgcaaggacatcgaattacgaggaaaactgcagcataagtcagacatgatgagtggtgttttgaaaaggaagacaaaaaggcttcaggaatagcatgcatctgcgcagcttgggcttcagtctgactgagtcgtcgtattgtgggtgctgcaggtgggttttttcaggatttacaggaacgctgaatacaagaccatgtgtctttacactctatgtacattctttttcttaataaaatgacgtgcgcgcggtggtaactctaaggagcataagtggaaacaatcaccatgctttgaatcattttaatttcatctaacctcttttctctctttttctaagcttttgaagtgttgggtgacagaatgcctacacgactatggttatccagttaaaggcatgtttggttcgctacctaatttgtcacactataagtggaaacaatcaccatgctttgaatcattttaatttcatctaaccccttttctct

SEQ ID NO: 203623 - DNA, 385 bp, Zea Mays
cgatgctgctatgggtggggcacgggttttctcgacctgtgagtctgtaatcatgcttttcacttccactgcatcagcaggtggcttaagactcgtcaagtgtgcccattagataacagtgagtgggagttccagaaatatggccactagttcctgggcaccctcatgtgatgttggggcttacttctagtgactgctaccactcgagtgtatttttttctgccaaacagctccatcttttactgctttggatgcttgcatgtatcacaggtcaattatcactagtagtacgtccacctgggactgtatttggattgttcgttgagaggatagtagttccattttataaatgttatgtggattttcataaacataaaaaatagga

SEQ ID NO: 203624 - DNA, 3503 bp, Zea Mays
gtaattgtaacaatggtccaagactccttgttgctagctatatatacacacgcgtgcagaagtgcatatgcactctcgtgcacaagactagcagagagaacataatccaaagatgggctggagaccacacgttgtctctgcgtcatcatccgcactagtgcttcagttcctcgtgctgctgctgcccctgcccctgcccctgctgtccgccgatgcatcgtcaagccaaacgacgacgacgatctacgtcgtgtacatgggcgagaagaagcacgacgatccttccgtcgtcatggcgtcgcaccatgccgcgctgacctccgttcttgggagcaaggatgaagccctccgttcgatagtctacagctacaagcacggattctctggtttcgcggcgaagctcacccagccccaagcggaggagcttacaaaataccctggagtcgtgagcgtgaagccaaacgcgtaccaccacgtgcacacgacccggagctgggattttcttggcatgagctacggcgaatcgccgtcgttgtcgtcgtcgtcgcggctcctcaggaaggccaagtatggcgaagatgtcatcgtcggcgtcatagactcaggcatctggccggaatccccgagcttcgacgacagcgggtacggccccgtgccgaaacggtggaaaggcgtgtgccagaccggccaggcgttcaacgcgagcaactgcaaccggaaggtcatcggcgcgcggtggtacggcgccgacgtcagcgaggaggacctcaaggccgagtacaggtcggcgcgggacgccaacggccacggcacgcacacggcctctacgatcgccggctcgccggtgcggggcgcgagccacgctggcggcggcctagccgctggcatagcgcgcggaggggcaccgcgcgcgcggctggcgatatacaaggtctgccacgacgtcggcggcggcacgagctgcggcgacgcgtcgatcctcgcggccctcgacgccgccattggggatggcgtcgacgtgctatccttgtcgctgggaggaggcagtgacgaggtctacaggacgttgcacgtcgtggcggccgggatcaccgtggtgttctccgcagggaacgatggcccagtgccgcagtccgtcaccaacgccctgccgtggctcgtcacggtggcggccaccaccgtggatcgcaccttcccgacagtcgtcacgctcggcgacggagagacgaagctggtggtatgtatgactcgtgatttaagagtgtgtttggtttaacttttagctttaattttttcgtcctaaaatcaaaagtcaaacaaaaagctggatctagaaaatatttttttctaaaaactgatttttttcgtagtacaaaattgaaagcatcactaaacctacttttagtagcttttggatagaactgtgaaaacatatatcaaagatcttttaacggattttgtaaaactgatgtgagctgtgatctattaaacctacgtaggtccgaggaggccctcgctcatttctcttttgtaagtaatcgagtctagatttttactataaagtccactgctcagcgccactcaaatgtctttggtgtagcatttttgtgtccattcttgcaattatgtccccactctgattttgttctgggtctgcacatggttgttgaggtatttaatttgagagacaatataattaaaatataaaacgaaaggtacatctgttttaactgcatacaaataaagttataactcacgagagataatgttttttagtttatcaaagtgggtgaataagagaaataaaaaaaatacacgcgaaaagagacgtacgcacgtgtattttgacgagaatacgcgatggacaataaaagtaaagaaaatcgcaaataattaataaaaggcgcacagaataagtatattacatgcatgttgtaaagcagataaattaaagaatatttacgtgtgatgacgagcaaaaacatgagtctcttgcatgcaggggcaatcattgtattaccgcaaccgatcggcggcggcatcgacgagcaacgacgacttcgcttggcgccatttgatggctttcactggctgcgacgacgcggagaagctgcggtcggaaaacatcaccgggaaaatcatggtatgccgagcgccggagttcaagtccaactatcctcccacggcgcagtttagctgggccagccgagccgccatcgccggcggggccaagggcgtcatcttcgagcagtacagtaccgacgtcctcgacggccaggcctcctgccaaggccacctgccctgcgtcgtcgtggacaaagaaaccatatacacgatcctaaatagcgacagcaatgtggccaggatttcgccggcggcgaccatggtcgggccccaggtcgcctcaccgaggatcgcgacgttctcgtcgaggggccccagcgcagagttcccctccgtgctcaagcccgacatagctgcccctggagtgagcatcttggcagccaagcgtgactcgtacgtgctcctgtctgggacatccatggcatgccctcatgtctccgcagtcgtcgccttgctcaagtcggttcacccggactggtcacctgccatgatcaagtctgccattgttaccacagcgtcggtgaccgatcgattcggcctgccaatccaagccaactcggtgcaaaggaaaccggccgacgccttcgacatgggcggcggcctcatagcgccggacagggccatggaccccggcctagtgtacgacatccagccggaggagtacaaaagcttggacgaccgcgtcgaccgcctcaacctcccgtccatcgccgtgcccaacctcatgtacgactccgtcacggtctcgcgcaccgtcaccaacgtcgggccggtggaggcgacgtaccgggccgtggtcgaggcgccggccggcgtggcgatggacgtggcgccgccggtgatcgccttcgagagaggcggcgtcaggaacgccacgttcaaggtgacgttcgtggcgaagcagagagtgcagggcggctacgcgtttgggagcctgacgtggctggacgacgccaagcggcactcggtaaggatccccgtcgccgttcggaccgtcgtccgggacttcgtcgccgatgtgtctcgatgatgaacactgaacgatgtgtctgtcaaagaagaacaccgtctcgatgatcgtccatatatgcgacactgtgtcactgtgtgtgaacactgaacaacgtgtcaaaactgaacttatgttgccaatttatttgcaagcaacaaggcgctcccagctgatcttgtgcctttatgcagtttatacagttcaaataaactatgaggctcagcctagaattcattacaaagcataattattgagcgagagacccgatcgatgatagttttgtctgtaattcatacatgggcactctcctatttgcttgcatgcttcgttgcaaatacaaacaagttttatgtggatttgtgtgcac

SEQ ID NO: 203625 - DNA, 3173 bp, Zea Mays
gcactctcgtgcacaagactagcagagagaacataatccaaagatgggctggagaccacacgttgtctctgcgtcatcatccgcactagtgcttcagttcctcgtgctgctgctgcccctgcccctgcccctgctgtccgccgatgcatcgtcaagccaaacgacgacgacgatctacgtcgtgtacatgggcgagaagaagcacgacgatccttccgtcgtcatggcgtcgcaccatgccgcgctgacctccgttcttgggagcaaggatgaagccctccgttcgatagtctacagctacaagcacggattctctggtttcgcggcgaagctcacccagccccaagcggaggagcttacaaaataccctggagtcgtgagcgtgaagccaaacgcgtaccaccacgtgcacacgacccggagctgggattttcttggcatgagctacggcgaatcgccgtcgttgtcgtcgtcgtcgcggctcctcaggaaggccaagtatggcgaagatgtcatcgtcggcgtcatagactcaggcatctggccggaatccccgagcttcgacgacagcgggtacggccccgtgccgaaacggtggaaaggcgtgtgccagaccggccaggcgttcaacgcgagcaactgcaaccggaaggtcatcggcgcgcggtggtacggcgccgacgtcagcgaggaggacctcaaggccgagtacaggtcggcgcgggacgccaacggccacggcacgcacacggcctctacgatcgccggctcgccggtgcggggcgcgagccacgctggcggcggcctagccgctggcatagcgcgcggaggggcaccgcgcgcgcggctggcgatatacaaggtctgccacgacgtcggcggcggcacgagctgcggcgacgcgtcgatcctcgcggccctcgacgccgccattggggatggcgtcgacgtgctatccttgtcgctgggaggaggcagtgacgaggtctacaggacgttgcacgtcgtggcggccgggatcaccgtggtgttctccgcagggaacgatggcccagtgccgcagtccgtcaccaacgccctgccgtggctcgtcacggtggcggccaccaccgtggatcgcaccttcccgacagtcgtcacgctcggcgacggagagacgaagctggtggtatgtatgactcgtgatttaagagtgtgtttggtttaacttttagctttaattttttcgtcctaaaatcaaaagtcaaacaaaaagctggatctagaaaatatttttttctaaaaactgatttttttcgtagtacaaaattgaaagcatcactaaacctacttttagtagcttttggatagaactgtgaaaacatatatcaaagatcttttaacggattttgtaaaactgatgtgagctgtgatctattaaacctacgtaggtccgaggaggccctcgctcatttctcttttgtaagtaatcgagtctagatttttactataaagtccactgctcagcgccactcaaatgtctttggtgtagcatttttgtgtccattcttgcaattatgtccccactctgattttgttctgggtctgcacatggttgttgaggtatttaatttgagagacaatataattaaaatataaaacgaaaggtacatctgttttaactgcatacaaataaagttataactcacgagagataatgttttttagtttatcaaagtgggtgaataagagaaataaaaaaaatacacgcgaaaagagacgtacgcacgtgtattttgacgagaatacgcgatggacaataaaagtaaagaaaatcgcaaataattaataaaaggcgcacagaataagtatattacatgcatgttgtaaagcagataaattaaagaatatttacgtgtgatgacgagcaaaaacatgagtctcttgcatgcaggggcaatcattgtattaccgcaaccgatcggcggcggcatcgacgagcaacgacgacttcgcttggcgccatttgatggctttcactggcaatgtggccaggatttcgccggcggcgaccatggtcgggccccaggtcgcctcaccgaggatcgcgacgttctcgtcgaggggccccagcgcagagttcccctccgtgctcaagcccgacatagctgcccctggagtgagcatcttggcagccaagcgtgactcgtacgtgctcctgtctgggacatccatggcatgccctcatgtctccgcagtcgtcgccttgctcaagtcggttcacccggactggtcacctgccatgatcaagtctgccattgttaccacagcgtcggtgaccgatcgattcggcctgccaatccaagccaactcggtgcaaaggaaaccggccgacgccttcgacatgggcggcggcctcatagcgccggacagggccatggaccccggcctagtgtacgacatccagccggaggagtacaaaagcttggacgaccgcgtcgaccgcctcaacctcccgtccatcgccgtgcccaacctcatgtacgactccgtcacggtctcgcgcaccgtcaccaacgtcgggccggtggaggcgacgtaccgggccgtggtcgaggcgccggccggcgtggcgatggacgtggcgccgccggtgatcgccttcgagagaggcggcgtcaggaacgccacgttcaaggtgacgttcgtggcgaagcagagagtgcagggcggctacgcgtttgggagcctgacgtggctggacgacgccaagcggcactcggtaaggatccccgtcgccgttcggaccgtcgtccgggacttcgtcgccgatgtgtctcgatgatgaacactgaacgatgtgtctgtcaaagaagaacaccgtctcgatgatcgtccatatatgcgacactgtgtcactgtgtgtgaacactgaacaacgtgtcaaaactgaacttatgttgccaatttatttgcaagcaacaaggcgctcccagctgatcttgtgcctttatgcagtttatacagttcaaataaactatgaggctcagcctagaattcattacaaagcataattattgagcgagagacccgatcgatgatagttttgtctgtaattcatacatgggcactctcctatttgcttgcatgcttcgttgcaaatacaaacaagttttatgtggatttgtgtgcac

SEQ ID NO: 203626 - DNA, 2618 bp, Zea Mays
caggcttcgatttatctctacgcaaacgtttgaagtgtgatcattgaggttctggttaaataagcttctagaatcgagtgactcccctcccataaatggataagatacaatctgattgcccttatccgggatgtttcttttgtgttatgaaagaggcgaaccctagtaaacgaagagcaagtgtgctaaagttttttagggaacttccttcccaagatgacgatggtcaagttctccctgtcagcggtctctggaacacagcgatggctcacccaaatgatcccgagttcatcaacttgggcatatttgaatgcatggcagctcttatatggaaagggttgaaaaataggcgttggcttgcacatgatcagaatatttacgtcccatattatgcagctcacataattggatcgtacacgatgaatatggaggaatttgcagagtgtgctgttcgtgctggtgtaatacctccattagtcgaactgttaagaggtaggttgacatgggtcgagcaaagagttgctgttagagctttggggcatttggctacgtatcctagtacattccctgcagttgccgataatggggaagtacttgaacttgccactcaacttgcttcaagctcccttgagattgtgtacactcacttttaccagtttgtggatcgaagacttgactaccattgtggccttcttactcgtggcatgggtggtgtggaaatggaatcccgcaaagctgaggaatgggcaagtcaactacagtgctggtcattgcaactcattaactgctttgcatttaagcctgaattcctccatgatatttgcaagcctgattttctagtcaagttacctggaatgtggggtggacttgtgaatgagaactcgcctgctggtgttggtttgctaagaacaatctgccagagcaaagttggccgaggtgatgctgccaacattcctggtactattgatgctttatgtaacattgctcgctcttcagatgattggcaatacatggcagttgattgtctgatctggttagtgcaggatgcaagtacttgtcataaggttatagacaaagttgcgccaacactgatagatttagcagatatttcgacactgggtgattataaaaagcttggtgacatgattgtcacagtcctccaagaatgtatgcaacaaagcgggaactcacgtggcgcaatcagtgatcagaccaaagcagaaatcgatgagctcttgagatccaagcaaagtttgaaattggaaaagagtatgccaaaggaggatcttcatataaaacaagctgcagcactggttgtcaagttggaaggcaactcactgttctcttcagggaacattgcaggagctgcagagaaatactccgaagcactggcactatgtccaatgaaatctaagaaagagcgggtggttctttacagcaaccgagctcagtgctaccttctcctgcagcagccatcggctgccataagcgatgctactcgagcgctgtgccttcatagccccgtgaatcgtcacgccaagagcctgtggagaagagctcaggcgtacgatatgctcggctttgcgaaggagagcttgctggatacgatccttttcataaacgagtgttcgcagtcgaacgatcctgacctatccctgaagcagaacaaagtccctgattatgccgagcggctggtgaagaagcagatgcgcgccgcttggctgttcagggaagcagccctgaagcacgggggcgtccgtcgcgcgggggatgctagcgacgctgcgtttggccaggaggccgacgactccgagtgggagacagctagcgaaagcgacggcgagaacggtgccgccacggggggagaagcagacggtgagactggatggaagaatggtggccgccaggaagatttctgtgagaaaagctgagcaacagccaaatgtgtattcagagtctcaaactgagctgctacagaagcagatgctgggccttctgcggtcggcacactatgaagcatcaaatctttctaacgaaacgatctggtgacgtttttattgtcctcatcaaagcaaggggggcagaggcccaattaaattagttatccacgtcttctcgctgggtcagttgagctgtgcctgtgaccattcaatatttcctctttgatgctggtcctcctctggtgtttgtaacatatttttggtcagtttgtcaagtccctgaaagaacagaactgtgtgcattgcttgttttgttttattgttttctgaagtttggtgaagaggccgtaatcctggcgctctcccctttccatttgacttgtctggaacgtgaaggccacgtttcctttcttcagggtgtcgtacctggttttcttggtgtactaatgtcaagtaggggtaggggctgtcttaggctcttacgatgaaacagtgtgctccggccctctggataacagcgccacgtcgaaacagtaaggtagcggaccaaacgctccttcgctttcacctttttcagcgcagcagccagcgggctggaggccactggccaccgcaccagcttctgctgcggcatcccccgaccattctgcgccccacccaattccgtagccccgcctg

SEQ ID NO: 203627 - DNA, 739 bp, Zea Mays
aatacgaagaggagcagagcagcaggtctctccatggatgcaagccaggatttgtgggactgggactgggaggtggtcctgccagatcacaggagcttctccctgagcaatggcgttaagaatcttgatgataaagaaacagaaactgaggagcaggatctgctgcccccgtcaggagacgttgacgtgcacaacgagtgcaagggcatcggcgtcgtgctggatgagacctgcaaatccgccgtgcctagtgttgccgatccgataatggcttctgagggtggcgtggaagagaaggcgatccagagccctgatgccgaggagtccgtcaccgccgacagcaagtttgctcaagaggaggaggaggaagaagatatcaagaaggacgtcgacgataaggttggagccctgattggcgcgctgtgctcgtttggggtcgcagccgcgaccgcctgcgtctttctcatcggcggcaggctgcatcatcagcacacgcagcagcacaaaattcagctgcagttcttcggcgatgataagaggatccagcaagttgtccgccaggcgtcaaggctgaaccagaaggccatgtcgtttgcgatgggggcaggagcgtcacggcattttggaaggccacgtgtaaaacgtagcaaaaaacattagttactaaaatgtatatatatgtaatatgtatatatatgtacacataataatatatatgttgttcgtcaccctaagtaaa

SEQ ID NO: 203628 - DNA, 3004 bp, Zea Mays
atttattccctgacttaactggccgtgcttgttccctggaacacggggcccagatgggccagatgtcagtgtgctggtccttctaaagagctgcatcggctctcttcatcctcttggagcgtaggtagaggcgtagagcgccgcacactcatttgccacttcggttcggcgacggtggaggctgccaacatcctcggcgtcctccttccggaggccacgccagaaaaagaaaaagaaacggaagcaacggcataattgttttttcagaaaaaaagttccggaggagaattcagggtcccttcttcttttagagtagtattttgttttctaccagagctgttcgatgacgagaggaacggaagttgttgtgagagcgctgctcgttgcggcggcggtagctgggctgttgctgtcggcggcggcggaggacggcgttgttatccagcggaggtcgcttcaccagccgtttttccccgtcgatcccacgccgccgccggggttcgacgactcgatcgtgccgccgccgccgccgccggcggcggcggctggggccgcggcggcgtcggccgcgtcgaagggcggcgggcggtccgtcaccaacgccgtcgcgatcgcgctcgccacgggcctcgtcgtgctcgcggtggcgttctactcgtgcttcctcctgtggcgccgacgctccgacggaggaggcgggggcgtgggcggcgacggcctccgcgccgtcaagtcgtcgcggccaggcgccgtcgccgtgagggtcgccagcgacgtggggagcagcgcgcggcaccagcggtcgccgccgccgagctcgacggcgtccgacgcgatatacctcgacccgctcacgacgatggtggaggtgagccggcaccggccgcagagcccggacctccgcccgctcgcgctcgtcaagcagccgagccccgacctccgcccgctgccgccgctgaagcggccggcgccacagccgccccctccgccggcgtccacgccgccgatgaccaccaccacgggggactcctccgacgaggaggaccaggccacgtactacaccgcgcccaagaccgccaagtcctcgttcagccgcagcacgagccagcgcagcaccgtggagccgacagtggctcaaccacccgcgcctgctcccgcgtccacgcccacgccgctgccgccgcaagctaacgccccccgacctggtcgtccgccgccgcccccgccgccgccgaggcaaaggctgctgcggccgatgcccgaggagtccccacccccggccgtcctcgccagtttggcgctaaccaatccccctgaaccctctggtcaggacaggggaggtgagaacccggatggccacggcgggagagcgcggccgccgaagccaccgagcctgaaaccgctgcactgggacaagctccgcgccatctccggccgcaccaccgtctgggaccaggtcaacaattccgactcgttccgcgtcgacgaggcggcaattgagagcttgttcctgaacaactccggcggcgtgggtaattcggatcaggcggcgaggaggggaggcgccgggaagcaggagagccggctgctcgacccgaagcggctgcagaatgtcgcgatcatgctcaaggtgctgaatgtgacatcgagtgacgtgattggagcactcatgcacggaaatggagatctggggtctgagttctacgaaacactagctaagatggcaccaaccaaagaagaagaactgaaattaaaaggttataatggcgatatatcaaaacttgatccagcagaacgctttctgaaagatgtacttgatgttccttttgccttcaaaagagtagacgcaatgttgtacagagcaaactttggcgctgaagtgaattatttaaagaaatcttttggaacgctagagaaaattttcaggcagcttgtacagatttaaggagcagcaagctattcctgaagttgctagacgcagtgctcaagactgggaaccgcatgaacgacggaactaaccgaggcgaggcgagggccttcaaactcgacacccttctaaagcttgcagacatcaagtcgacggatggaaaaacgacagtgctccatttcgtggttcaagagatcatccgatccgaaggcttgggttccgatcaagcagcagcagcagcagcgaatcctggaagcaccagcaaggaacagttcaagaaggacggccttcaagtgcttgcagggctcagcagcgagctctccaacgtgaagagcgcggccgccttggagatggacacgctggtcggcagcgtctcgaggctcgaaaccgacctcgagaaggtgacgctcgtctcccggctcaggcagacgtgtcccggtgacgatcaggtctcaagcgagaagttcttcgaggcgaacgacgcgttcctcggacgtgctcacgcggagatcgaggcagtgaaggcggccggggagcgcgcgctgcagcgcgtcaaggagaccacggagtacttccacggggacgccgtcaaggaggagcctcacccgctgaggatcttcatggtggtgcgcgacttcctcgcgacgctggaccgcgtgtgccgggccgtcggcaggacgccggagagggtgatgatggggtccggcaagtcgttccgcgtctcggcgggcacaacctccctgccgcagcgccggaacgaccagcggagggagctgagctcctctgacgaggacagctcctcgtcatagggtaacactactaggaaaccttttttttttctttctttttctttctctggcgcgtagagtagttcgggatcgaggcctgtgattcttgcagatttgttgagcatgtgtagccaacgtcagaactcaataggtgaaagttactgtgtagtttctacaaagtacaaaggttaaaagatatgtatagctgtacaaagacgggggcttcttattatggtatgttttctctgttacatttgtaattgtgattagtttaaagtttgtagatggc

SEQ ID NO: 203629 - DNA, 1525 bp, Zea Mays
atcttgcttttacacgtacgacgcagcagcacagctcgccgcctcgccgtctcttagctgaggcgtccgacgccaccgcccccaatccggtggcgctcctccgtccggccctgcgcggcggccgtggagcaggagggcggcgccgcgggggaggccccgcggctggtgctgcacgactccctcgactccgtgggggtggccaccgcgcacgctagggcggcgcgggaggggttcgtggcgcaggtggggcggctcacccgggtaagtgcggggagcagcatcgccatcagccgcggccctgacctcgcccgcgcagcgctctgcgtcgctgccgaggacgactcgctcgtctcccactcctcggtcccgctccccgtagatgccttcatcgcgcgcctcgacgacctctccacgggcttctgcgccggcgggaacttcccgccctcgggtgcgccgcccgaggtcttcttcgattaccttaaccgctacctctacgtccataaggggtttcggagaacaaatggagtgtcagatgtgcggattatgtaccttcactcgagatattgaagactgtacgaacatatggcttactggattttgatgcagagattttctttccaaatgatctcaatagcctccctaggggctatgacaaacaaaaaagcaaattggtcgatgagccacatattatgacttcaaagtcacttttggttgagactttgagaactttgaagtgtgcattttggccatttcaatctgatcagtctagtagcttatttctaaatgctgttgctgcaaaccagcgtggccctggtactttaggtgataaccaagcgaggtcatatgggaacacaagtgccattgagatggctgctgctaaagctgctcagcatagattgatgcgtggagtatggactaatgctcgttttggtgatatgcgtcgtgctttagcagcttgtgagcgactgatactactgcatcacgatccgcatgaactgagggattatgcagcccttctgtaccactgtgggtactatgaagactgcctacactacttatcattgtaccaaactgcaaagtctgggaaatccccaaccaatcgattggagatcttggaggacgaagctgtgaatactctcaaagcgcggttaatgcttattttagcagaggatggctggagcagatgtagacctgtggcaaggtactggaccaagaactctgagccgtggtaattagagctggccaacgttgcggctgaagcaaataactacagattgtacatagcattttcaactgtggatatgttgtacagtcacttggtaatccatgcgggatgtgaatcaaattcctaattttatacaacaccgcgttgttgctttatctgagattcgcagggcttttttatatttttgaataaatttgatacaatacaacaacatcctcaaatctgtatctacattttttagtcaaacaatattatgttacagaactatcagttttccgtaagttctttcaggcacataat

SEQ ID NO: 203630 - DNA, 1649 bp, Zea Mays
ctccatctaccttccctcaacagactctcgcgcctgcgaccgattctttcccatcggcgcgattgctgggcaggtccccctcctggcgatccgaagtactcgcgcccaacctccttctgcccgaggtataagaccgacctccccttccttcgtccatccgttcgtggtgcgccattgcagggaggaatcagagagagagaaagaaatcgaggtgagagaatgaggggatcaacaaattgggggggagagtccccggacccgcgtgcgtccttcaccggagtccacgcaaccgttggcaccctcatcgtgtggagttgcggtcggtcctagggtcaattgctcgccgataattgtgagcaccgcggaaacacaacctgccgcggtcgactcatgcttgcagcgccaccccaccgtcggcggatggccagggtcaacccctggagttcaaggagcatctttgtggctgttgcgggagcgatggacaaccatggagactgggattctccaccgcggattcatggatgcggctgaccctcgcttcaccggggacctggtggctctgtgcataaattttcggggtttcggagaacaaatggagtgtcagatgtgcggattatgtaccttcactcggtcttgacatgccgttctggatcagctctaatgcttgcgttaatatattcagagatattgaagactgtacgaacatatggcttactggattttgatgcagagattttctttccaaatgatctcaatagcctccctaggggctatgacaaacaaaaaagcaaattggtcgatgagccacatattatgacttcaaagtcacttttggttgagactttgagaactttgaagtgtgcattttggccatttcaatctgatcagtctagtagcttatttctaaatgctgttgctgcaaaccagcgtggccctggtactttaggtgataaccaagcgaggtcatatgggaacacaagtgccattgagatggctgctgctaaagctgctcagcatagattgatgcgtggagtatggactaatgctcgttttggtgatatgcgtcgtgctttagcagcttgtgagcgactgatactactgcatcacgatccgcatgaactgagggattatgcagcccttctgtaccactgtgggtactatgaagactgcctacactacttatcattgtaccaaactgcaaagtctgggaaatccccaaccaatcgattggagatcttggaggacgaagctgtgaatactctcaaagcgcggttaatgcttattttagcagaggatggctggagcagatgtagacctgtggcaaggtactggaccaagaactctgagccgtggtaattagagctggccaacgttgcggctgaagcaaataactacagattgtacatagcattttcaactgtggatatgttgtacagtcacttggtaatccatgcgggatgtgaatcaaattcctaattttatacaacaccgcgttgttgctttatctgagattcgcagggcttttttatatttttgaataaatttgatacaatacaacaacatcctcaaatctgtatctacattttttagtcaaacaatattatgttacagaactatcagttttccgtaagttctttcaggcacataat

SEQ ID NO: 203631 - DNA, 1992 bp, Zea Mays
tagtactattaccagcagtacagaaacagctgctggtggctggtggcactggcagtcataaacaagagattagagacggcttcctgcactattacctgtaccacacgtttaacacaataggcagaaaatgataatgggatgacggttcgccgttggcatttgtattcaaggttgacagacacacacaccaggcgcggtatccactggtggtgttggtcttcgtcgccgtcaaggtcgtagcactcgcgtttcacatgacggcctggtgcgaccgcgaccgccttgagacacccgcgttctgtgccatttccgccccttcaccgtaccatttcgtcccgattccgcggataaatgcttgcccctatttgctcagcccgctctcggacgaacccattcacccgtccggccgtccgtgcgcggcgcacccacccggcaccggcaccagcatcaccgcccgcccggcgcccgtcacgctcgagaggaggaggaagaagaagggactgggcgacagcgcgcgatggccgccgtcgtgtgcgtcaccggcgccggcggcttcatcggctcgtggatcgtcaagatcctcctcgcccgcgggtacgccgtccggggcacctcccgccgcgaagctgctgaccccaagaacgcgcacctgtgggcgctcgacggcgcggcggagcgcctcaccatgctgcaggtggacctgctcgaccgcgccagcctccgcgccgccttccgcggctgcgacggcgtcatccacaccgcctcgccgatgcacgacaaccccgaggagatcatcgagccgattatcgccgggacgcggaacgtcgtggaggcggcggcggacgccggcgtgcggcgcctggtgctgtcctccaccatcggcaccatgtacatggacccgcgccgcgaccccgacgccccgctcggcgactccagctggagcgacctcgagtactgcaagagcaccgagaactggtactgctacgcaaagacggtggcggagcagggcgcgtgggaggcggcgcgggcgcgggggctggacctggcggtggtcatcccggtggtggtgctcggcgagctgctgcagcccagtatgaacaccagcaccctgcacatcctcaagtacctcacgggacagacaaaggagtacgtcaacgagtcgcacgcctacgtgcacgtcagggacgccgccgaggcgcacgtcagggtgctggaggcgcccggagccggcggccgccggtacgtctgcgccgagcgcaccctgcaccgcggcgagctctgccgcatcctcgccggactcttcccggagtaccctattccgacaaggtgcaaggatcaggtgaacccactgaagaagggctacaagtttacgaaccaacctctgaaggaccttggcgtcaagttcacgccagtgcatgggtacctgtacgaagcagtgaagtcccttcaagacaaggggttcctcccgaagacatctggcgccaaggtgcctgaacgacgcagctgcctgcctcaaacgacatcacagccaccacccgaaatcgtttcgaaactttgaggtggatctgcacacgtgctcaaactggccatgtgtttttttgtcagaacaagccgttcatttgattggttattaaaagattttgggcagtctgttcttacatagcaaaaatgtcttgtctctgtctatggtgcatcctgttgcttttgcactacaactatacacatccttgtctgggtagtctgttctttacatagcaaaatgcgaagtctgcagggtgatttcagcgatgatggaagcatgcccgcccacctcttgactgcatgcgctggtcagctgcggcttattctacacatcttgcttgtctgtactagcctttgcatcgtgccttcgtattatgcttttctcctttcatagtacttattgacctttgcggccatcatcatcattttcatgataggccaccttgcccaatcttgggtatggacttaaac

SEQ ID NO: 203632 - DNA, 2187 bp, Zea Mays
atgcccctggccgaccggatccgggacctcggggtcggcatcgcgttcctgcggatcaacctcgacggcctcgtgccgcccgcgccggcgctggcgccggccaagcgggagccggatgcggcgctgtccgcggcgagcctcacggtggaggaggcgcgcaagatgctgcgagccacgcagatggaggcagcgcacgcgcggattcgggagtccggcgtcggcgccgtgccatttctcctcttccactaccgacccgagccatcccatccgccccgcatccttgcatcggacctcataagtttgaaccaacaatcagctgcggggccaccacctcctgaggtcatactcctacgctgtagcctgggtagtggtctcaacatccacgggattgtcacagttgattcaactatggtgcctgaaattagcaactcagctgtggagctcaatggggttctcctaaatcatgctttagttacatttcgtgagctacttctaaaatgcgctcagcactactcatggtatgtattaagggcaatttatgtaacaaagggaagcaaattgcttcctccatcttttgcctcaattttttatgactctgcttcatctgttcttgatgtcttcttcgacccttctgatggatcgctcaacgtccctggccttaccataggcatgtttaaatttataagcaagaacatgaagtcgggtggtttttctggaacaaaacggtaccttggtgatctcgggaaaactgttaaaactgcaagttcgaacgctctctttgctgctgtcacagaaatttcagatagtgttgttagaggagcggaaacaaatggtttgaatggcatgatgctcgaggaggatgtggcagttccagtctcatctgctaatgaagctccaaaggatactacaaagatggacacagatgatgcaccaagtgatcctgtctctggaactgatgtgaatgtgcatgagcctgatactactgaggctgctcctgcagctgaaaatggagcagaaaatcccgaggaaaaatctgttccaatggaaactgatgcaaaggttgagccatcagaaaggaaagttaagagaacttctgttccggtccatgcattggtctatggtgccttggctgtagctgacctgcagaaggctgtagagaaagagtatgagatggctcttcaggacagagtaatggaagaaaccaaagagaagaaaaatgttgtggaagcttatgtctatgacatgcgtaacaagctctacgatagatacaacgattttgtgacacctgaggagaaggaagggttgattggaaagcttcgggaggttgaagattggctgtatgaagatgatcttaagaagattggtgacccaattgaggcacggtacaaggagtcaacagaaaggggttcctctgtagatcaactggtctactgcatcaacagtttcagagaggctgctttgtccagtgaccaaaagtttggccatatcgacatatctgagaaacagaagatatttgataagtttgatgtcatcataatatcgtattctctgaagttttatgggctaagtgagataaggaagaatgatgaaggcggagacgggcgcgctcaggggatgcgcctcgctgccatcgaagccgctgggagcggcccagccgtgccggagcaggggggcgccgtcgtgtgtcactcgtcggcgcacctcagcgtgcgcaccatccagtggatctccgccggaaccatcgcagtgctattagttgctaaaggcactgccatacacaaatctttccttgtgccattttttgctcttcagacaccttgctgcataatctcatggatcaagggtgactatggtcagtggactgcttttctttctctgttggtgcgtctattcttcttcattccaggtgaactggagcttccactgtcaacaatgctgcttgtgagtgttgctccttaccaattcatggatctgaggggaactcaaggtggtgtcgtaatgtcactggtcatagctgcgtatctcgccttccagcacttcactagggtgggcggcccaggcaaagccttcgagcaaggatccattgttgcgaccttggccatcatttgcatcatgattgtgcccttgatgttgctattctgatttgcaatgagttggaatgaatttgcttctcattatgtgcgtata

SEQ ID NO: 203633 - DNA, 1303 bp, Zea Mays
atgaatccggttttgagaccttgctgaaagtatgttaaactatacttgtgggtgttgattcttgtcaattgttgagaaaaatccatacttactggacaggatggggttgtgtaccgatacaagtgttcatccacgacccaccgaaccacaatggccacgttcctgggaagctcaccggcgctcctcgctcgtcccattgccaagccgcacatctcctgcgcgcagacaccgcgcccggcaattgcccagaaccagccgccgtccagcgagcagccggaaccacagaaacagcggcactccgtgcaagcgcagccacagcaggcggcggcggcggcgaggccgaagcacgcgggcgtcgcggactccactgactggatagcctcgtcgttgacgcggcggtccggaatcggtgcggggctggcgtgggccggcttcctggccgtcggcgtcgtgtcggagcagctcaagacacgcttcgaggtcgcgcagcagcaggccaacaccaaggacgtggagcaggagcacgaggtcgtgttgcccaacgggatccggtactacgagatgcgcgtcggtggcggcgacgtcccgcggccgggcgacctggtggtaaccgacctgcagggccgggtggccggcagcggcggggaggcgttcgtggacacgctcggcgacggcaagcggccgctggcgctggtgatgggctcccggccgtacaccaggggcatgtgcgagggtgttgagcacgtggtgcgctccatgaggccaggcggcaagcggcgggtggtcgtcccgccgggcctcgcgttcggcgacggcggcgccgacttcggggaggagcacgtccagatcccgcccggcgcgacgctcgagtacgtcgtgcaggtcgacaaggtgtccatcgcgccggcgtgagggcctgccgaggcgggagccggggcgaagctacattattcttagaggtgcaaatgcacccaaaaatatacaaaatctataaatttagttaagatttcaatacatatacatatgcatctttataataaattcttatgcacgcataagtcacgtgcgcctctcctcaaatttgctataacttcgccaccgacatcagtggagatatcacgcctctgtggtgtttctaaattttcttgcagggttcggttttatgtaggcaccgagtagcgtgaccatggttgtcatagctgccataacctatgggacatgtttattctcgcttttcaagcaagatttcccaaaagagatatatttgtggagcttgcaaaatgcaaacacagttcatttcgag

SEQ ID NO: 203634 - DNA, 4839 bp, Zea Mays
aaaaaatatcggttccgtttttgatttggaggggaggggagcggcggttcggagtgggcaggctcgctgttggttcttgcagcggcgcggcagagaggggtgtgcggtgcggccgtgctgttgaattatcctgttccttcagtgctcgcgtctcgatgcgttttctctgatgatggtttcatggccacctgcgtgtgctgctgctgctgctagtacgccagcgctttgattcggcagaggcgttgctttggtttcgggttctttcgcctttcctttcgccaaagattgcagctttcgcagccgcagccttttcttctccggccgattccaaccttggccagactacccccccttcaaaaatcgcgcaaggggtgggggttttacccggcccgtactgcgagcagcgccgaattttttcccctgggcgtgcgattgtcgcttagttgagcttcagagcctggttttttgagagatttctttttgaattttgagcctggtgtggaatttgggggtttgggtgtctgccagttttcaacccttggagagtcagaggctattgtctctgaagatatcgcctgttttgatgcgaaatggggaaatttctggtccctgtgctgttcggccattggatttggcgagttggtgtttgagccctggtatacatcacctgtctgtgctggtggccgtttgatttcacggtggtgatgctctctgcagcctccgtgatggcgccggcagcagccacacagaagagctcccttgaggtcttgcttgagacattaaagaagcgcgatgagcagcccaaggatgcacctccaacattgccagcccggccgacgtgccgtggccggctgcccaccaccagacggtcatcactgcctgctggctttatgctcgagaacggcatggcaacagttgctgccacagaagctgcagtggttgacaagaaggcagatgctaagatggagattgttgggctggaggccaaggaggaaaagctggtgaaaggctgcatctttgggactaagaggaagttccctaacacagaagtgctggaggagtcgccgtatgttggtaaatttcttgaggagaggaagggtacatcagtttgtaagaatcctccacatatttcctcggcaacgataaggatgaatgggaatgtagcatgtacagatatcttggactatattctccagaagaagctaagagtttggtgttcttcaccaaatgcaaagtgggaacttggacagatccaatcaatgtctggagatgatgctgaaatactcctggctaatggaaaagttttgatggtgtcaccagaacaactcttgcctgctaaccctgatatcctcgatggagtggatgatttgatccagatgagttacttgaatgaaccttcagttctttacaatctgcaattgcgatattctcgtgatcttatctatacaaaggcaggacctgttctgattgctgtcaatccattaaaagaagttgctctctatgggaagtcttcaatcatgcaatacaagcaaaaggccaacgatgacccacatgtgtatgcagttgctgatttggcatttaacgagatgctgcaagatggcataaaccaatctataataataagtggtgaaagtggatcaggaaaaaccgagacagctaaaattgcaatgcaatatttgtctgatcttgggggtgctagtggtacggagtctgaggttcttcagaccaatgttattctggaagcattggggaatgcaaaaacatcacgaaaccataactcaagccgatttggcaagcttattgaaatacacttctctgaatctggtaaaatgtgtggtgctaaaatccagaccttcctgcttgagaagtcgagggtggtccaaagggcacaaggagagagatcttaccacattttctatcaactgtgctctggagctcctccccttctcaaaaaaaaattgtttctgaaaagcgccaatgactacaattacttgaagcagagtaattgcttgaaaatcgatggtgttgatgattcaaaaaaattcacagtgctagtgctgtcttgtggctggggaacatatcattctgtgtgattgataatgaaaaccatgtggaagttgtttcaaacgaaggattgtctactgctgcaaagctattaggctgcactgcaaatcaactagtgattgctttgtccacttgtaaaatccgagctggaaatgacagtattgttaaaaagctaacattaactcaggccattgacgcaagagatgcactagcgaagtcaatctatgccaatttatttgactggattgttgaccaaattaaccactcacttggaacagggaggcaatttacatggagatccataagtattttggatatttatgggtttgagtgtttcaataagaatggttttgagcaattttgtataaattatgccaatgagaggctgcagcagcacttcaacagacatcttctcaaactacaacaggaggaatacttggaagacggaattgattggacccccatggaatttgtggataacactaattgcttatctctctttgagaagaaacatctagggctattgtcattattggatgaagagtctactttcccaaaggcatccgatttttcctttgctaacaagcttaagcggcaattaagtggtaactcttgcttcaaaagtgaaaaagaaggcacatttaagatttgccattatgcaggggaggtgacatatgatacagctgggttcctggagaagaacagagacccattgcactctgagtcaatccaactactctcatcatgtacatgtgaactttcaaaacattttgcctctgtcatggttgctgattctcagaataaatcaagtctgtcatggcattcagtaaaggatacacataaacaaagtgttgtcatggaatttaaggctcaactgttcaagctgatgcagcagttggagagtacaaccccacattttatccaatgcattcaaccaaatagcaaacatcatcccaggttattcgagcatgatcttgttttgcaccagcttaaatgctgtggtgtgtttgaagttgttcggatatcaagaacatgctatccaactaggatcacccaccaacagtttgctgaaagatacagatttcttctcttgcgttccattgcatctcaagatccacttagtgtttcaattgctgttttgcaaaagttcaacattccccctgaaatgtatcaagttggctacacaaaattatttttccgtacaggacaggttgctgcactggaaaatgctaaaagacagatgcttcttggaaccctccatattcaaacacagttccggggtttgcattctcggcggggatatcaacgactaaagaaaggggcgatgaatttgcaatcatttatacgtggtgaaagaacaagaatacactttgataatcttgtcaagagatggagggcagctgttctcatacagaaacacactaggcgtcgacttgcagctaacatgttcaatgatcaactgaatcatgtcattcttcttcagtccgtgacgcgtgggttcctggccagaaggaaatacaagtgtctgcagaatgaaaaggagtcaaaggccagtcacagcatagttcaagggaacacaaggaagaataactcagagtcaagaatatgccatgaaatgaatgggcattatcctcacgaaccagtcatcactgagcttcagggtcgtatcacgaaagctgaggctgcattgcggggtaaggaggaggaaaatgtaatgctcaaacagcaattggaacagtatgagaggaaatggtcagaatatgaagccaaaatgaaatgtatggaagaggcatggaagaggcagctctcttctctgcagctgagccttgttgtcgctaagaagagcctagctgctgatgatgcagccactagagcagctcggactgattgtactcctacacatgcgcagtatgactctgaagatacattatccaccgggactcgtacacctgaagtgatcgagtcgaaacacgacaaccacaaccctgaagctaaagtttcagcaggaaactcggataggcgagtgaatgctgtgaaccacctagcaaaggagtttgaagacagacgacaggtgttcgaagacgatgcgggcttcctagttgcagtcaggtccggtcagattggttcaaatatgaacccagatgaggaactccggaagctcaaggaccgctttgcgacatggaaaaaagactacaaatctcggttgaaggagactaaggtaaaccttagtaaggttggcacccatgatgagaaatcacggaaaagatggtggggaaagaagagctcgaagtgaaacgtgtaagagaatctccacaacattttgcaacgacactgggtcaaggaaagtggccaggaatgccagggcaggcgagaagaatctgcctctgatcccaaaagcttggtgagatgatgaactcccatgttggtggcagtgccgttactcatctgatgtcacgagtgtcgaaaagatcaaagtagacaataggtgaagccagagttctgtacatgtatattagtcagctctgagtcatcacttgacagtgtgtttatgtcatcgtgtatgtagagtgataaatccgaggcgtggaagggtaactaaatgcagattatccaccatgagcgaagagatgcgaaagcagagtactgtaatatgtgtacagtgagaacattgttgaaatgtgcaaggcattttactctgaaaactgtgattgcatcgccccatattttgcactatcttttgagacctttacacttacacatcagttttattttttt

SEQ ID NO: 203635 - DNA, 4194 bp, Zea Mays
gtctccccagcccgcgacgcccatccatgaaccagccctccatccgccgcggaaaacaccaccggccacgcggcgctattagcgagggggcgcgacgcgcgaggcctccgtgatggcgccggcagcagccacacagaagagctcccttgaggtcttgcttgagacattaaagaagcgcgatgagcagcccaaggatgcacctccaacattgccagcccggccgacgtgccgtggccggctgcccaccaccagacggtcatcactgcctgctggctttatgctcgagaacggcatggcaacagttgctgccacagaagctgcagtggttgacaagaaggcagatgctaagatggagattgttgggctggaggccaaggaggaaaagctggtgaaaggctgcatctttgggactaagaggaagttccctaacacagaagtgctggaggagtcgccgtatgttggtaaatttcttgaggagaggaagggtacatcagtttgtaagaatcctccacatatttcctcggcaacgataaggatgaatgggaatgtagcatgtacagatatcttggactatattctccagaagaagctaagagtttggtgttcttcaccaaatgcaaagtgggaacttggacagatccaatcaatgtctggagatgatgctgaaatactcctggctaatggaaaagttttgatggtgtcaccagaacaactcttgcctgctaaccctgatatcctcgatggagtggatgatttgatccagatgagttacttgaatgaaccttcagttctttacaatctgcaattgcgatattctcgtgatcttatctatacaaaggcaggacctgttctgattgctgtcaatccattaaaagaagttgctctctatgggaagtcttcaatcatgcaatacaagcaaaaggccaacgatgacccacatgtgtatgcagttgctgatttggcatttaacgagatgctgcaagatggcataaaccaatctataataataagtggtgaaagtggatcaggaaaaaccgagacagctaaaattgcaatgcaatatttgtctgatcttgggggtgctagtggtacggagtctgaggttcttcagaccaatgttattctggaagcattggggaatgcaaaaacatcacgaaaccataactcaagccgatttggcaagcttattgaaatacacttctctgaatctggtaaaatgtgtggtgctaaaatccagaccttcctgcttgagaagtcgagggtggtccaaagggcacaaggagagagatcttaccacattttctatcaactgtgctctggagctcctccccttctcaaaaaaaaattgtttctgaaaagcgccaatgactacaattacttgaagcagagtaattgcttgaaaatcgatggtgttgatgattcaaaaaaattcacagtgctagtggatgcattggatacaattcaaatatctaaggaagaccaaatgaaattattttctatgcttgcagctgtcttgtggctggggaacatatcattctgtgtgattgataatgaaaaccatgtggaagttgtttcaaacgaaggattgtctactgctgcaaagctattaggctgcactgcaaatcaactagtgattgctttgtccacttgtaaaatccgagctggaaatgacagtattgttaaaaagctaacattaactcaggccattgacgcaagagatgcactagcgaagtcaatctatgccaatttatttgactggattgttgaccaaattaaccactcacttggaacagggaggcaatttacatggagatccataagtattttggatatttatgggtttgagtgtttcaataagaatggttttgagcaattttgtataaattatgccaatgagaggctgcagcagcacttcaacagacatcttctcaaactacaacaggaggaatacttggaagacggaattgattggacccccatggaatttgtggataacactaattgcttatctctctttgagaagaaacatctagggctattgtcattattggatgaagagtctactttcccaaaggcatccgatttttcctttgctaacaagcttaagcggcaattaagtggtaactcttgcttcaaaagtgaaaaagaaggcacatttaagatttgccattatgcaggggaggtgacatatgatacagctgggttcctggagaagaacagagacccattgcactctgagtcaatccaactactctcatcatgtacatgtgaactttcaaaacattttgcctctgtcatggttgctgattctcagaataaatcaagtctgtcatggcattcagtaaaggatacacataaacaaagtgttgtcatggaatttaaggctcaactgttcaagctgatgcagcagttggagagtacaaccccacattttatccaatgcattcaaccaaatagcaaacatcatcccaggttattcgagcatgatcttgttttgcaccagcttaaatgctgtggtgtgtttgaagttgttcggatatcaagaacatgctatccaactaggatcacccaccaacagtttgctgaaagatttcttctcttgcgttccattgcatctcaagatccacttagtgtttcaattgctgttttgcaaaagttcaacattccccctgaaatgtatcaagttggctacacaaaattatttttccgtacaggacaggttgctgcactggaaaatgctaaaagacagatgcttcttggaaccctccatattcaaacacagttccggggtttgcattctcggcggggatatcaacgactaaagaaaggggcgatgaatttgcaatcatttatacgtggtgaaagaacaagaatacactttgataatcttgtcaagagatggagggcagctgttctcatacagaaacacactaggcgtcgacttgcagctaacatgttcaatgatcaactgaatcatgtcattcttcttcagtccgtgacgcgtgggttcctggccagaaggaaatacaagtgtctgcagaatgaaaaggagtcaaaggccagtcacagcatagttcaagggaacacaaggaagaataactcagagtcaagaatatgccatgaaatgaatgggcattatcctcacgaaccagtcatcactgagcttcagggtcgtatcacgaaagctgaggctgcattgcggggtaaggaggaggaaaatgtaatgctcaaacagcaattggaacagtatgagaggaaatggtcagaatatgaagccaaaatgaaatgtatggaagaggcatggaagaggcagctctcttctctgcagtatgactctgaagatacattatccaccgggactcgtacacctgaagtgatcgagtcgaaacacgacaaccacaaccctgaagctaaagtttcagcaggaaactcggataggcgagtgaatgctgtgaaccacctagcaaaggagtttgaagacagacgacaggtgttcgaagacgatgcgggcttcctagttgcagtcaggtccggtcagattggttcaaatatgaacccagatgaggaactccggaagctcaaggaccgctttgcgacatggaaaaaagactacaaatctcggttgaaggagactaaggtaaaccttagtaaggttggcacccatgatgagaaatcacggaaaagatggtggggaaagaagagctcgaagtgaaacgtgtaagagaatctccacaacattttgcaacgacactgggtcaaggaaagtggccaggaatgccagggcaggcgagaagaatctgcctctgatcccaaaagcttggtgagatgatgaactcccatgttggtggcagtgccgttactcatctgatgtcacgagtgtcgaaaagatcaaagtagacaataggtgaagccagagttctgtacatgtatattagtcagctctgagtcatcacttgacagtgtgtttatgtcatcgtgtatgtagagtgataaatccgaggcgtggaagggtaactaaatgcagattatccaccatgagcgaagagatgcgaaagcagagtactgtaatatgtgtacagtgagaacattgttgaaatgtgcaaggcattttactctgaaaactgtgattgcatcgccccatattttgcactatcttttgagacctttacacttacacatcagttttattttttt

SEQ ID NO: 203636 - DNA, 13557 bp, Zea Mays
acaagtgccaagtgccaacaccgccggaaaccacctcgtgctggcccatcccgacatcccgtcccgtgctcccctcccctcctctcgaccacctcctcgtcgtcttcctcgccccctccgccacctccgccccggcctctccgctcccacccccgcggaaaccctaactccctcttggcacaggaggcctatgacggagattcgccgcgcgcaaggagggagtggattcgcgactgcgcagccgctgccgtcgtcctagggcgcgtcgagcactgccaccccattgacgggcccatccccacgacatccgccatgttcgagggccacgtgctgtatctgctacgcaaatatttgggtgaatatgttgaagggctttctgttgaagctctcagaataagtgtatggaaaggtgacgttgttctaaaagacttaaaacttaaggctgaagccctgaattctctcgggtttccagtgacagtgaaagctgggtttgttggcaccataacattaaaggtcccatggaagtgccttggtaaagaaccagttattgtcctcattgatcgtctatttgttcttgctcatcctgctcctgatggacagactctcaaggaagaagatagacaaaaactttttgaagccaagcttcagcagattgaggctgcggaggcagctactcttgaagcaacaaataggaactcaagaggagggcctgcaccaggtggaaattcatggttatacaatttaatatctacaattattggtaatcttaaagtcaccatcagtaatgtacacataagatatgaagattctgtcagcaattctgggcacccatttgcgtctggtttcacgttatcaaaacttgcagccgttacagtggatgaggatggtaatgaaacatttgatgcaggtgtagccctagataagctacgaaagtctgttgaactgcataggctgggcatctaccatgactcagacagtaatccttggaagcttaataaaaattgggaagctctaaatcgtaccgaatggagtgagatatttcaagatggcattgaagatggctctcaaagttccatctgggcagtaaatcggaactacttggtctcgcctataaatggaacccttaaatataaacgacttgggaagaatgaaagaggggatccagataccccattggagaaagcctcacttgtcctcagtgatgtttctttaactgtaactgaggcacagtattatgatggcattaaactgttggaagcattttcgaggtttagaacacgtgttgatgtgtctcatttacggcctgttgtgcctgtaaaggaggatcgtcgtgcttggtggcgttatgctgtgctggctggtctgcgacaaaggaaactatgctattggttttcatgggagagaactagacgcctctgccagcttcgacgccgttatgttcaattgtatgccacccttttgcaacaagcagcaaaagttgacatttctgaaattcgagagatagagaaaattctagacatgaaggtcataatactttggaggttgctgggtcatgctaaggttgaaacagtgaaatcaaaggggacactatatagaaaaggggcctcaaagaaaagatggtggccttttgcatggaacacgactggtttaccttctgaggaagctacacacccagaatcacagttagatgaagaggaacaactgactaaagaagagtggcaggctattaataagctgttgagttaccaaccagatgaagatatgtcttttccccttgagaaggtttccccaaatgtgattcaatttatgatggatgtatccattggccaggctggtgcaaggatcatcaatattgatggaactgaggttttatgtggtagatttcatcagcttcaggttgtcactaagttgtatccgaagagcacatgttgtgatgtgacattgaaatattgtggtctatcatctccagaaggttctcttgctcagagtgtcgttagcgagggaaagagtcatgctcttgatgttagttttgtacgagcaccaattggtatggaccttgattggcagctcattgcgaagatatcaccatgccatgttacggttctgaaggagagttatgaacgatttatggagttcattaagcgaagcaacgctgttagtccaacagtaactatggaaacagcaactgctctacagctgaagctggagaaggtcacacgtagggctcaggagcagcttcagctggtgttagaagaacaaagcagatttggacttgatattgatctggatgcaccaaaagttaggattcctttgaatgctaatcaacctttgctgggcaatgagtactttgttcttgattttggccattttacattgcatacaagagatggtaagcatgatgaagaaagacagagtctgtattcaggcttttatattactgggagggatatggctgctttccttatttgtgatttagctcagaacatatactcaatacctgaaaatttagatcaagataccctcctaggtcatacctttgatgataatcagttctgttctcttcttgatcgctgtggaatgtcagtgataattgagcagatcaaagttccacatccgaattatccatcaactcgtgttgcttttcaagtacccaatctggacattcacttttcaccaaaaaggtactgcaagatagttgaactgcttggtgtgcttctccatatgaagggaaacaataatgaatattcaaataaccatgaaagtggtagcttggcgccttggtatcctgctgatctagctggcgatgctagaacattggtttggaggggcattggttattcgcaagctgaatggcatacttgctatgttgtattatctgggatgtatctatatattttggagtcagaattctccgcgaattaccaaagcatggctagtcgccaagtatttgaagtgccaccaactagtgttggtggatctccttacagtattggtgtgtgttctagaggtggagacacgcataaggcactagaactgaccagcacactggtaattgaatttcgtaatgaaatcgagaaggctatgtggatgaaagcacttgtccaggcaacataccgagcttctgctcctcctgacgtgaacatattaggagatcctgttagccctcccccagaatcaagtacaccacggcttaatagcttgggattagtggatcttgttgtgaatggctctgttattgaaactaaactttcactgtatgggaagctggacagaaagagcagtgattcgcaagagcttctaatgctagagctccttgggaatggagggaaggttaatgttgttcaatcttctcgtggtcttagtgtgaaaacaaaattgcattcattgaaaataatggatgagctacaaggtcgtctttcaatgacttcaaagtatttagtgtgctctgtcatcaatgaaagtgttggagctacctcttccgatacacttgataagggcggcgacctaagcatctttcctgtggatgaggatcctttcatggatgcattaacagattttactccagatcaaaattctaatccagatgactgtcaaattcccaacttcatttctgatgcaaatgagtacaatgaaataggttcaaaagatggttcatgctttgatggggatgaacagaacgcaaaacctactgaaatattttatgaggcacaagatagtaatgtggcagattttgttgttctgacattcttgagcaggagtcctgattcttgtctttatgatggtatagattcacagatgagtattcgtatgtccgcactggaattctactgtaacagacccacacttgttgctctaattgagtttggatttgatcttagcacggttaattctgtgccgaaatgtagtcttgatgtggcacctgcaattgaaactgtgaaacccacagggaaggaagaaggtgctcctactattgtaaaaggattgttaggttatgggaaacgtcgaacaattttcaacatcaaaatggatgtggatagggtatcaatgtttctcaataaggaagatggttctcagcttgcaatgtttgtgcaagagaaatttctgtttgatttgaaggttcatccaagttctttttcaattgatggtatgctggggaatatgagattttgtgacatgtcccttggtccagaacatcgttggggttggctttgcgatatacggaagcctggtgtcgagtcactcataaagttcacattccagtcgtacagtatcgatgatgaagattttgaaggtcataattacagcttgactggtcagctttctgctgttcgtattgtctttctctaccgttttatccaagagtttacttcttactttatggagcttggcacccctcatactgaagaggcaattaagtttattgataaagttggaggttttgagtggttaattcagaaatatgaaatggatggagcttctgctataaagctggatctttcccttgagacacccataatcattgttcctaagaattctcagagcgaagattatatacagtttgatcttggtcaattgaaagtaaggaatgagtttagttggcatggaggtaaagagactgacccttctgctgtaaggcttgatgttctccatgcagaaataaatggaatcaacatggcggttggggtaaatggaactctgggaaagtgtatgattcgtgatggtcgcggcatcaatatagaggtgcgacgtagcctacgggatgtcttcaaaaaggtcccgatactgtctatgaaatttcagataggattgcttcatggtgtcatgtcagataaagaatacaatgtcgcgataagctgtatttcgacaaatctgtccgatacacctaaccttcccccaagttttcgtgaaaatatgaacaggacaaaggagtcaattcgtttacttgcagataaagtcaaccttagcaaccatttgttgctttcacgtaccgttgttgtcatgaccgtggaaattcagtatgcgttgcttgaacttcgcaatggcccagatgcagagtcacctctggcagagcttgctgtggaaggtctatgggtatcctatagaacaacttcaatgcttgaaatggatctatatttgtcaatattgaaattttcaatacatgatatccgtccagatacgaagtctgagatgcgtctgatgcttggatcttgttcagagactgctaatctgtgcgttgatgactcttcaactgatgcaggggtttcgaacctcacaatgctgatactggattatcgttcgcgttcttcttttcaatcatttgttataagaatacagcagcctcgtatacttgttgtcctggattttctgcttcctgttgttgagtattttgtgccttctttaggctcgataactggcagagaggaaagcttagacccgaagaatgatcctcttatgagggctgatgatattatacttactgagcatgttttcttgcaaaaagaggattttattcaactatctcctgtaaggcagctaatagttgatggttgtgatattgacgagttcatttatgatggctgtgggggcactgtatccttatgtgaggaatttgataagaaaggacaggtatactctgggattataatcataattggttgtggcaaaagacttcgattcaaaaatgtcaaaattgagaatggtgcactgcttagaagatgtgtatacttgaacatgggaagcagttactcaatttcttctgaagatgatgtagaggtttctgtgttagaaagttctttcacgaatgatgaagactgtttaaaccttgaagaacataaaaagagaaatctgcagaatgccattgatggtcccacaaaccaaatactgaactttacatttgaggctcaggttgtatctccagaatttacattctatgacagttcaaagttatcaatggatgattcgttgcacattgagaagcttcttcgggccaagatggatttcagtttcatgtatgcttcaaaagaaaaagatatatgggctcgatctgtcattaaagaccttacaattgaagctggttctggtcttcttgttcttgaacctgtagatgtttcatggaaatatacttcagtcaatgaaaagacaaacatagtgttggtgtcgacagatgtttgcatccatctttctctgagtgttgcttctcttatgcttaaactgcaaaaccaaactcttgcagcattgcagtttggtaatattagcccactaatttcttgcacaaactttaagcgaatttggagctcaccaaaaggtgacctacctggttacaacctaacgttctggcggccacaagctccctccaattatgtcatattgggtgattgtgtgtcctcaaggtctgtgccaccttctcaggttgtggttgctataagtaatacttatggtcgtgtacgaaaacctcttggatttaggctaattcatgtattacctggttctctggatctcattgattcctgtcaatcaactgaagaaaacgaatgttctatctggattcctgtaccaccacctggatatttagctctaggatgtgtggtaaatattggaaggttaccaccttcaaaccatgtagtgtattgccttcgttctgatcttgcgacttctgcgacattttcagattgtatacacactctctcacctgctgctggaataatctctgaatttagcatctggcgtgtggacaatgtgattgcttcattctgtgcacataattctatagagcaacccactaaaacagaagctcttaatttgcaccatgttctcctccggaatccaaattgctatattgttaaagatctaagtgcagattcatctatccagaatgaccaatcttctgatcaattaaatcaccgcaagagtctttctggatgggatgtacttcgcactttgtcaagaccaagtaactattgtatgtctactccccattttgaaaggatatggtgggataaaggaaacgataccaagaagccattttctatatggagaccgttacctcgttttggttttgcttcggttggtgactgtataactgaagggtttgaaccacccactcttggcattcttttcaagtgtgacacagttgtttctgagaagcctgtacagtttactaaagtgacacaaattgacagaaaaggccttgaggaaatattcttctggtatccagtgccacctcccggttacgcttctcttggatgtatcgtaacaaaaacagatgaaatgccaagcaaggattccatttgctgccctaaactgagtctagtgagccaagcgaatatgtcagaggatcctatctccatgtcttctagctcaaaaggtccttgctgctggagcatctggaaagttgaaaatcagggctgtactttcctggccagaccagatgtcaagaagccctcagctcaactggcataccgtattgctgaccatgcgaagccgaaggcacgtgaaaacattactgctgagctgaagctgggttgtttgtcggttggcattcttgacagctcttgtggaatggtcacaccactttttgacacaacaatcgctaatataaatcttgcaacacatggaagatttgagacattgaatgctgtattgatctgttcaattgctgcatccacattcaatagacacttggaggcatgggaaccctttgttgagccatttgatggaatattcaagtttgaaacatatgataccagtgaacaccctccttccaaagttggtaagaggattcgtgttgctgcaacaagtcctctaaatgctaacctgagctctgcaaatcttgagctgcttatagaaacgttagtttcatggagaagacagattgatcttgaaaataaatcgtcaacaaaaagcgagggtaccattgaaaacatgaaaaaagctgatgattcttcgtactctgcattgaatgaagatgatttccagagagtggtttttgagaataaattaggatgtgatgtttatcttaaaaaaaaaatggaagatagtgaaatcactattgagcttttacagcatgagagcaaagtttcgttgttgcttccgcctcccaggttttcagataaactaaatgtgttatccaattcaacagaatcaagatactatgttgttgtacagatctttgagtctaagggcttgcctatcatagatgacggcaatggtcacagctacttctgtgctttacgcttacttattggaagccatgcttctgatcagcacaaagtgttcccacagagtgccaggacgagatgtgtaaaacctgtggaaactactgagttactgacccactgtgccaagtggaatgaacattttatatttgaagttccagaacaggcatcagctaatttagagattgaagtaacaaatcttgcatcaaaagctgggaaaggtgaagtaattggttctctgtctatgcctattggacgaggagcaaccatgttgaaacgagctccttctatgaggatgattcagcatgtttctgatgtcaaacgggtgctaacatgtcctcttacaaagaagggtcagatacctaattttgaggacaggaaaaaaggtggtgttttagtactctcaagctgttatgtggaacgttctactcattcatatttccagaggttgaaagacagtataaacaatgtggagagcgacttctgtataggacttagcccagatggtccatgggaaagttttactgcagctttgccagtgaccgtccttccaaaatcgcttaataataaccgttttgcatttgaggtcactatgaggaatggaaagaaacatgcaaccttgagaggtcttgcagttattgccaatgatgctgacataaaacttgaagtgtctatatgtcctgtaaacatgcttgataactctatgttaaatactagattggcaagctccaccagtgttattgatgaagtatttgaaaatcagtggtaccgaccaattgcagggtggggacataacccttcaattggtcacagaaaagacttaaagcagtggagcacaaaggactgctcatactcatctaaggcattttttgagcctggccttccatctggttggaggtggacctcaccgtggaaaattgaaaggttgaattttgtagataatgatggatgggcatatgctgcagattttcaaaacttgaattggccatcatcatcctggagatcttctaaatcaccacacgacttcgtgagaagaaggcgttgggtacgttctagacagcagtcgcaagaacaaagtgcagaaattcctagaaaagtacttgctactgtcagtcctcattcatctactgcgttgccttggacatcgatgattagggatatggatttatgcttgcaagttcgcccatattctgaaaaatcagaggaatcatatagctggagccagatttgttcactaggttctgagagtatacctaaacagcagcactcttcactttctaggcaaagcaccgtaaagcagtcagtggtatcatcaaggaattctgttcttaagcttgctgaactcgagaaaaaagatgtgctctcatattgccatcctcctgttagcactgaaagatatttctggtttagtgttggaattgatgcttctgttgttcatacagatttgaatgtacctgtctatgactggagaatttctttcaattcaattcttagacttgaaaataaacttccctatgaagctgagtatgctatatgggagatttccactaaaagtaatatggttgaaaagcagcatggtattgtcccttcgggtggaagtgtatttatctattcagcagatatacggaaaccaatttatcttacattgtttctccaaaacggttggattctagaaaaggatgctgtattgataatggacttgttgtccttggaacatgtttcttcgttctggatggttcagaagcagagccagaggagactacgagttagtgttgagcatgacctaggtgctagtgatgctgcaccaaagacactgagattgtttgtcccttactggataaaaaaccactcgtcaattccattatgttatcgcatagtagaaggggaatccacagaaagcacagaagcagactcacttagcagaccagactcgctaagtagagtgtctaagtcttcaaaattttcccttaaatattcttcaaagtctcttgtcagaagaggaacaatgtcgcacagaaatatgcaagtactggaagatattgaagattgtagcacagactatgtgatgctatcaccacaagattacttgaaccgatctgctggtatgcgctctgagtcaagggataacaatttcagtccagctcgagttgcaatatctatggctgttggtggttgcacacagtacagcgtaggagtatcgctttttgagcttgagaacaaggagcatgttgatatcaaaacatttgcttctgatgggtcatattactggttctcagttcaattgaagatggcttcagataggacaaaggtggtaaatttactgccgagagcacttcttatcaatagaattggaagaactatttttctatctgaatatcatgatgagactgaagagcccttacaaccatatgaacctccaaaagtatttcaatggcgatcagaatttggaagtgaacttttaaagttgaggttggagggataccaatggagtacaccttttagtatcaatgctaatggagttatgtgtgtgctcatgaacagcacaacaggaaatgatcaggcttttgtcagggtaaatgtgagaagtggaacaaaaagttcacggcatgaagttgtatttcagcttgattgctggtccagcccatacagggtggagaatcgctccatgttcttgcctatacggtttcggcagtttggtggtgatgatcattcatggcgtaatctgcttccgaattcatcagcttccttctttttggaggacctgagcagaaggcatctattggaagttttggttgatggaactgaccctatgaactccatgacatatgacatcaatgtcgtaatggatcatcagccccttactaattcagatgcccttaagaaggccttacgtgtcactgtcttgaaggaggggaaattgaatgttattcaaattattgattggctgccagataatagaaatcgaggacagataactgaaaggatgttatcaccaatctttcagccatcagaggtcgactatgggcagtcatctcctgatctggatagtgaatttcatgttactttggaactaacggagcttggcatttctgtaattgaccatatgcctgaggaagttctttacctctcagtgcagcaactgttacttgcatactcatctggaattggctctggagtaaatcggctcaaaatgcggatgcattggattcaagttgataatcaattaccatttgttcctatgcctgtacttttctgtcctcaaaagattgaaaatcagtcagactatattttcaagttctctatgacagttcagaccaacaattctcttgatttttgtgtctatccttatgtcggtgtccaggttcctgagaattgtgtgttctttgttaacatccatgaaccaatcatttggcgcctccatgagatgattcaacacctaaaattcgataggatatatagcaatcaaccttcagctgtttcagtggaccccatactgaaaattgggcttctgaacatctccgagatccgatttagagtgtcaatggcaatgtccccaagccaaaggccaaggggagtatttgggttctggtcgtcgttgatgactgcattgggaaacatggagcatatgccggtccgtatagctcaaagataccgggaggaattgtgcatgcggcaaagtgcacttatgaactctgctatatctaacattcaaaaggatcttcttagccaacctcttcagctactttccggtgttgatattcttggtaatgcgagtagcgctctgagtaacatgagcaaggggatagctgcattgtctatggacaagaaattcattcagggccggatgagacaggatagcaaaggtgtggaagactttggggatgtcataagagatggaggtggtgctcttgcaaaaggcatcttcagaggtgtcacaggcatattgacaaagcccatcgagggtgcaaaatcttctggtgttgaaggttttgtgcaaggagttggaaagggtataattggcgcagctgcacaaccagttagcggagttcttgatcttttatcaaaaactactgaaggtgccaatgcggtaaaaatgaaaatatcatcagcgataatggctgaggagcagttgctgcgtaggcgtcttcctcgagctattggtgggaatagtttgctctatccttatgacggacacaaagctactggccaggctatcttgcatctagctgaatgtgctacattccttggtcaaattgatatttttaaaatccgaggaaagtttgcttctaccgatgcttatgaggatcattttttacttcctaaggggaagatttttttaatcactcacagaagagtactattgcttcagttaccaatgatgacccagcgtaagttcaatcctacgaaggatccttgttcagtaatatgggatgtattatgggatgatttggtaacagtggagatgacccatgggaaaaaagatcctccagattcctggccttctaagcttattttatacttgaaagctaaaccttcaaattcgaaggaaattgttcgtttggtcaagtgtaatcgaggttcagatcaagcatctatcatttactcggcaattgacaaagcttataaagcttacggtccaaactcgttgaaggaattcttgagatggaaggtaccaaggccatatgcccctcgcaatagtagtggccgaagtatccaagacttatcatttggttaaaaggtcaacacaaatgcacactttagtgttaaacacagtagaatcttaggatgaaggtattttaggttgacacttttggttaccaggcaaatgatatattctacatatacactatagatctctatgatcataccttgctcattaaaagcatttactattcttgtgatggggagatccatgtccgagttttggccaaaccactacagatctggtttccttcggcatatacaatcacattcaatatggattttttgacggaccggttcttcgcgaagagtttatcacttcactactacaccgtgtctcttatagatgtatttatgatcggtttcaggattatgtcatgcagtttattaattgtttttcatttttagaaaactaaactagtgtctcagggttgtacatggcttaagtccctttgaatataataatagtatgcgacaatgcaaagttggtaagatgggagttcaattcatttggtgatgcaaccactactgttagacgcactaacgacatctggtcacccatcggtgatgatccctctaatgtcgctattttcacccttggggtctagacatgaaggctagggtgattgaaaatctatttttg

SEQ ID NO: 203637 - DNA, 13790 bp, Zea Mays
acaagtgccaagtgccaacaccgccggaaaccacctcgtgctggcccatcccgacatcccgtcccgtgctcccctcccctcctctcgaccacctcctcgtcgtcttcctcgccccctccgccacctccgccccggcctctccgctcccacccccgcggaaaccctaactccctcttggcacaggaggcctatgacggagattcgccgcgcgcaaggagggagtggattcgcgactgcgcagccgctgccgtcgtcctagggcgcgtcgagcactgccaccccattgacgggcccatccccacgacatccgccatgttcgagggccacgtgctgtatctgctacgcaaatatttgggtgaatatgttgaagggctttctgttgaagctctcagaataagtgtatggaaaggtgacgttgttctaaaagacttaaaacttaaggctgaagccctgaattctctcgggtttccagtgacagtgaaagctgggtttgttggcaccataacattaaaggtcccatggaagtgccttggtaaagaaccagttattgtcctcattgatcgtctatttgttcttgctcatcctgctcctgatggacagactctcaaggaagaagatagacaaaaactttttgaagccaagcttcagcagattgaggctgcggaggcagctactcttgaagcaacaaataggaactcaagaggagggcctgcaccaggtggaaattcatggttatacaatttaatatctacaattattggtaatcttaaagtcaccatcagtaatgtacacataagatatgaagattctgtcagcaattctgggcacccatttgcgtctggtttcacgttatcaaaacttgcagccgttacagtggatgaggatggtaatgaaacatttgatgcaggtgtagccctagataagctacgaaagtctgttgaactgcataggctgggcatctaccatgactcagacagtaatccttggaagcttaataaaaattgggaagctctaaatcgtaccgaatggagtgagatatttcaagatggcattgaagatggctctcaaagttccatctgggcagtaaatcggaactacttggtctcgcctataaatggaacccttaaatataaacgacttgggaagaatgaaagaggggatccagataccccattggagaaagcctcacttgtcctcagtgatgtttctttaactgtaactgaggcacagtattatgatggcattaaactgttggaagcattttcgaggtttagaacacgtgttgatgtgtctcatttacggcctgttgtgcctgtaaaggaggatcgtcgtgcttggtggcgttatgctgtgctggctggtctgcgacaaaggaaactatgctattggttttcatgggagagaactagacgcctctgccagcttcgacgccgttatgttcaattgtatgccacccttttgcaacaagcagcaaaagttgacatttctgaaattcgagagatagagaaaattctagacatgaaggtcataatactttggaggttgctgggtcatgctaaggttgaaacagtgaaatcaaaggggacactatatagaaaaggggcctcaaagaaaagatggtggccttttgcatggaacacgactggtttaccttctgaggaagctacacacccagaatcacagttagatgaagaggaacaactgactaaagaagagtggcaggctattaataagctgttgagttaccaaccagatgaagatatgtcttttccccttgagaaggtttccccaaatgtgattcaatttatgatggatgtatccattggccaggctggtgcaaggatcatcaatattgatggaactgaggttttatgtggtagatttcatcagcttcaggttgtcactaagttgtatccgaagagcacatgttgtgatgtgacattgaaatattgtggtctatcatctccagaaggttctcttgctcagagtgtcgttagcgagggaaagagtcatgctcttgatgttagttttgtacgagcaccaattggtatggaccttgattggcagctcattgcgaagatatcaccatgccatgttacggttctgaaggagagttatgaacgatttatggagttcattaagcgaagcaacgctgttagtccaacagtaactatggaaacagcaactgctctacagctgaagctggagaaggtcacacgtagggctcaggagcagcttcagctggtgttagaagaacaaagcagatttggacttgatattgatctggatgcaccaaaagttaggattcctttgaatgctaatcaacctttgctgggcaatgagtactttgttcttgattttggccattttacattgcatacaagagatggtaagcatgatgaagaaagacagagtctgtattcaggcttttatattactgggagggatatggctgctttccttatttgtgatttagctcagaacatatactcaatacctgaaaatttagatcaagataccctcctaggtcatacctttgatgataatcagttctgttctcttcttgatcgctgtggaatgtcagtgataattgagcagatcaaagttccacatccgaattatccatcaactcgtgttgcttttcaagtacccaatctggacattcacttttcaccaaaaaggtactgcaagatagttgaactgcttggtgtgcttctccatatgaagggaaacaataatgaatattcaaataaccatgaaagtggtagcttggcgccttggtatcctgctgatctagctggcgatgctagaacattggtttggaggggcattggttattcgcaagctgaatggcatacttgctatgttgtattatctgggatgtatctatatattttggagtcagaattctccgcgaattaccaaaggtgttgtagcatggctagtcgccaagtatttgaagtgccaccaactagtgttggtggatctccttacagtattggtgtgtgttctagaggtggagacacgcataaggcactagaactgaccagcacactggtaattgaatttcgtaatgaaatcgagaaggctatgtggatgaaagcacttgtccaggcaacataccgagcttctgctcctcctgacgtgaacatattaggagatcctgttagccctcccccagaatcaagtacaccacggcttaatagcttgggattagtggatcttgttgtgaatggctctgttattgaaactaaactttcactgtatgggaagctggacagaaagagcagtgattcgcaagagcttctaatgctagagctccttgggaatggagggaaggttaatgttgttcaatcttctcgtggtcttagtgtgaaaacaaaattgcattcattgaaaataatggatgagctacaaggtcgtctttcaatgacttcaaagtatttagtgtgctctgtcatcaatgaaagtgttggagctacctcttccgatacacttgataagggcggcgacctaagcatctttcctgtggatgaggatcctttcatggatgcattaacagattttactccagatcaaaattctaatccagatgactgtcaaattcccaacttcatttctgatgcaaatgagtacaatgaaataggttcaaaagatggttcatgctttgatggggatgaacagaacgcaaaacctactgaaatattttatgaggcacaagatagtaatgtggcagattttgttgttctgacattcttgagcaggagtcctgattcttgtctttatgatggtatagattcacagatgagtattcgtatgtccgcactggaattctactgtaacagacccacacttgttgctctaattgagtttggatttgatcttagcacggttaattctgtgccgaaatgtagtcttgatgtggcacctgcaattgaaactgtgaaacccacagggaaggaagaaggtgctcctactattgtaaaaggattgttaggttatgggaaacgtcgaacaattttcaacatcaaaatggatgtggatagggtatcaatgtttctcaataaggaagatggttctcagcttgcaatgtttgtgcaagagaaatttctgtttgatttgaaggttcatccaagttctttttcaattgatggtatgctggggaatatgagattttgtgacatgtcccttggtccagaacatcgttggggttggctttgcgatatacggaagcctggtgtcgagtcactcataaagttcacattccagtcgtacagtatcgatgatgaagattttgaaggtcataattacagcttgactggtcagctttctgctgttcgtattgtctttctctaccgttttatccaagagtttacttcttactttatggagcttggcacccctcatactgaagaggcaattaagtttattgataaagttggaggttttgagtggttaattcagaaatatgaaatggatggagcttctgctataaagctggatctttcccttgagacacccataatcattgttcctaagaattctcagagcgaagattatatacagtttgatcttggtcaattgaaagtaaggaatgagtttagttggcatggaggtaaagagactgacccttctgctgtaaggcttgatgttctccatgcagaaataaatggaatcaacatggcggttggggtaaatggaactctgggaaagtgtatgattcgtgatggtcgcggcatcaatatagaggtgcgacgtagcctacgggatgtcttcaaaaaggtcccgatactgtctatgaaatttcagataggattgcttcatggtgtcatgtcagataaagaatacaatgtcgcgataagctgtatttcgacaaatctgtccgatacacctaaccttcccccaagttttcgtgaaaatatgaacaggacaaaggagtcaattcgtttacttgcagataaagtcaaccttagcaaccatttgttgctttcacgtaccgttgttgtcatgaccgtggaaattcagtatgcgttgcttgaacttcgcaatggcccagatgcagagtcacctctggcagagcttgctgtggaaggtctatgggtatcctatagaacaacttcaatgcttgaaatggatctatatttgtcaatattgaaattttcaatacatgatatccgtccagatacgaagtctgagatgcgtctgatgcttggatcttgttcagagactgctaatctgtgcgttgatgactcttcaactgatgcaggggtttcgaacctcacaatgctgatactggattatcgttcgcgttcttcttttcaatcatttgttataagaatacagcagcctcgtatacttgttgtcctggattttctgcttcctgttgttgagtattttgtgccttctttaggctcgataactggcagagaggaaagcttagacccgaagaatgatcctcttatgagggctgatgatattatacttactgagcatgttttcttgcaaaaagaggattttattcaactatctcctgtaaggcagctaatagttgatggttgtgatattgacgagttcatttatgatggctgtgggggcactgtatccttatgtgaggaatttgataagaaaggacaggtatactctgggattataatcataattggttgtggcaaaagacttcgattcaaaaatgtcaaaattgagaatggtgcactgcttagaagatgtgtatacttgaacatgggaagcagttactcaatttcttctgaagatgatgtagaggtttctgtgttagaaagttctttcacgaatgatgaagactgtttaaaccttgaagaacataaaaagagaaatctgcagaatgccattgatggtcccacaaaccaaatactgaactttacatttgaggctcaggttgtatctccagaatttacattctatgacagttcaaagttatcaatggatgattcgttgcacattgagaagcttcttcgggccaagatggatttcagtttcatgtatgcttcaaaagaaaaagatatatgggctcgatctgtcattaaagaccttacaattgaagctggttctggtcttcttgttcttgaacctgtagatgtttcatggaaatatacttcagtcaatgaaaagacaaacatagtgttggtgtcgacagatgtttgcatccatctttctctgagtgttgcttctcttatgcttaaactgcaaaaccaaactcttgcagcattgcagtttggtaatattagcccactaatttcttgcacaaactttaagcgaatttggagctcaccaaaaggtgacctacctggttacaacctaacgttctggcggccacaagctccctccaattatgtcatattgggtgattgtgtgtcctcaaggtctgtgccaccttctcaggttgtggttgctataagtaatacttatggtcgtgtacgaaaacctcttggatttaggctaattcatgtattacctggttctctggatctcattgattcctgtcaatcaactgaagaaaacgaatgttctatctggattcctgtaccaccacctggatatttagctctaggatgtgtggtaaatattggaaggttaccaccttcaaaccatgtagtgtattgccttcgttctgatcttgcgacttctgcgacattttcagattgtatacacactctctcacctgctgctggaataatctctgaatttagcatctggcgtgtggacaatgtgattgcttcattctgtgcacataattctatagagcaacccactaaaacagaagctcttaatttgcaccatgttctcctccggaatccaaattgctatattgttaaagatctaagtgcagattcatctatccagaatgaccaatcttctgatcaattaaatcaccgcaagagtctttctggatgggatgtacttcgcactttgtcaagaccaagtaactattgtatgtctactccccattttgaaaggatatggtgggataaaggaaacgataccaagaagccattttctatatggagaccgttacctcgttttggttttgcttcggttggtgactgtataactgaagggtttgaaccacccactcttggcattcttttcaagtgtgacacagttgtttctgagaagcctgtacagtttactaaagtgacacaaattgacagaaaaggccttgaggaaatattcttctggtatccagtgccacctcccggttacgcttctcttggatgtatcgtaacaaaaacagatgaaatgccaagcaaggattccatttgctgccctaaactgagtctagtgagccaagcgaatatgtcagaggatcctatctccatgtcttctagctcaaaaggtccttgctgctggagcatctggaaagttgaaaatcagggctgtactttcctggccagaccagatgtcaagaagccctcagctcaactggcataccgtattgctgaccatgcgaagccgaaggcacgtgaaaacattactgctgagctgaagctgggttgtttgtcggttggcattcttgacagctcttgtggaatggtcacaccactttttgacacaacaatcgctaatataaatcttgcaacacatggaagatttgagacattgaatgctgtattgatctgttcaattgctgcatccacattcaatagacacttggaggcatgggaaccctttgttgagccatttgatggaatattcaagtttgaaacatatgataccagtgaacaccctccttccaaagttggtaagaggattcgtgttgctgcaacaagtcctctaaatgctaacctgagctctgcaaatcttgagctgcttatagaaacgttagtttcatggagaagacagattgatcttgaaaataaatcgtcaacaaaaagcgagggtaccattgaaaacatgaaaaaagctgatgattcttcgtactctgcattgaatgaagatgatttccagagagtggtttttgagaataaattaggatgtgatgtttatcttaaaaaaaaaatggaagatagtgaaatcactattgagcttttacagcatgagagcaaagtttcgttgttgcttccgcctcccaggttttcagataaactaaatgtgttatccaattcaacagaatcaagatactatgttgttgtacagatctttgagtctaagggcttgcctatcatagatgacggcaatggtcacagctacttctgtgctttacgcttacttattggaagccatgcttctgatcagcacaaagtgttcccacagagtgccaggacgagatgtgtaaaacctgtggaaactactgagttactgacccactgtgccaagtggaatgaacattttatatttgaagttccagaacaggcatcagctaatttagagattgaagtaacaaatcttgcatcaaaagctgggaaaggtgaagtaattggttctctgtctatgcctattggacgaggagcaaccatgttgaaacgagctccttctatgaggatgattcagcatgtttctgatgtcaaacgggtgctaacatgtcctcttacaaagaagggtcagatacctaattttgaggacaggaaaaaaggtggtgttttagtactctcaagctgttatgtggaacgttctactcattcatatttccagaggttgaaagacagtataaacaatgtggagagcgacttctgtataggacttagcccagatggtccatgggaaagttttactgcagctttgccagtgaccgtccttccaaaatcgcttaataataaccgttttgcatttgaggtcactatgaggaatggaaagaaacatgcaaccttgagaggtcttgcagttattgccaatgatgctgacataaaacttgaagtgtctatatgtcctgtaaacatgcttgataactctatgttaaatactagattggcaagctccaccagtgttattgatgaagtatttgaaaatcagtggtaccgaccaattgcagggtggggacataacccttcaattggtcacagaaaagacttaaagcagtggagcacaaaggactgctcatactcatctaaggcattttttgagcctggccttccatctggttggaggtggacctcaccgtggaaaattgaaaggttgaattttgtagataatgatggatgggcatatgctgcagattttcaaaacttgaattggccatcatcatcctggagatcttctaaatcaccacacgacttcgtgagaagaaggcgttgggtacgttctagacagcagtcgcaagaacaaagtgcagaaattcctagaaaagtacttgctactgtcagtcctcattcatctactgcgttgccttggacatcgatgattagggatatggatttatgcttgcaagttcgcccatattctgaaaaatcagaggaatcatatagctggagccagatttgttcactaggttctgagagtatacctaaacagcagcactcttcactttctaggcaaagcaccgtaaagcagtcagtggtatcatcaaggaattctgttcttaagcttgctgaactcgagaaaaaagatgtgctctcatattgccatcctcctgttagcactgaaagatatttctggtttagtgttggaattgatgcttctgttgttcatacagatttgaatgtacctgtctatgactggagaatttctttcaattcaattcttagacttgaaaataaacttccctatgaagctgagtatgctatatgggagatttccactaaaagtaatatggttgaaaagcagcatggtattgtcccttcgggtggaagtgtatttatctattcagcagatatacggaaaccaatttatcttacattgtttctccaaaacggttggattctagaaaaggatgctgtattgataatggacttgttgtccttggaacatgtttcttcgttctggatggttcagaagcagagccagaggagactacgagttagtgttgagcatgacctaggtgctagtgatgctgcaccaaagacactgagattgtttgtcccttactggataaaaaaccactcgtcaattccattatgttatcgcatagtagaaggggaatccacagaaagcacagaagcagactcacttagcagaccagactcgctaagtagagtgtctaagtcttcaaaattttcccttaaatattcttcaaagtctcttgtcagaagaggaacaatgtcgcacagaaatatgcaagtactggaagatattgaagattgtagcacagactatgtgatgctatcaccacaagattacttgaaccgatctgctggtatgcgctctgagtcaagggataacaatttcagtccagctcgagttgcaatatctatggctgttggtggttgcacacagtacagcgtaggagtatcgctttttgagcttgagaacaaggagcatgttgatatcaaaacatttgcttctgatgggtcatattactggttctcagttcaattgaagatggcttcagataggacaaaggtggtaaatttactgccgagagcacttcttatcaatagaattggaagaactatttttctatctgaatatcatgatgagactgaagagcccttacaaccatatgaacctccaaaagtatttcaatggcgatcagaatttggaagtgaacttttaaagttgaggttggagggataccaatggagtacaccttttagtatcaatgctaatggagttatgtgtgtgctcatgaacagcacaacaggaaatgatcaggcttttgtcagggtaaatgtgagaagtggaacaaaaagttcacggcatgaagttgtatttcagcttgattgctggtccagcccatacagggtggagaatcgctccatgttcttgcctatacggtttcggcagtttggtggtgatgatcattcatggcgtaatctgcttccgaattcatcagcttccttctttttggaggacctgagcagaaggcatctattggaagttttggttgatggaactgaccctatgaactccatgacatatgacatcaatgtcgtaatggatcatcagccccttactaattcagatgcccttaagaaggccttacgtgtcactgtcttgaaggaggggaaattgaatgttattcaaattattgattggctgccagataatagaaatcgaggacagataactgaaaggatgttatcaccaatctttcagccatcagaggtcgactatgggcagtcatctcctgatctggatagtgaatttcatgttactttggaactaacggagcttggcatttctgtaattgaccatatgcctgaggaagttctttacctctcagtgcagcaactgttacttgcatactcatctggaattggctctggagtaaatcggctcaaaatgcggatgcattggattcaagttgataatcaattaccatttgttcctatgcctgtacttttctgtcctcaaaagattgaaaatcagtcagactatattttcaagttctctatgacagttcagaccaacaattctcttgatttttgtgtctatccttatgtcggtgtccaggttcctgagaattgtgtgttctttgttaacatccatgaaccaatcatttggcgcctccatgagatgattcaacacctaaaattcgataggatatatagcaatcaaccttcagctgtttcagtggaccccatactgaaaattgggcttctgaacatctccgagatccgatttagagtgtcaatggcaatgtccccaagccaaaggccaaggggagtatttgggttctggtcgtcgttgatgactgcattgggaaacatggagcatatgccggtccgtatagctcaaagataccgggaggaattgtgcatgcggcaaagtgcacttatgaactctgctatatctaacattcaaaaggatcttcttagccaacctcttcagctactttccggtgttgatattcttggtaatgcgagtagcgctctgagtaacatgagcaaggggatagctgcattgtctatggacaagaaattcattcagggccggatgagacaggatagcaaaggtgtggaagactttggggatgtcataagagatggaggtggtgctcttgcaaaaggcatcttcagaggtgtcacaggcatattgacaaagcccatcgagggtgcaaaatcttctggtgttgaaggttttgtgcaaggagttggaaagggtataattggcgcagctgcacaaccagttagcggagttcttgatcttttatcaaaaactactgaaggtgccaatgcggtaaaaatgaaaatatcatcagcgataatggctgaggagcagttgctgcgtaggcgtcttcctcgagctattggtgggaatagtttgctctatccttatgacggacacaaagctactggccaggctatcttgcatctagctgaatgtgctacattccttggtcaaattgatatttttaaaatccgaggaaagtttgcttctaccgatgcttatgaggatcattttttacttcctaaggggaagatttttttaatcactcacagaagagtactattgcttcagttaccaatgatgacccagcgtaagttcaatcctacgaaggatccttgttcagtaatatgggatgtattatgggatgatttggtaacagtggagatgacccatgggaaaaaagatcctccagattcctggccttctaagcttattttatacttgaaagctaaaccttcaaattcgaaggaaattgttcgtttggtcaagtgtaatcgaggttcagatcaagcatctatcatttactcggcaattgacaaagcttataaagcttacggtccaaactcgttgaaggaattcttgagatggaaggtaccaaggccatatgcccctcgcaatagtagtggccgaagtatccaagacttatcatttggttaaaaggtcaacacaaatgcacactttagtgttaaacacagtagaatcttaggatgaaggtattttaggttgacacttttggttaccaggcaaatgatatattctacatatacactataggtatcagaggataggtactttgccttcatgtaaatagatatattttaggaggcgccggtattcatgtaaatgtgaacatctctgttataaagaaaaaaaataataatgcaaattatgcaagattcattgctgctgtcttgttgcaatgtttaatgtgttctcttgcgattgtctaaagacccaaaccgttaacgtgtctttactactatggtttcatttcacagatctctatgatcataccttgctcattaaaagcatttactattcttgtgatggggagatccatgtccgagttttggccaaaccactacagatctggtttccttcggcatatacaatcacattcaatatggattttttgacggaccggttcttcgcgaagagtttatcacttcactactacaccgtgtctcttatagatgtatttatgatcggtttcaggattatgtcatgcagtttattaattgtttttcatttttagaaaactaaactagtgtctcagggttgtacatggcttaagtccctttgaatataataatagtatgcgacaatgcaaagttggtaagatgggagttcaattcatttggtgatgcaaccactactgttagacgcactaacgacatctggtcacccatcggtgatgatccctctaatgtcgctattttcacccttggggtctagacatgaaggctagggtgattgaaaatctatttttg

SEQ ID NO: 203638 - DNA, 13250 bp, Zea Mays
atgctggtgctgtatctgctacgcaaatatttgggtgaatatgttgaagggctttctgttgaagctctcagaataagtgtatggaaaggtgacgttgttctaaaagacttaaaacttaaggctgaagccctgaattctctcgggtttccagtgacagtgaaagctgggtttgttggcaccataacattaaaggtcccatggaagtgccttggtaaagaaccagttattgtcctcattgatcgtctatttgttcttgctcatcctgctcctgatggacagactctcaaggaagaagatagacaaaaactttttgaagccaagcttcagcagattgaggctgcggaggcagctactcttgaagcaacaaataggaactcaagaggagggcctgcaccaggtggaaattcatggttatacaatttaatatctacaattattggtaatcttaaagtcaccatcagtaatgtacacataagatatgaagattctgtcagcaattctgggcacccatttgcgtctggtttcacgttatcaaaacttgcagccgttacagtggatgaggatggtaatgaaacatttgatgcaggtgtagccctagataagctacgaaagtctgttgaactgcataggctgggcatctaccatgactcagacagtaatccttggaagcttaataaaaattgggaagctctaaatcgtaccgaatggagtgagatatttcaagatggcattgaagatggctctcaaagttccatctgggcagtaaatcggaactacttggtctcgcctataaatggaacccttaaatataaacgacttgggaagaatgaaagaggggatccagataccccattggagaaagcctcacttgtcctcagtgatgtttctttaactgtaactgaggcacagtattatgatggcattaaactgttggaagcattttcgaggtttagaacacgtgttgatgtgtctcatttacggcctgttgtgcctgtaaaggaggatcgtcgtgcttggtggcgttatgctgtgctggctggtctgcgacaaaggaaactatgctattggttttcatgggagagaactagacgcctctgccagcttcgacgccgttatgttcaattgtatgccacccttttgcaacaagcagcaaaagttgacatttctgaaattcgagagatagagaaaattctagacatgaaggtcataatactttggaggttgctgggtcatgctaaggttgaaacagtgaaatcaaaggggacactatatagaaaaggggcctcaaagaaaagatggtggccttttgcatggaacacgactggtttaccttctgaggaagctacacacccagaatcacagttagatgaagaggaacaactgactaaagaagagtggcaggctattaataagctgttgagttaccaaccagatgaagatatgtcttttccccttgagaaggtttccccaaatgtgattcaatttatgatggatgtatccattggccaggctggtgcaaggatcatcaatattgatggaactgaggttttatgtggtagatttcatcagcttcaggttgtcactaagttgtatccgaagagcacatgttgtgatgtgacattgaaatattgtggtctatcatctccagaaggttctcttgctcagagtgtcgttagcgagggaaagagtcatgctcttgatgttagttttgtacgagcaccaattggtatggaccttgattggcagctcattgcgaagatatcaccatgccatgttacggttctgaaggagagttatgaacgatttatggagttcattaagcgaagcaacgctgttagtccaacagtaactatggaaacagcaactgctctacagctgaagctggagaaggtcacacgtagggctcaggagcagcttcagctggtgttagaagaacaaagcagatttggacttgatattgatctggatgcaccaaaagttaggattcctttgaatgctaatcaacctttgctgggcaatgagtactttgttcttgattttggccattttacattgcatacaagagatggtaagcatgatgaagaaagacagagtctgtattcaggcttttatattactgggagggatatggctgctttccttatttgtgatttagctcagaacatatactcaatacctgaaaatttagatcaagataccctcctaggtcatacctttgatgataatcagttctgttctcttcttgatcgctgtggaatgtcagtgataattgagcagatcaaagttccacatccgaattatccatcaactcgtgttgcttttcaagtacccaatctggacattcacttttcaccaaaaaggtactgcaagatagttgaactgcttggtgtgcttctccatatgaagggaaacaataatgaatattcaaataaccatgaaagtggtagcttggcgccttggtatcctgctgatctagctggcgatgctagaacattggtttggaggggcattggttattcgcaagctgaatggcatacttgctatgttgtattatctgggatgtatctatatattttggagtcagaattctccgcgaattaccaaagcatggctagtcgccaagtatttgaagtgccaccaactagtgttggtggatctccttacagtattggtgtgtgttctagaggtggagacacgcataaggcactagaactgaccagcacactggtaattgaatttcgtaatgaaatcgagaaggctatgtggatgaaagcacttgtccaggcaacataccgagcttctgctcctcctgacgtgaacatattaggagatcctgttagccctcccccagaatcaagtacaccacggcttaatagcttgggattagtggatcttgttgtgaatggctctgttattgaaactaaactttcactgtatgggaagctggacagaaagagcagtgattcgcaagagcttctaatgctagagctccttgggaatggagggaaggttaatgttgttcaatcttctcgtggtcttagtgtgaaaacaaaattgcattcattgaaaataatggatgagctacaaggtcgtctttcaatgacttcaaagtatttagtgtgctctgtcatcaatgaaagtgttggagctacctcttccgatacacttgataagggcggcgacctaagcatctttcctgtggatgaggatcctttcatggatgcattaacagattttactccagatcaaaattctaatccagatgactgtcaaattcccaacttcatttctgatgcaaatgagtacaatgaaataggttcaaaagatggttcatgctttgatggggatgaacagaacgcaaaacctactgaaatattttatgaggcacaagatagtaatgtggcagattttgttgttctgacattcttgagcaggagtcctgattcttgtctttatgatggtatagattcacagatgagtattcgtatgtccgcactggaattctactgtaacagacccacacttgttgctctaattgagtttggatttgatcttagcacggttaattctgtgccgaaatgtagtcttgatgtggcacctgcaattgaaactgtgaaacccacagggaaggaagaaggtgctcctactattgtaaaaggattgttaggttatgggaaacgtcgaacaattttcaacatcaaaatggatgtggatagggtatcaatgtttctcaataaggaagatggttctcagcttgcaatgtttgtgcaagagaaatttctgtttgatttgaaggttcatccaagttctttttcaattgatggtatgctggggaatatgagattttgtgacatgtcccttggtccagaacatcgttggggttggctttgcgatatacggaagcctggtgtcgagtcactcataaagttcacattccagtcgtacagtatcgatgatgaagattttgaaggtcataattacagcttgactggtcagctttctgctgttcgtattgtctttctctaccgttttatccaagagtttacttcttactttatggagcttggcacccctcatactgaagaggcaattaagtttattgataaagttggaggttttgagtggttaattcagaaatatgaaatggatggagcttctgctataaagctggatctttcccttgagacacccataatcattgttcctaagaattctcagagcgaagattatatacagtttgatcttggtcaattgaaagtaaggaatgagtttagttggcatggaggtaaagagactgacccttctgctgtaaggcttgatgttctccatgcagaaataaatggaatcaacatggcggttggggtaaatggaactctgggaaagtgtatgattcgtgatggtcgcggcatcaatatagaggtgcgacgtagcctacgggatgtcttcaaaaaggtcccgatactgtctatgaaatttcagataggattgcttcatggtgtcatgtcagataaagaatacaatgtcgcgataagctgtatttcgacaaatctgtccgatacacctaaccttcccccaagttttcgtgaaaatatgaacaggacaaaggagtcaattcgtttacttgcagataaagtcaaccttagcaaccatttgttgctttcacgtaccgttgttgtcatgaccgtggaaattcagtatgcgttgcttgaacttcgcaatggcccagatgcagagtcacctctggcagagcttgctgtggaaggtctatgggtatcctatagaacaacttcaatgcttgaaatggatctatatttgtcaatattgaaattttcaatacatgatatccgtccagatacgaagtctgagatgcgtctgatgcttggatcttgttcagagactgctaatctgtgcgttgatgactcttcaactgatgcaggggtttcgaacctcacaatgctgatactggattatcgttcgcgttcttcttttcaatcatttgttataagaatacagcagcctcgtatacttgttgtcctggattttctgcttcctgttgttgagtattttgtgccttctttaggctcgataactggcagagaggaaagcttagacccgaagaatgatcctcttatgagggctgatgatattatacttactgagcatgttttcttgcaaaaagaggattttattcaactatctcctgtaaggcagctaatagttgatggttgtgatattgacgagttcatttatgatggctgtgggggcactgtatccttatgtgaggaatttgataagaaaggacaggtatactctgggattataatcataattggttgtggcaaaagacttcgattcaaaaatgtcaaaattgagaatggtgcactgcttagaagatgtgtatacttgaacatgggaagcagttactcaatttcttctgaagatgatgtagaggtttctgtgttagaaagttctttcacgaatgatgaagactgtttaaaccttgaagaacataaaaagagaaatctgcagaatgccattgatggtcccacaaaccaaatactgaactttacatttgaggctcaggttgtatctccagaatttacattctatgacagttcaaagttatcaatggatgattcgttgcacattgagaagcttcttcgggccaagatggatttcagtttcatgtatgcttcaaaagaaaaagatatatgggctcgatctgtcattaaagaccttacaattgaagctggttctggtcttcttgttcttgaacctgtagatgtttcatggaaatatacttcagtcaatgaaaagacaaacatagtgttggtgtcgacagatgtttgcatccatctttctctgagtgttgcttctcttatgcttaaactgcaaaaccaaactcttgcagcattgcagtttggtaatattagcccactaatttcttgcacaaactttaagcgaatttggagctcaccaaaaggtgacctacctggttacaacctaacgttctggcggccacaagctccctccaattatgtcatattgggtgattgtgtgtcctcaaggtctgtgccaccttctcaggttgtggttgctataagtaatacttatggtcgtgtacgaaaacctcttggatttaggctaattcatgtattacctggttctctggatctcattgattcctgtcaatcaactgaagaaaacgaatgttctatctggattcctgtaccaccacctggatatttagctctaggatgtgtggtaaatattggaaggttaccaccttcaaaccatgtagtgtattgccttcgttctgatcttgcgacttctgcgacattttcagattgtatacacactctctcacctgctgctggaataatctctgaatttagcatctggcgtgtggacaatgtgattgcttcattctgtgcacataattctatagagcaacccactaaaacagaagctcttaatttgcaccatgttctcctccggaatccaaattgctatattgttaaagatctaagtgcagattcatctatccagaatgaccaatcttctgatcaattaaatcaccgcaagagtctttctggatgggatgtacttcgcactttgtcaagaccaagtaactattgtatgtctactccccattttgaaaggatatggtgggataaaggaaacgataccaagaagccattttctatatggagaccgttacctcgttttggttttgcttcggttggtgactgtataactgaagggtttgaaccacccactcttggcattcttttcaagtgtgacacagttgtttctgagaagcctgtacagtttactaaagtgacacaaattgacagaaaaggccttgaggaaatattcttctggtatccagtgccacctcccggttacgcttctcttggatgtatcgtaacaaaaacagatgaaatgccaagcaaggattccatttgctgccctaaactgagtctagtgagccaagcgaatatgtcagaggatcctatctccatgtcttctagctcaaaaggtccttgctgctggagcatctggaaagttgaaaatcagggctgtactttcctggccagaccagatgtcaagaagccctcagctcaactggcataccgtattgctgaccatgcgaagccgaaggcacgtgaaaacattactgctgagctgaagctgggttgtttgtcggttggcattcttgacagctcttgtggaatggtcacaccactttttgacacaacaatcgctaatataaatcttgcaacacatggaagatttgagacattgaatgctgtattgatctgttcaattgctgcatccacattcaatagacacttggaggcatgggaaccctttgttgagccatttgatggaatattcaagtttgaaacatatgataccagtgaacaccctccttccaaagttggtaagaggattcgtgttgctgcaacaagtcctctaaatgctaacctgagctctgcaaatcttgagctgcttatagaaacgttagtttcatggagaagacagattgatcttgaaaataaatcgtcaacaaaaagcgagggtaccattgaaaacatgaaaaaagctgatgattcttcgtactctgcattgaatgaagatgatttccagagagtggtttttgagaataaattaggatgtgatgtttatcttaaaaaaaaaatggaagatagtgaaatcactattgagcttttacagcatgagagcaaagtttcgttgttgcttccgcctcccaggttttcagataaactaaatgtgttatccaattcaacagaatcaagatactatgttgttgtacagatctttgagtctaagggcttgcctatcatagatgacggcaatggtcacagctacttctgtgctttacgcttacttattggaagccatgcttctgatcagcacaaagtgttcccacagagtgccaggacgagatgtgtaaaacctgtggaaactactgagttactgacccactgtgccaagtggaatgaacattttatatttgaagttccagaacaggcatcagctaatttagagattgaagtaacaaatcttgcatcaaaagctgggaaaggtgaagtaattggttctctgtctatgcctattggacgaggagcaaccatgttgaaacgagctccttctatgaggatgattcagcatgtttctgatgtcaaacgggtgctaacatgtcctcttacaaagaagggtcagatacctaattttgaggacaggaaaaaaggtggtgttttagtactctcaagctgttatgtggaacgttctactcattcatatttccagaggttgaaagacagtataaacaatgtggagagcgacttctgtataggacttagcccagatggtccatgggaaagttttactgcagctttgccagtgaccgtccttccaaaatcgcttaataataaccgttttgcatttgaggtcactatgaggaatggaaagaaacatgcaaccttgagaggtcttgcagttattgccaatgatgctgacataaaacttgaagtgtctatatgtcctgtaaacatgcttgataactctatgttaaatactagattggcaagctccaccagtgttattgatgaagtatttgaaaatcagtggtaccgaccaattgcagggtggggacataacccttcaattggtcacagaaaagacttaaagcagtggagcacaaaggactgctcatactcatctaaggcattttttgagcctggccttccatctggttggaggtggacctcaccgtggaaaattgaaaggttgaattttgtagataatgatggatgggcatatgctgcagattttcaaaacttgaattggccatcatcatcctggagatcttctaaatcaccacacgacttcgtgagaagaaggcgttgggtacgttctagacagcagtcgcaagaacaaagtgcagaaattcctagaaaagtacttgctactgtcagtcctcattcatctactgcgttgccttggacatcgatgattagggatatggatttatgcttgcaagttcgcccatattctgaaaaatcagaggaatcatatagctggagccagatttgttcactaggttctgagagtatacctaaacagcagcactcttcactttctaggcaaagcaccgtaaagcagtcagtggtatcatcaaggaattctgttcttaagcttgctgaactcgagaaaaaagatgtgctctcatattgccatcctcctgttagcactgaaagatatttctggtttagtgttggaattgatgcttctgttgttcatacagatttgaatgtacctgtctatgactggagaatttctttcaattcaattcttagacttgaaaataaacttccctatgaagctgagtatgctatatgggagatttccactaaaagtaatatggttgaaaagcagcatggtattgtcccttcgggtggaagtgtatttatctattcagcagatatacggaaaccaatttatcttacattgtttctccaaaacggttggattctagaaaaggatgctgtattgataatggacttgttgtccttggaacatgtttcttcgttctggatggttcagaagcagagccagaggagactacgagttagtgttgagcatgacctaggtgctagtgatgctgcaccaaagacactgagattgtttgtcccttactggataaaaaaccactcgtcaattccattatgttatcgcatagtagaaggggaatccacagaaagcacagaagcagactcacttagcagaccagactcgctaagtagagtgtctaagtcttcaaaattttcccttaaatattcttcaaagtctcttgtcagaagaggaacaatgtcgcacagaaatatgcaagtactggaagatattgaagattgtagcacagactatgtgatgctatcaccacaagattacttgaaccgatctgctggtatgcgctctgagtcaagggataacaatttcagtccagctcgagttgcaatatctatggctgttggtggttgcacacagtacagcgtaggagtatcgctttttgagcttgagaacaaggagcatgttgatatcaaaacatttgcttctgatgggtcatattactggttctcagttcaattgaagatggcttcagataggacaaaggtggtaaatttactgccgagagcacttcttatcaatagaattggaagaactatttttctatctgaatatcatgatgagactgaagagcccttacaaccatatgaacctccaaaagtatttcaatggcgatcagaatttggaagtgaacttttaaagttgaggttggagggataccaatggagtacaccttttagtatcaatgctaatggagttatgtgtgtgctcatgaacagcacaacaggaaatgatcaggcttttgtcagggtaaatgtgagaagtggaacaaaaagttcacggcatgaagttgtatttcagcttgattgctggtccagcccatacagggtggagaatcgctccatgttcttgcctatacggtttcggcagtttggtggtgatgatcattcatggcgtaatctgcttccgaattcatcagcttccttctttttggaggacctgagcagaaggcatctattggaagttttggttgatggaactgaccctatgaactccatgacatatgacatcaatgtcgtaatggatcatcagccccttactaattcagatgcccttaagaaggccttacgtgtcactgtcttgaaggaggggaaattgaatgttattcaaattattgattggctgccagataatagaaatcgaggacagataactgaaaggatgttatcaccaatctttcagccatcagaggtcgactatgggcagtcatctcctgatctggatagtgaatttcatgttactttggaactaacggagcttggcatttctgtaattgaccatatgcctgaggaagttctttacctctcagtgcagcaactgttacttgcatactcatctggaattggctctggagtaaatcggctcaaaatgcggatgcattggattcaagttgataatcaattaccatttgttcctatgcctgtacttttctgtcctcaaaagattgaaaatcagtcagactatattttcaagttctctatgacagttcagaccaacaattctcttgatttttgtgtctatccttatgtcggtgtccaggttcctgagaattgtgtgttctttgttaacatccatgaaccaatcatttggcgcctccatgagatgattcaacacctaaaattcgataggatatatagcaatcaaccttcagctgtttcagtggaccccatactgaaaattgggcttctgaacatctccgagatccgatttagagtgtcaatggcaatgtccccaagccaaaggccaaggggagtatttgggttctggtcgtcgttgatgactgcattgggaaacatggagcatatgccggtccgtatagctcaaagataccgggaggaattgtgcatgcggcaaagtgcacttatgaactctgctatatctaacattcaaaaggatcttcttagccaacctcttcagctactttccggtgttgatattcttggtaatgcgagtagcgctctgagtaacatgagcaaggggatagctgcattgtctatggacaagaaattcattcagggccggatgagacaggatagcaaaggtgtggaagactttggggatgtcataagagatggaggtggtgctcttgcaaaaggcatcttcagaggtgtcacaggcatattgacaaagcccatcgagggtgcaaaatcttctggtgttgaaggttttgtgcaaggagttggaaagggtataattggcgcagctgcacaaccagttagcggagttcttgatcttttatcaaaaactactgaaggtgccaatgcggtaaaaatgaaaatatcatcagcgataatggctgaggagcagttgctgcgtaggcgtcttcctcgagctattggtgggaatagtttgctctatccttatgacggacacaaagctactggccaggctatcttgcatctagctgaatgtgctacattccttggtcaaattgatatttttaaaatccgaggaaagtttgcttctaccgatgcttatgaggatcattttttacttcctaaggggaagatttttttaatcactcacagaagagtactattgcttcagttaccaatgatgacccagcgtaagttcaatcctacgaaggatccttgttcagtaatatgggatgtattatgggatgatttggtaacagtggagatgacccatgggaaaaaagatcctccagattcctggccttctaagcttattttatacttgaaagctaaaccttcaaattcgaaggaaattgttcgtttggtcaagtgtaatcgaggttcagatcaagcatctatcatttactcggcaattgacaaagcttataaagcttacggtccaaactcgttgaaggaattcttgagatggaaggtaccaaggccatatgcccctcgcaatagtagtggccgaagtatccaagacttatcatttggttaaaaggtcaacacaaatgcacactttagtgttaaacacagtagaatcttaggatgaaggtattttaggttgacacttttggttaccaggcaaatgatatattctacatatacactataggtatcagaggatagatctctatgatcataccttgctcattaaaagcatttactattcttgtgatggggagatccatgtccgagttttggccaaaccactacagatctggtttccttcggcatatacaatcacattcaatatggattttttgacggaccggttcttcgcgaagagtttatcacttcactactacaccgtgtctcttatagatgtatttatgatcggtttcaggattatgtcatgcagtttattaattgtttttcatttttagaaaactaaactagtgtctcagggttgtacatggcttaagtccctttgaatataataatagtatgcgacaatgcaaagttggtaagatgggagttcaattcatttggtgatgcaaccactactgttagacgcactaacgacatctggtcacccatcggtgatgatccctctaatgtcgctattttcacccttggggtctagacatgaaggctagggtgattgaaaatctatttttg

SEQ ID NO: 203639 - DNA, 13469 bp, Zea Mays
atgctggtgctgtatctgctacgcaaatatttgggtgaatatgttgaagggctttctgttgaagctctcagaataagtgtatggaaaggtgacgttgttctaaaagacttaaaacttaaggctgaagccctgaattctctcgggtttccagtgacagtgaaagctgggtttgttggcaccataacattaaaggtcccatggaagtgccttggtaaagaaccagttattgtcctcattgatcgtctatttgttcttgctcatcctgctcctgatggacagactctcaaggaagaagatagacaaaaactttttgaagccaagcttcagcagattgaggctgcggaggcagctactcttgaagcaacaaataggaactcaagaggagggcctgcaccaggtggaaattcatggttatacaatttaatatctacaattattggtaatcttaaagtcaccatcagtaatgtacacataagatatgaagattctgtcagcaattctgggcacccatttgcgtctggtttcacgttatcaaaacttgcagccgttacagtggatgaggatggtaatgaaacatttgatgcaggtgtagccctagataagctacgaaagtctgttgaactgcataggctgggcatctaccatgactcagacagtaatccttggaagcttaataaaaattgggaagctctaaatcgtaccgaatggagtgagatatttcaagatggcattgaagatggctctcaaagttccatctgggcagtaaatcggaactacttggtctcgcctataaatggaacccttaaatataaacgacttgggaagaatgaaagaggggatccagataccccattggagaaagcctcacttgtcctcagtgatgtttctttaactgtaactgaggcacagtattatgatggcattaaactgttggaagcattttcgaggtttagaacacgtgttgatgtgtctcatttacggcctgttgtgcctgtaaaggaggatcgtcgtgcttggtggcgttatgctgtgctggctggtctgcgacaaaggaaactatgctattggttttcatgggagagaactagacgcctctgccagcttcgacgccgttatgttcaattgtatgccacccttttgcaacaagcagcaaaagttgacatttctgaaattcgagagatagagaaaattctagacatgaaggtcataatactttggaggttgctgggtcatgctaaggttgaaacagtgaaatcaaaggggacactatatagaaaaggggcctcaaagaaaagatggtggccttttgcatggaacacgactggtttaccttctgaggaagctacacacccagaatcacagttagatgaagaggaacaactgactaaagaagagtggcaggctattaataagctgttgagttaccaaccagatgaagatatgtcttttccccttgagaaggtttccccaaatgtgattcaatttatgatggatgtatccattggccaggctggtgcaaggatcatcaatattgatggaactgaggttttatgtggtagatttcatcagcttcaggttgtcactaagttgtatccgaagagcacatgttgtgatgtgacattgaaatattgtggtctatcatctccagaaggttctcttgctcagagtgtcgttagcgagggaaagagtcatgctcttgatgttagttttgtacgagcaccaattggtatggaccttgattggcagctcattgcgaagatatcaccatgccatgttacggttctgaaggagagttatgaacgatttatggagttcattaagcgaagcaacgctgttagtccaacagtaactatggaaacagcaactgctctacagctgaagctggagaaggtcacacgtagggctcaggagcagcttcagctggtgttagaagaacaaagcagatttggacttgatattgatctggatgcaccaaaagttaggattcctttgaatgctaatcaacctttgctgggcaatgagtactttgttcttgattttggccattttacattgcatacaagagatggtaagcatgatgaagaaagacagagtctgtattcaggcttttatattactgggagggatatggctgctttccttatttgtgatttagctcagaacatatactcaatacctgaaaatttagatcaagataccctcctaggtcatacctttgatgataatcagttctgttctcttcttgatcgctgtggaatgtcagtgataattgagcagatcaaagttccacatccgaattatccatcaactcgtgttgcttttcaagtacccaatctggacattcacttttcaccaaaaaggtactgcaagatagttgaactgcttggtgtgcttctccatatgaagggaaacaataatgaatattcaaataaccatgaaagtggtagcttggcgccttggtatcctgctgatctagctggcgatgctagaacattggtttggaggggcattggttattcgcaagctgaatggcatacttgctatgttgtattatctgggatgtatctatatattttggagtcagaattctccgcgaattaccaaaggtgttgtagcatggctagtcgccaagtatttgaagtgccaccaactagtgttggtggatctccttacagtattggtgtgtgttctagaggtggagacacgcataaggcactagaactgaccagcacactggtaattgaatttcgtaatgaaatcgagaaggctatgtggatgaaagcacttgtccaggcaacataccgagcttctgctcctcctgacgtgaacatattaggagatcctgttagccctcccccagaatcaagtacaccacggcttaatagcttgggattagtggatcttgttgtgaatggctctgttattgaaactaaactttcactgtatgggaagctggacagaaagagcagtgattcgcaagagcttctaatgctagagctccttgggaatggagggaaggttaatgttgttcaatcttctcgtggtcttagtgtgaaaacaaaattgcattcattgaaaataatggatgagctacaaggtcgtctttcaatgacttcaaagtatttagtgtgctctgtcatcaatgaaagtgttggagctacctcttccgatacacttgataagggcggcgacctaagcatctttcctgtggatgaggatcctttcatggatgcattaacagattttactccagatcaaaattctaatccagatgactgtcaaattcccaacttcatttctgatgcaaatgagtacaatgaaataggttcaaaagatggttcatgctttgatggggatgaacagaacgcaaaacctactgaaatattttatgaggcacaagatagtaatgtggcagattttgttgttctgacattcttgagcaggagtcctgattcttgtctttatgatggtatagattcacagatgagtattcgtatgtccgcactggaattctactgtaacagacccacacttgttgctctaattgagtttggatttgatcttagcacggttaattctgtgccgaaatgtagtcttgatgtggcacctgcaattgaaactgtgaaacccacagggaaggaagaaggtgctcctactattgtaaaaggattgttaggttatgggaaacgtcgaacaattttcaacatcaaaatggatgtggatagggtatcaatgtttctcaataaggaagatggttctcagcttgcaatgtttgtgcaagagaaatttctgtttgatttgaaggttcatccaagttctttttcaattgatggtatgctggggaatatgagattttgtgacatgtcccttggtccagaacatcgttggggttggctttgcgatatacggaagcctggtgtcgagtcactcataaagttcacattccagtcgtacagtatcgatgatgaagattttgaaggtcataattacagcttgactggtcagctttctgctgttcgtattgtctttctctaccgttttatccaagagtttacttcttactttatggagcttggcacccctcatactgaagaggcaattaagtttattgataaagttggaggttttgagtggttaattcagaaatatgaaatggatggagcttctgctataaagctggatctttcccttgagacacccataatcattgttcctaagaattctcagagcgaagattatatacagtttgatcttggtcaattgaaagtaaggaatgagtttagttggcatggaggtaaagagactgacccttctgctgtaaggcttgatgttctccatgcagaaataaatggaatcaacatggcggttggggtaaatggaactctgggaaagtgtatgattcgtgatggtcgcggcatcaatatagaggtgcgacgtagcctacgggatgtcttcaaaaaggtcccgatactgtctatgaaatttcagataggattgcttcatggtgtcatgtcagataaagaatacaatgtcgcgataagctgtatttcgacaaatctgtccgatacacctaaccttcccccaagttttcgtgaaaatatgaacaggacaaaggagtcaattcgtttacttgcagataaagtcaaccttagcaaccatttgttgctttcacgtaccgttgttgtcatgaccgtggaaattcagtatgcgttgcttgaacttcgcaatggcccagatgcagagtcacctctggcagagcttgctgtggaaggtctatgggtatcctatagaacaacttcaatgcttgaaatggatctatatttgtcaatattgaaattttcaatacatgatatccgtccagatacgaagtctgagatgcgtctgatgcttggatcttgttcagagactgctaatctgtgcgttgatgactcttcaactgatgcaggggtttcgaacctcacaatgctgatactggattatcgttcgcgttcttcttttcaatcatttgttataagaatacagcagcctcgtatacttgttgtcctggattttctgcttcctgttgttgagtattttgtgccttctttaggctcgataactggcagagaggaaagcttagacccgaagaatgatcctcttatgagggctgatgatattatacttactgagcatgttttcttgcaaaaagaggattttattcaactatctcctgtaaggcagctaatagttgatggttgtgatattgacgagttcatttatgatggctgtgggggcactgtatccttatgtgaggaatttgataagaaaggacaggtatactctgggattataatcataattggttgtggcaaaagacttcgattcaaaaatgtcaaaattgagaatggtgcactgcttagaagatgtgtatacttgaacatgggaagcagttactcaatttcttctgaagatgatgtagaggtttctgtgttagaaagttctttcacgaatgatgaagactgtttaaaccttgaagaacataaaaagagaaatctgcagaatgccattgatggtcccacaaaccaaatactgaactttacatttgaggctcaggttgtatctccagaatttacattctatgacagttcaaagttatcaatggatgattcgttgcacattgagaagcttcttcgggccaagatggatttcagtttcatgtatgcttcaaaagaaaaagatatatgggctcgatctgtcattaaagaccttacaattgaagctggttctggtcttcttgttcttgaacctgtagatgtttcatggaaatatacttcagtcaatgaaaagacaaacatagtgttggtgtcgacagatgtttgcatccatctttctctgagtgttgcttctcttatgcttaaactgcaaaaccaaactcttgcagcattgcagtttggtaatattagcccactaatttcttgcacaaactttaagcgaatttggagctcaccaaaaggtgacctacctggttacaacctaacgttctggcggccacaagctccctccaattatgtcatattgggtgattgtgtgtcctcaaggtctgtgccaccttctcaggttgtggttgctataagtaatacttatggtcgtgtacgaaaacctcttggatttaggctaattcatgtattacctggttctctggatctcattgattcctgtcaatcaactgaagaaaacgaatgttctatctggattcctgtaccaccacctggatatttagctctaggatgtgtggtaaatattggaaggttaccaccttcaaaccatgtagtgtattgccttcgttctgatcttgcgacttctgcgacattttcagattgtatacacactctctcacctgctgctggaataatctctgaatttagcatctggcgtgtggacaatgtgattgcttcattctgtgcacataattctatagagcaacccactaaaacagaagctcttaatttgcaccatgttctcctccggaatccaaattgctatattgttaaagatctaagtgcagattcatctatccagaatgaccaatcttctgatcaattaaatcaccgcaagagtctttctggatgggatgtacttcgcactttgtcaagaccaagtaactattgtatgtctactccccattttgaaaggatatggtgggataaaggaaacgataccaagaagccattttctatatggagaccgttacctcgttttggttttgcttcggttggtgactgtataactgaagggtttgaaccacccactcttggcattcttttcaagtgtgacacagttgtttctgagaagcctgtacagtttactaaagtgacacaaattgacagaaaaggccttgaggaaatattcttctggtatccagtgccacctcccggttacgcttctcttggatgtatcgtaacaaaaacagatgaaatgccaagcaaggattccatttgctgccctaaactgagtctagtgagccaagcgaatatgtcagaggatcctatctccatgtcttctagctcaaaaggtccttgctgctggagcatctggaaagttgaaaatcagggctgtactttcctggccagaccagatgtcaagaagccctcagctcaactggcataccgtattgctgaccatgcgaagccgaaggcacgtgaaaacattactgctgagctgaagctgggttgtttgtcggttggcattcttgacagctcttgtggaatggtcacaccactttttgacacaacaatcgctaatataaatcttgcaacacatggaagatttgagacattgaatgctgtattgatctgttcaattgctgcatccacattcaatagacacttggaggcatgggaaccctttgttgagccatttgatggaatattcaagtttgaaacatatgataccagtgaacaccctccttccaaagttggtaagaggattcgtgttgctgcaacaagtcctctaaatgctaacctgagctctgcaaatcttgagctgcttatagaaacgttagtttcatggagaagacagattgatcttgaaaataaatcgtcaacaaaaagcgagggtaccattgaaaacatgaaaaaagctgatgattcttcgtactctgcattgaatgaagatgatttccagagagtggtttttgagaataaattaggatgtgatgtttatcttaaaaaaaaaatggaagatagtgaaatcactattgagcttttacagcatgagagcaaagtttcgttgttgcttccgcctcccaggttttcagataaactaaatgtgttatccaattcaacagaatcaagatactatgttgttgtacagatctttgagtctaagggcttgcctatcatagatgacggcaatggtcacagctacttctgtgctttacgcttacttattggaagccatgcttctgatcagcacaaagtgttcccacagagtgccaggacgagatgtgtaaaacctgtggaaactactgagttactgacccactgtgccaagtggaatgaacattttatatttgaagttccagaacaggcatcagctaatttagagattgaagtaacaaatcttgcatcaaaagctgggaaaggtgaagtaattggttctctgtctatgcctattggacgaggagcaaccatgttgaaacgagctccttctatgaggatgattcagcatgtttctgatgtcaaacgggtgctaacatgtcctcttacaaagaagggtcagatacctaattttgaggacaggaaaaaaggtggtgttttagtactctcaagctgttatgtggaacgttctactcattcatatttccagaggttgaaagacagtataaacaatgtggagagcgacttctgtataggacttagcccagatggtccatgggaaagttttactgcagctttgccagtgaccgtccttccaaaatcgcttaataataaccgttttgcatttgaggtcactatgaggaatggaaagaaacatgcaaccttgagaggtcttgcagttattgccaatgatgctgacataaaacttgaagtgtctatatgtcctgtaaacatgcttgataactctatgttaaatactagattggcaagctccaccagtgttattgatgaagtatttgaaaatcagtggtaccgaccaattgcagggtggggacataacccttcaattggtcacagaaaagacttaaagcagtggagcacaaaggactgctcatactcatctaaggcattttttgagcctggccttccatctggttggaggtggacctcaccgtggaaaattgaaaggttgaattttgtagataatgatggatgggcatatgctgcagattttcaaaacttgaattggccatcatcatcctggagatcttctaaatcaccacacgacttcgtgagaagaaggcgttgggtacgttctagacagcagtcgcaagaacaaagtgcagaaattcctagaaaagtacttgctactgtcagtcctcattcatctactgcgttgccttggacatcgatgattagggatatggatttatgcttgcaagttcgcccatattctgaaaaatcagaggaatcatatagctggagccagatttgttcactaggttctgagagtatacctaaacagcagcactcttcactttctaggcaaagcaccgtaaagcagtcagtggtatcatcaaggaattctgttcttaagcttgctgaactcgagaaaaaagatgtgctctcatattgccatcctcctgttagcactgaaagatatttctggtttagtgttggaattgatgcttctgttgttcatacagatttgaatgtacctgtctatgactggagaatttctttcaattcaattcttagacttgaaaataaacttccctatgaagctgagtatgctatatgggagatttccactaaaagtaatatggttgaaaagcagcatggtattgtcccttcgggtggaagtgtatttatctattcagcagatatacggaaaccaatttatcttacattgtttctccaaaacggttggattctagaaaaggatgctgtattgataatggacttgttgtccttggaacatgtttcttcgttctggatggttcagaagcagagccagaggagactacgagttagtgttgagcatgacctaggtgctagtgatgctgcaccaaagacactgagattgtttgtcccttactggataaaaaaccactcgtcaattccattatgttatcgcatagtagaaggggaatccacagaaagcacagaagcagactcacttagcagaccagactcgctaagtagagtgtctaagtcttcaaaattttcccttaaatattcttcaaagtctcttgtcagaagaggaacaatgtcgcacagaaatatgcaagtactggaagatattgaagattgtagcacagactatgtgatgctatcaccacaagattacttgaaccgatctgctggtatgcgctctgagtcaagggataacaatttcagtccagctcgagttgcaatatctatggctgttggtggttgcacacagtacagcgtaggagtatcgctttttgagcttgagaacaaggagcatgttgatatcaaaacatttgcttctgatgggtcatattactggttctcagttcaattgaagatggcttcagataggacaaaggtggtaaatttactgccgagagcacttcttatcaatagaattggaagaactatttttctatctgaatatcatgatgagactgaagagcccttacaaccatatgaacctccaaaagtatttcaatggcgatcagaatttggaagtgaacttttaaagttgaggttggagggataccaatggagtacaccttttagtatcaatgctaatggagttatgtgtgtgctcatgaacagcacaacaggaaatgatcaggcttttgtcagggtaaatgtgagaagtggaacaaaaagttcacggcatgaagttgtatttcagcttgattgctggtccagcccatacagggtggagaatcgctccatgttcttgcctatacggtttcggcagtttggtggtgatgatcattcatggcgtaatctgcttccgaattcatcagcttccttctttttggaggacctgagcagaaggcatctattggaagttttggttgatggaactgaccctatgaactccatgacatatgacatcaatgtcgtaatggatcatcagccccttactaattcagatgcccttaagaaggccttacgtgtcactgtcttgaaggaggggaaattgaatgttattcaaattattgattggctgccagataatagaaatcgaggacagataactgaaaggatgttatcaccaatctttcagccatcagaggtcgactatgggcagtcatctcctgatctggatagtgaatttcatgttactttggaactaacggagcttggcatttctgtaattgaccatatgcctgaggaagttctttacctctcagtgcagcaactgttacttgcatactcatctggaattggctctggagtaaatcggctcaaaatgcggatgcattggattcaagttgataatcaattaccatttgttcctatgcctgtacttttctgtcctcaaaagattgaaaatcagtcagactatattttcaagttctctatgacagttcagaccaacaattctcttgatttttgtgtctatccttatgtcggtgtccaggttcctgagaattgtgtgttctttgttaacatccatgaaccaatcatttggcgcctccatgagatgattcaacacctaaaattcgataggatatatagcaatcaaccttcagctgtttcagtggaccccatactgaaaattgggcttctgaacatctccgagatccgatttagagtgtcaatggcaatgtccccaagccaaaggccaaggggagtatttgggttctggtcgtcgttgatgactgcattgggaaacatggagcatatgccggtccgtatagctcaaagataccgggaggaattgtgcatgcggcaaagtgcacttatgaactctgctatatctaacattcaaaaggatcttcttagccaacctcttcagctactttccggtgttgatattcttggtaatgcgagtagcgctctgagtaacatgagcaaggggatagctgcattgtctatggacaagaaattcattcagggccggatgagacaggatagcaaaggtgtggaagactttggggatgtcataagagatggaggtggtgctcttgcaaaaggcatcttcagaggtgtcacaggcatattgacaaagcccatcgagggtgcaaaatcttctggtgttgaaggttttgtgcaaggagttggaaagggtataattggcgcagctgcacaaccagttagcggagttcttgatcttttatcaaaaactactgaaggtgccaatgcggtaaaaatgaaaatatcatcagcgataatggctgaggagcagttgctgcgtaggcgtcttcctcgagctattggtgggaatagtttgctctatccttatgacggacacaaagctactggccaggctatcttgcatctagctgaatgtgctacattccttggtcaaattgatatttttaaaatccgaggaaagtttgcttctaccgatgcttatgaggatcattttttacttcctaaggggaagatttttttaatcactcacagaagagtactattgcttcagttaccaatgatgacccagcgtaagttcaatcctacgaaggatccttgttcagtaatatgggatgtattatgggatgatttggtaacagtggagatgacccatgggaaaaaagatcctccagattcctggccttctaagcttattttatacttgaaagctaaaccttcaaattcgaaggaaattgttcgtttggtcaagtgtaatcgaggttcagatcaagcatctatcatttactcggcaattgacaaagcttataaagcttacggtccaaactcgttgaaggaattcttgagatggaaggtaccaaggccatatgcccctcgcaatagtagtggccgaagtatccaagacttatcatttggttaaaaggtcaacacaaatgcacactttagtgttaaacacagtagaatcttaggatgaaggtattttaggttgacacttttggttaccaggcaaatgatatattctacatatacactataggtatcagaggataggtactttgccttcatgtaaatagatatattttaggaggcgccggtattcatgtaaatgtgaacatctctgttataaagaaaaaaaataataatgcaaattatgcaagattcattgctgctgtcttgttgcaatgtttaatgtgttctcttgcgattgtctaaagacccaaaccgttaacgtgtctttactactatggtttcatttcacagatctctatgatcataccttgctcattaaaagcatttactattcttgtgatggggagatccatgtccgagttttggccaaaccactacagatctggtttccttcggcatatacaatcacattcaatatggattttttgacggaccggttcttcgcgaagagtttatcacttcactactacaccgtgtctcttatagatgtatttatgatcggtttcaggattatgtcatgcagtttattaattgtttttcatttttagaaaactaaactagtgtctcagggttgtacatggcttaagtccctttgaatataataatagtatgcgacaatgcaaagttggtaagatgggagttcaattcatttggtgatgcaaccactactgttagacgcactaacgacatctggtcacccatcggtgatgatccctctaatgtcgctattttcacccttggggtctagacatgaaggctagggtgattgaaaatctatttttg

SEQ ID NO: 203640 - DNA, 1317 bp, Zea Mays
ggtgagtctcttgcttcgcctagttgctctgcttcgtctacttctcagcatcccccgaaaaactcgaccgcaagcgtgtgtacgcacggaccgcccgcccacgcacgggcatggcagcctccgcctccgcctccccctcatcctccacaaaccctaggtagcacgggagtccctcgccgccggatccccgagaccctgcaagccgcgccgattctgtgctgtgtgctccacggctagatttctgggtgtgaaagagcgcgtttttttaacagttcttagctagggagattttgggaagggagagtgctggaataatggagccgaggatcgggaacaagttccggcttgggcgcaagatcgggagcggctctttcggggagatctacctcggcaccaatatccagacgaacgaggaggttgcgattaagctggaaaatgtgaagacaaagcatcctcagttgctctacgaatcaaagatttataggattctgcaaggaggaactggaataccgaatgtcagatggtttggtgtagaaggagactacaatgtcttggttatggatttacttggaccaagccttgaggatctatttaatttctgcagcaggaaattatctctgaagaccgtgcttatgctcgcagatcagatggcacacaaatcatcatcaatcattatatataatgttttgtacttttgtggtggttcccacatcgagccctctccctcctgagcatctctgcttctctggttgaattattctgtgtgtatacattatccttttcccatctatcacagatgagcttcatgtaatctgccctccccacttgtagataaatcgagtagaatttgttcattccaagtcttttctgcatcgagatattaagccagataatttcctcatgggtcttggcagacgagctaatcaggtctacgttattgactttggccttgctaaaaaatacagggatacctcaacgcatcagcacatcccatacaggcatagaaaagaataatctaatcattcctgagttgtatatgctttgtgttcattcctgtagtaagcatgtttagtgttctaattagctcaagttacttcccatttatctcttgtaccttttctagggccaagctggaaattctaagcatgtctaactttttgttagcacaagttctatctggctactactataatataatgcttagtaattacaatacccacttttcagtcctcacatgatcgtggagggaagaaaaataaattcaataactaaaaatatgctacttgtagtaatttgatagttgtatattatggtaga

SEQ ID NO: 203641 - DNA, 684 bp, Zea Mays
gtgagtctcttgcttcgcctagttgctctgcttcgtctacttctcagcatcccccgaaaaactcgaccgcaagcgtgtgtacgcacggaccgcccgcccacgcacgggcatggcagcctccgcctccgcctccccctcatcctccacaaaccctaggtagcacgggagtccctcgccgccggatccccgagaccctgcaagccgcgccgattctgtgctgtgtgctccacggctagatttctgggtgtgaaagagcgcgtttttttaacagttcttagctagggagattttgggaagggagagtgctggaataatggagccgaggatcgggaacaagttccggcttgggcgcaagatcgggagcggctctttcggggagatctacctcggcaccaatatccagacgaacgaggaggttgcgattaagctggaaaatgtgaagacaaagcatcctcagttgctctacgaatcaaagatttataggattctgcaaggaggaactggaataccgaatgtcagatggtttggtgtagaaggagactacaatgtcttggttatggatttacttggaccaagccttgaggatctatttaatttctgcagcaggaaattatctctgaagaccgtgcttatgctcgcagatcagatgatgagcttcatgtaatctgccctccccacttgtag

SEQ ID NO: 203642 - DNA, 4478 bp, Zea Mays
  misc_feature (4477)..(4478): n is a, c, g, or t
caggaactatttcaaggctccaatccgtgaaaaccgaacaggcctttagctggtttataacggcctatgcggaatgtaacagctcgttaataaaagagaagcgaggaagagaaactgatcgtgcacgaagctcatgcttcagaagagaatcgaggaaagagaaattgatcgacgcacgatgtaccaagctcgtgctttagaaagagtagagagtagagaaaggtgtagagatttgccggtttggtggcggtacgcacgagcaggcgcccggcggcgtacgaaattagctcgggggcgtacaggtcgctctcgtctggctcggggctgggtccgctgccgtggtggccgtccaccgggcgagccgtcgaggtacccaatttctgccatggcgatccgcccggaccaatgctcgattctccatctgaccatcgtcggtaagcctcctgccccactaccgccctccaaagcggcgcgcgcgccaccgccatctccacccacgcccaccttgctgccgcggccgccccgtaccgctaccgcgccctcgatctgaccccacggggcaggatggacaaagggaaatcggtggtggccgagctggtggcgtcgttcagcgatgtccgtgtcacgccgcgccagccgccagaaccccaagccaagagcttcctaccgtcgccctccttctagtttggacactgcttggacttggagtggcatttcaagccagctaagggtccagatccaccatccatggctgtgcttccaacgcgtcaggatcccttattaaatatcccggcagcgccttctccactccctgctggccgtcttgagcatgagcatgatggacctactccttttctttttccagccaggagaatcaacaacttggcccttgcaagcacggtgcttccaaaacgtgtgccgctccatttattacagaaaataacaaatgatttctctaaggaccgtgaacttggttccggtgcatacggaaaagtttacaagggagtgcataaaaatggcgaaacgatggctgtcaagttgcttcactccatggctggacttgatgataaactttttgaggaggagtttcacaacattgcaagactccaacacaagaatattgtgcgtcttgttggcttttgccatgaaactcaacgccaattcataccgcacgatggaaaaatgatttttgctgatagcaaatatatggccctttgcttcgaatatatgcataatggaagccttgacaagttcattattgatgaaaatagtgtccatgactggtccacacgctatgcaataatcaaggggatctgtgagggcttgaaataccttcacgaggaattgaatcctcctatttatcatttggatttaaaaccagctaatattttgttggatgacaatatgatgccaaagcttgcagattttggcttgtcaaagatttttgaacaggaacgaacacgaatcacacaaagttgtgtaggaacacatggatatctaccaccagaatatatagacaggaaagtaatctcaaataagcttgacatattcagtctgggtgtcatcatcataaagattataagtggacctacaggttacacccagtgtgctgaaatgccttccaaacaatttgttgagcttgtacatgaaaaatggaggaataagttacaaacaacaatggatgcagctgcattggagacatattgtgaacaagtagtgagatgcattgaaatggctttaagttgtgtggagaccgatcggcacaaaaggccgagtataggggctattattgatgagctaaataagatggagacaaataccgaccaggtattttcagtggatatatgctcgactccagcacaaacacaaccaccaccccttcctgattctagccacagcacagaagaaacaagcaacacaaagggagttagcagactgggaccgagagagtacgtacagagcacaatgcgggacctggtaattgggataaccaagtcggtggtggagggggtgatcagcaaggcccagtcggtgatggaggaagaaaatatgctacttattagcatgcagcatgacctccacttcatcaccgatgagtttcagatgatctattcattccttagcatcactgatgaggagcgtatcaacaacgcggtagtgaggatctgggtgatgcagacgcgtggtctggcctatgacctggaagactacatggatgccttctcctgcctggacaagaccagaaaatggtggtcccgcttgttccgagcatgcctggcaccaccggggtctccatacatgtcagtgacatctctggccgtggaactcaagcatctaaaggcaagggtcgaggacgttagccacaggaacactcggtataacctcatcagcgacgccggctcaaagcccggcctcgtgaggcaacagccggtgcctcctggtgctgtggcatacgaaaacgacacaagaaggaaacacatcttaggggatctcacccagcttatcaccaacaaggacgatgctgatcttcaattgatttcaatgtggggtgcaggtggaggcaccgggacgacatccatcataaggaagtgctacagtgatccagagatcatccaaaatttcatatgccgagcctgggtcaacctcagccatccattcaacccccatgagtttgtgcggtctttgatggctcacttttatgcaaacagttgccaagaaagacaaggagggatcatcggtgttgatgtcctaactagcatggatgcgactgccacccagggggatctcctcagcgagttcgttcagctagttgacaagaacaggtaccttgttgtcttggaagacctgcccaccatggcagagtgggactctatcaggacgttccttcccgacagaaagaatggcagctggatcatcgtgtcctcgcagaaatatgaaattgcaagtttatgtgtcggacatccctaccaaatattggacctgaagcagtcctcgcccactgagcactccgtatgtgccttcttgagagaggaggtcacattaaaagaaaaaaaaggaggcaatagaaaagaaaaaatttatgtcggagatgaaagcgaggtgaacaacggtagtacatcaaccaacagcaaggtgatatcaactgagtatgacttaagccataaccataggatggtcgccaactctaaatggaaagaagccagagactggatgcagaattcttcccttgtcggacgcagattgcagatgtatcaaattcatcgctgtatagctgaagcacaaaggaaccattcccatgttatgtctgtttggggaatagttggcgttgggaaatcagctattgtcagaaatttttactgcgacaggatacttgagaatcagcaatttcaagaatacggttgggtggatttatcacactcccaacccttcaatttgaaggacttctcacagaacttgcttacgaattttcaatcagattctcttcaagccaatgaaactacaccctctcgtggtatactggggacagtccgaaaatgttgtgagtttctaagtacacgtcattgcctcgtggtcatagatggccttcagtccaaagaggaatgggatttgatacaatcatcattggtatctagatactctaaatctaatactattatcattgtgataacaactgaagcaagcattgcagcatactgcgcagataaggatgaccttgtgtttaatgtcaaaactttagaaactgatgcagcctttgatctcttcgaaaatgagatatctaagaaggctccgttgtggaccacttcattatgtgatcgaggaaattcagtgacgcaagaacttgtttcaaagtgcggggggctcccaatggtaatagtggctatagctggcatattggctaccaaggtagtctcctggatggacactgcaacatccatcaatttgaggtttatgtttgagctagagatcaatccagacctgcaggatctgtttagctgggtgcattcctgcttccgtacttgtccagatttcatcaagccatgtatcttctacctatcattttttccaagagaccacaacattcgacgaaggcgtctagtaaggcgttggatcgctgagggttactgcagggacagtgatgataaatctgcagaggagaatggggagttcttcttctccaaactcctcggtatgagcataatccaaccggagtccagtgacgcgaggatggtctcgtgtcaaatcaatggatttttccgtgagtgcatcctctcacggtcaggggaaatggaagaccttgtcattgaactggccgacagatgcaacctaaccacccaacgcagtgggcgtcatcttgtcatatcggaaagctgggacagagataagattttattcgagagcatcgacttctcacggctacggtcaatgacagtgtttggaatgtggaaatcattcttcatctccaaaagtatgaagcttnn

SEQ ID NO: 203643 - DNA, 1395 bp, Zea Mays
aaagcgaaaaatgcccgcccgcacctgcgtgcgtgtgctgtgtgggcatgggcagcgtcaccaaagcgaggctcctctcgtcccaagcgccggttaactccgtctcagcgcacgcggcacgcccctaatcttcattcccccgaaaccctagccggtccttggccttgtcccggtcgcgccgctcccgtcgcctcttccgcggaagccgtcctctgcgcgtcggcggcggtggagatggcctcctcgtcggcatcttcgaggcaccaggtcaccatcaccctcggccgcagcggtcaggttgttaaaaggaggactatatctgatgatattaacggcgatgaaatgccattgtcggggaaaaaacgatctgtgagggataggttaggaagtaatgtgtctgattctgatttttatggaagccagcagaggaacaaaaggcaacagacagaaattaatagctcacatggagatgatggttcaggtgatgaaaaaccttaatttcttgtcaattcactagggcttgaattgaagatatctggcactacttactctgttgcattggcgtgcaaaatatttgaagatcgcttggttggcaaggatgatctgagactgaaactcatgaggaaaggctcgtttcagaggagcaatggtggtgcagaacagaatacaatggatctccgtgaaaagctttcccgaaatcataagaagttgccaagatatgattctagaggccatgctgcagaatcaagggctagttatgatatgagagatgagccaccagagttaaggtccagatatttttcaagggaggatgtcctagggtcaaggaactcttctgttgtaagtcgagttccttattcaagaactgcggatgacttgttaaaatcgaacccttcaagaaaatcttacccctcatggacagacgatggtttgaggcacagatcacctgaaaggattttaagtgttcgtagtgatgtgtctccaccagtaggttatgatcagattaggtccatgccaccacttagatctgccggttcctcaagacctcaaagttttattacaagaggtgctcctgatacgccaaggagtcaaccatatgctggcaaagccaccatttctgttgatacagtacagagaactaatgggatcactccatctagtgcacctttgcctaaggtccctgttatggctgaagccccgcttacagttactggattgttgaattcgttgggtcttgagaagtatattgttctctttcaggctgaggaggtggatatggctgcattgaggcaaatgggggagagtgacctcaaagacatgggggtacctatgggacggagccggagccagaaaaaagtttaggaaggactgaactaaattgctatagtataaaag

SEQ ID NO: 203644 - DNA, 3165 bp, Zea Mays
aaagcgaaaaatgcccgcccgcacctgcgtgcgtgtgctgtgtgggcatgggcagcgtcaccaaagcgaggctcctctcgtcccaagcgccggttaactccgtctcagcgcacgcggcacgcccctaatcttcattcccccgaaaccctagccggtccttggccttgtcccggtcgcgccgctcccgtcgcctcttccgcggaagccgtcctctgcgcgtcggcggcggtggagatggcctcctcgtcggcatcttcgaggcaccaggtcaccatcaccctcggccgcagcggtcaggttgttaaaaggaggactatatctgatgatattaacggcgatgaaatgccattgtcggggaaaaaacgatctgtgagggataggttaggaagtaatgtgtctgattctgatttttatggaagccagcagaggaacaaaaggcaacagacagaaattaatagctcacatggagatgatggttcaggtgatgaaaaaccttaatttcttgtcaattcactagggcttgaattgaagatatctggcactacttactctgttgcattggcgtgcaaaatatttgaagatcgcttggttggcaaggatgatctgagactgaaactcatgaggaaaggctcgtttcagaggagcaatggtggtgcagaacagaatacaatggatctccgtgaaaagctttcccgaaatcataagaagttgccaagatatgattctagaggccatgctgcagaatcaagggctagttatgatatgagagatgagccaccagagttaaggtccagatatttttcaagggaggatgtcctagggtcaaggaactcttctgttgtaagtcgagttccttattcaagaactgcggatgacttgttaaaatcgaacccttcaagaaaatcttacccctcatggacagacgatggtttgaggcacagatcacctgaaaggattttaagtgttcgtagtgatgtgtctccaccagtaggttatgatcagattaggtccatgccaccacttagatctgccggttcctcaagacctcaaagttttattacaagaggtgctcctgatacgccaaggagtcaaccatatgctggcaaagccaccatttctgttgatacagtacagagaactaatgggatcactccatctagtgcacctttgcctaaggtccctgttatggtttgtatctgtacctcctctcatataccctaattcatcgatgcttctgagaaaacatagggcattttggagcaaaattccttttcttttgtgcacaacattttcaaattctttctaaaatcacgtctgactgtttttaatgctgttggggctatgaaattggcatacagtcaacaacaataacaaagccttttagtaccaatcaagttgggttagtctagagttgaaacccccacaagtcaaggatcagacacgtggatagctgttttccatgtcaatttcagccttcccctgcttctttccacatgtccaaaccatctcaatcggtgttgaacaagcttttcttcaattggtgctacccctagcctatcatgtatatcattgttttgaattcgttctcttcttgtatggcttcaaatccaatgtaactacgcatttccacaatactttatttgttgaacatttttttgtggacaaacattttgcaccatgcaacatagtaggtctagtcgccatcttataaaacttgcattttagcttctacaagaccctcttgtcacctagaacgctagatgctcaccactttattcactccgctttgattctatggctaacatcttcatcaatatctacgcctctctgtatcattgattttaaacactgaaaagtattcattcttgggcactacttgacctaactagcatctccttcctcatgtgtagtagtgtcgaagtcacatcttatatatttagttttagttctattgagtctaagaggttgtttggcatcgctctagagcaaaactccgaaggggagctggccagagctagccaaacaatgtaactccaaacttgcaaacttcatagagttttgagagctacaatacaaacttttagagtacctcttttgctgctctaaaatccttaaaaaacaacttagatatggagtttgaaggtatttacccgccactaccactagttatgagaaagcaatctagactttggagcagaactgctccatccagagttttggagcagagatgctctagagtggagcggagtcatgccaaacaccccctaactctagggtcttttgctgcaactccaatttcctatttgctcttgcttactttcatcaactagcattacatgattacatcgtccgcaaaaagcatacaccaagagacatcctcttgtatgtcacttgtgacctcatccatcaccaaggcaaaaaggtaaggctcaatgatgacccttgatgtagtcctattctaatcggaaagtcattcatgtctacatgacttgtcccatcattgttgtacatgttcttaatgagtctaattcgtgagaactttatgtttgtccaaagtcgatcacataacattccttggtattttgtcataagctttctccaagttaatgaaaaccatgtgtagattctttttttggtccatgtaatgctccattacttgtcttattaagaaaatggcttacatggttgacctttcgtgcatgaaaccaatttggttcatagagatcctcattatttctctcagatggtactcgataactctctcccattgcttcatgtaatcttttaacatttgttaagtttgctcattgttatctaagaatctaggttccacatctgaattataataacttctgcagtcttagaattttattagttatatatggttatgaattcctataccggtgttcatagaatcatacttgaagtttaataacattgctctatgcaactttgcaggctgaagccccgcttacagttactggattgttgaattcgttgggtcttgagaagtatattgttctctttcaggctgaggaggtggatatggctgcattgaggcaaatgggggagagtgacctcaaagacatgggggtacctatgggacggagccggagccagaaaaaagtttaggaaggactgaactaaattgctatagtataaaag

SEQ ID NO: 203645 - DNA, 3352 bp, Zea Mays
ctcgagctctcgcactcctccgtcgtcctccaaaccctaggccagaccagagctgaagtcgagcggaagtccaagcaaaaaaccttgtccttgcgggtgtcaagtctgtaaccttacatgatgatggcaaagtcgagctatgggacttgtcaagcaatttcttcctctcagagaaggatattgggcaaaaccgtgctcatgcttgtgttccaaagctacaggagcttaacaatgctgtcatcatctctaccgtaactggtgatttgaccaaggaacaactttctaactttcaggctgtggtctttactgatatcagcatagaaaaagcagttgagtatgatgaatactgtcatagccaccagccgccaattgctttcattaagtccgaagtttgtggcctttttggcagtgttttctgtgactttggtcctgagttcactgttttggatgtcgatggcgaggaaccacatacaggaattgtggcatcaatcagcaacgacaatccagcacttgtttcttgtgtggatgatgaacgtctggagttccaggatggtgatctagttgttttctccgaagtgcatggaatgaccgaactcaatgatggaaaaccaagaaagattaagaatgcaaggccttattcttttactctagaagaagacaccacctcatatggcacttactttagaggtggtattgtcacacaggtgaagccaccaaaggttcttaaattcaaaaccttgaaggatgcaatcaaggagccaggagaatttctcatgagtgatttctccaagtttgaccggccacctcttctacatttggccttccaagctttggacaaatttaggtctgagttggcacgatttcctattgctgggtcagatgatgatgcacagaagctgatagaccttgctattagtattaacgaaactcttggtgatagtaagcttgaagaaattgacaagaagctcctgcagcatttcgccagtggttccagggctgttttgaatcctatggctgcaatgtttggcggtattgtaggccaggaggttgttaaagcatgctcagggaaattccatccactttaccagttcttctactttgattctgtcgaatctctgccagttgaaccgttggagcctagtgatttgaagccagagaacagtagacatgatgcacaaattagtgtctttggggctcagcttcaaaagaaactggagcagtcaaaaatcttcatggttggttctggggctcttggatgtgaatttttgaagaaccttgcgttaatgggtatttcttgcagtcaaaatgggaagctgactgtgacagatgatgatgttatagagaaaagcaatctcagtcgccagtttctcttccgtgactggaacattggacagcccaagtccacagttgctgcaactgccgctatggcaattaatcccgagcttcatgtggaggcccttcagaatagagcaagtcctgagactgaaaatgtgtttaatgatgccttttgggagagcttggatgctgttgttaatgcattggacaatgtcactgcaagaatgtacattgactctagatgtgtatatttccagaagccacttcttgaatcaggtactctgggtgccaagtgcaacacacagatggtcattcctcacttaacagaaaactatggggcatccagagatccaccagaaaagcaggcacctatgtgcactgtacattcatttcctcacaatattgatcactgcctgacatgggccagatctgagtttgagggtctacttgagaagactcccactgaagtaaatgcttttctgtcgaaccctggtggatatgcaaccacagcaagaactgctggtgatgcacaggctagagaccaacttgagcgagttattgaatgccttgagacagacaagtgtgagacattccaagattgtattacctgggcccggttgaagtttgaggattatttctccaaccgtgtaaagcagctgacattcacttttcctgaagacgcaatgactagctctggtgctcctttctggtctgctcctaagcggttcccgcgaccactggagttctcatcttctgactcaagtcaccttaacttcttgttggctgcttctatattaagggcagagacatttggaatacccatacctggttgggcgaaaaacccaaagaaactagctgaagctgtggacaaggtcattgttccggatttccatccaaaagagggtgttaagatagagacagatgagaaggctactagcctatcctctgcgtctgttgatgatgctgccgtcattgaagagcttattgcaaagctgcaagcaatttctaaaacattgtcaccaggattccgtatgaaccctatacagtttgagaaggatgatgataccaatttccatatggacttgattgctggttttgctaacatgcgggccaggaactacagcatccctgaagttgacaagttgaaggcgaagttcatagcgggaagaatcatcccggccatcgccacctcaactgcgatggccaccggccttgtctgcctggagctttacaaggtccttgctggtgggcacaaggttgaagactaccggaacacatttgcgaacctcgcaatccccctcttctccatggcggagcctgtgccgcccaagaccatgaagcaccaagacatgtcctggaccgtgtgggaccggtggaccgtaactggcaacatgacgctgagggagctcctggagtggctgaaggagaaggggttgaacgcgtacagcatatcctgcgggacctcgctgctgtacaactccatgttcccgagacacaaggagcggctggacaagaaggtggtggatgtggccagggaggtggccaaggtggaggtgccttcctaccgccgccatctggacgttgtggtggcctgtgaggatgacgatgacaatgacgtcgacatcccgcttgtgtctatttacttccggtaaagaggagggtgtcgctacctgtttacatggaacctgtctgtgcgatgtttatcagaaggatcgagtctataagttgcgcatgcaaccgagaactaggctgtgttcaatgtaaacacatactgatgagtctataagttggctgggaatcgtcgccgagatttgggttcaccgttatggaattcttggagcatataaaacatcgtgatagttattgcatgtcaatgtcactgctagatgttgttgtcctcatgcatgtatcggtgtgactcttattgtgcttgggtgcatttgcttcaatgcatgtgacgtgctctctttagatttcggaaactacagaaatgttagggcctcaacctttcatggtg

SEQ ID NO: 203646 - DNA, 3769 bp, Zea Mays
gttgagctttattatacttttagcagaagctgtgccctccgtctccctctcgagctctcgcactcctccgtcgtcctccaaaccctaggccagaccagagctgaagtcgagcggaagtccaaggcaccgccgcgaccccccatcctccgcacgacctggatctgacgcgcctccccctgccgccgtccgcctcacacctcctcgcggcggccgccgtgctcgggctcctaggcggcctcctactctacatgcttccccggaagcggggggtcgacgccggcgaggtccaggatttgcacaacaaggccccccgcgccgccccagcccaggacaaggacagggaggaggttgcggagatggccggcagggcgcccgagatcgatgaggacctccatagccgccagctcgccgtctatgggcgcgagaccatgaagcgcctcttcggctccaatgtcctcgtctctggactccagggactaggcgctgagatcgcaaaaaaccttgtccttgcgggtgtcaagtctgtaaccttacatgatgatggcaaagtcgagctatgggacttgtcaagcaatttcttcctctcagagaaggatattgggcaaaaccgtgctcatgcttgtgttccaaagctacaggagcttaacaatgctgtcatcatctctaccgtaactggtgatttgaccaaggaacaactttctaactttcaggctgtggtctttactgatatcagcatagaaaaagcagttgagtatgatgaatactgtcatagccaccagccgccaattgctttcattaagtccgaagtttgtggcctttttggcagtgttttctgtgactttggtcctgagttcactgttttggatgtcgatggcgaggaaccacatacaggaattgtggcatcaatcagcaacgacaatccagcacttgtttcttgtgtggatgatgaacgtctggagttccaggatggtgatctagttgttttctccgaagtgcatggaatgaccgaactcaatgatggaaaaccaagaaagattaagaatgcaaggccttattcttttactctagaagaagacaccacctcatatggcacttactttagaggtggtattgtcacacaggtgaagccaccaaaggttcttaaattcaaaaccttgaaggatgcaatcaaggagccaggagaatttctcatgagtgatttctccaagtttgaccggccacctcttctacatttggccttccaagctttggacaaatttaggtctgagttggcacgatttcctattgctgggtcagatgatgatgcacagaagctgatagaccttgctattagtattaacgaaactcttggtgatagtaagcttgaagaaattgacaagaagctcctgcagcatttcgccagtggttccagggctgttttgaatcctatggctgcaatgtttggcggtattgtaggccaggaggttgttaaagcatgctcagggaaattccatccactttaccagttcttctactttgattctgtcgaatctctgccagttgaaccgttggagcctagtgatttgaagccagagaacagtagacatgatgcacaaattagtgtctttggggctcagcttcaaaagaaactggagcagtcaaaaatcttcatggttggttctggggctcttggatgtgaatttttgaagaaccttgcgttaatgggtatttcttgcagtcaaaatgggaagctgactgtgacagatgatgatgttatagagaaaagcaatctcagtcgccagtttctcttccgtgactggaacattggacagcccaagtccacagttgctgcaactgccgctatggcaattaatcccgagcttcatgtggaggcccttcagaatagagcaagtcctgagactgaaaatgtgtttaatgatgccttttgggagagcttggatgctgttgttaatgcattggacaatgtcactgcaagaatgtacattgactctagatgtgtatatttccagaagccacttcttgaatcaggtactctgggtgccaagtgcaacacacagatggtcattcctcacttaacagaaaactatggggcatccagagatccaccagaaaagcaggcacctatgtgcactgtacattcatttcctcacaatattgatcactgcctgacatgggccagatctgagtttgagggtctacttgagaagactcccactgaagtaaatgcttttctgtcgaaccctggtggatatgcaaccacagcaagaactgctggtgatgcacaggctagagaccaacttgagcgagttattgaatgccttgagacagacaagtgtgagacattccaagattgtattacctgggcccggttgaagtttgaggattatttctccaaccgtgtaaagcagctgacattcacttttcctgaagacgcaatgactagctctggtgctcctttctggtctgctcctaagcggttcccgcgaccactggagttctcatcttctgactcaagtcaccttaacttcttgttggctgcttctatattaagggcagagacatttggaatacccatacctggttgggcgaaaaacccaaagaaactagctgaagctgtggacaaggtcattgttccggatttccatccaaaagagggtgttaagatagagacagatgagaaggctactagcctatcctctgcgtctgttgatgatgctgccgtcattgaagagcttattgcaaagctgcaagcaatttctaaaacattgtcaccaggattccgtatgaaccctatacagtttgagaaggatgatgataccaatttccatatggacttgattgctggttttgctaacatgcgggccaggaactacagcatccctgaagttgacaagttgaaggcgaagttcatagcgggaagaatcatcccggccatcgccacctcaactgcgatggccaccggccttgtctgcctggagctttacaaggtccttgctggtgggcacaaggttgaagactaccggaacacatttgcgaacctcgcaatccccctcttctccatggcggagcctgtgccgcccaagaccatgaagcaccaagacatgtcctggaccgtgtgggaccggtggaccgtaactggcaacatgacgctgagggagctcctggagtggctgaaggagaaggggttgaacgcgtacagcatatcctgcgggacctcgctgctgtacaactccatgttcccgagacacaaggagcggctggacaagaaggtggtggatgtggccagggaggtggccaaggtggaggtgccttcctaccgccgccatctggacgttgtggtggcctgtgaggatgacgatgacaatgacgtcgacatcccgcttgtgtctatttacttccggtaaagaggagggtgtcgctacctgtttacatggaacctgtctgtgcgatgtttatcagaaggatcgagtctataagttgcgcatgcaaccgagaactaggctgtgttcaatgtaaacacatactgatgagtctataagttggctgggaatcgtcgccgagatttgggttcaccgttatggaattcttggagcatataaaacatcgtgatagttattgcatgtcaatgtcactgctagatgttgttgtcctcatgcatgtatcggtgtgactcttattgtgcttgggtgcatttgcttcaatgcatgtgacgtgctctctttagatttcggaaactacagaaatgttagggcctcaacctttcatggtg

SEQ ID NO: 203647 - DNA, 2042 bp, Zea Mays
ccaagctcgtgacacatttaaatggacagtgggtgaaacacaacctcgtgatgatggcttgtcgaaatccaaggatagggacaaagatagagaaaaggacaaggacagagatcgtcgccgagaccgtgacagagatcgagggagagacagggaccgtgatagggatagggacagggacagggatcgggacagagacaaggatcgccaaagtaggcatcaccgtgaaagacgggaacagcgagaccgtcctgatgatcacagagtccgtgattctgaaagaagaagagaacgcgacaaagatgggcatcgtaggcatcgttctcggtctcgttcaaggggtagagatcgaagatctaggtcacgttcaagaagcaagcgagttagtggattcgacgccccacccccgcaagcaatgggttcaacatttccagttattccaaccccaaaaggcaaccatgtatggtaacaaggccaatcttgggtcacttgcctcacttctaccagtggaatgagctgcctactatagctttaatgtacaaggaagaatcagtgcgccggtttgatatcgtcatgttcatcttcaactagctagtactaggtcagttaccaggctcttcgcttcccaacattggtggcatgtttccaaacatgctccctttcggtgttgctgggcagttcaatccccttgtcatccagccacaagcaatgactcaacaggctactcgtcatgctcggcgtgtttatgtcggtggccttcctccatctgctaacgaacagacagtggcaatttactttaatcaagtcatggctgctattgggggaaacactgctggtccaggtgatgctgttctcaatgtatacataaatcatgacaagaaatttgcttttgtggagatgagatctgttgaggaagcaagcaatgcaatggccctggatggcattatgttcgaaggggcaccggtgaaggttagaaggccaacagactacaacccttcccttgcagccgccctgggcccaagccagccaagccccaatctgaatcttgctgcagttggcctaacagcaggatctaatggaggactagaaggtccagaccgtatttttgtgggtggcctcccgtattacttcactgaagcgcaagttcgggagttgcttgaatcattcggtcctcttcgagggtttgatcttgtgaaggatagggaaactggtaactcaaaaggctatgcattctgtgtttaccaggacctcaccgtcactgacatcgcttgtgctgcactaaatggtatcaagatgggtgacaaaacccttactgtcagacgagcaaaccagggggcatctcagcccagaccagagcaggaaagtatcctattgcaggcacaacaacaggtgcagttgcagaaacttgtgtatcaagttggagcgcttcctacaaaggttgtatgcctcacacaggtggtaactgcagatgaattgaaagatgatgaagagtatgaggacattatggaagacatgaggctagaagcaggcaaatatggtaatttggtgaaagttatcatcccacgccctgaccccagcggacagccagttgtaggagttgggaaggtgttcctggaatatgcagatatcgatggtgctgccaaagcaaagacagcgctgcatggaaggaaatttggtgggaacccagtggtcgctgtctgctatgcggaggacaagtttgccaatggggaatatgatggatgaaaatcttatccctcttgaactatagcagtagccggtctttgtctttggctctatgctacctgcttgtttaattgcaacaaagatgaacggtctctcatttaagctgaacctctacctgtattgatatccctggattttttctgagccaccacctgttgtgatttgtgaacgttgtaagaataggtttctttgcttgggttcgcttgttgctgtcgaaaatatgtaacgaatgttattaataaagaatttcttgtatgactttactaccgtgtgtttgatttggtttgagttttttttactga

SEQ ID NO: 203648 - DNA, 1933 bp, Zea Mays
gccgattaccataaagacttggcccatcacgtttacgggccgctaggaggaaaagaggccgacatccctgctagcctctcgttgtagtaaggagaagaaaaaaaaacaagaataataaaaagccgggccccggccgaagaaacttgcgagcaacccggcgaaagccccccaaaccctcgcaccctaaaacagcggcgcacaagatgtccgacgaccccaccaacggcggcggcggtgatcgcgtggaggacgtcgtccgcgccgagcaagcgagttagtggattcgacgccccacccccgcaagcaatgggttcaacatttccagttattccaaccccaagcaaccatgtatggtaacaaggccaatcttgggtcacttgcctcacttctaccagtggaatgagctgcctactatagctttaatgtacaaggaagaatcagtgcgccggtttgatatcgtcatgttcatcttcaactagctagtactaggtcagttaccaggctcttcgcttcccaacattggtggcatgtttccaaacatgctccctttcggtgttgctgggcagttcaatccccttgtcatccagccacaagcaatgactcaacaggctactcgtcatgctcggcgtgtttatgtcggtggccttcctccatctgctaacgaacagacagtggcaatttactttaatcaagtcatggctgctattgggggaaacactgctggtccaggtgatgctgttctcaatgtatacataaatcatgacaagaaatttgcttttgtggagatgagatctgttgaggaagcaagcaatgcaatggccctggatggcattatgttcgaaggggcaccggtgaaggttagaaggccaacagactacaacccttcccttgcagccgccctgggcccaagccagccaagccccaatctgaatcttgctgcagttggcctaacagcaggatctaatggaggactagaaggtccagaccgtatttttgtgggtggcctcccgtattacttcactgaagcgcaagttcgggagttgcttgaatcattcggtcctcttcgagggtttgatcttgtgaaggatagggaaactggtaactcaaaaggctatgcattctgtgtttaccaggacctcaccgtcactgacatcgcttgtgctgcactaaatggtatcaagatgggtgacaaaacccttactgtcagacgagcaaaccagggggcatctcagcccagaccagagcaggaaagtatcctattgcaggcacaacaacaggtgcagttgcagaaacttgtgtatcaagttggagcgcttcctacaaaggttgtatgcctcacacaggtggtaactgcagatgaattgaaagatgatgaagagtatgaggacattatggaagacatgaggctagaagcaggcaaatatggtaatttggtgaaagttatcatcccacgccctgaccccagcggacagccagttgtaggagttgggaaggtgttcctggaatatgcagatatcgatggtgctgccaaagcaaagacagcgctgcatggaaggaaatttggtgggaacccagtggtcgctgtctgctatgcggaggacaagtttgccaatggggaatatgatggatgaaaatcttatccctcttgaactatagcagtagccggtctttgtctttggctctatgctacctgcttgtttaattgcaacaaagatgaacggtctctcatttaagctgaacctctacctgtattgatatccctggattttttctgagccaccacctgttgtgatttgtgaacgttgtaagaataggtttctttgcttgggttcgcttgttgctgtcgaaaatatgtaacgaatgttattaataaagaatttcttgtatgactttactaccgtgtgtttgatttggtttgagttttttttactga

SEQ ID NO: 203649 - DNA, 2172 bp, Zea Mays
gccgattaccataaagacttggcccatcacgtttacgggccgctaggaggaaaagaggccgacatccctgctagcctctcgttgtagtaaggagaagaaaaaaaaacaagaataataaaaagccgggccccggccgaagaaacttgcgagcaacccggcgaaagccccccaaaccctcgcaccctaaaacagcggcgcacaagatgtccgacgaccccaccaacggcggcggcggtgatcgcgtggaggacgtcgtccgcgccgagggtgaaacacaacctcgtgatgatggcttgtcgaaatccaaggatagggacaaagatagagaaaaggacaaggacagagatcgtcgccgagaccgtgacagagatcgagggagagacagggaccgtgatagggatagggacagggacagggatcgggacagagacaaggatcgccaaagtaggcatcaccgtgaaagacgggaacagcgagaccgtcctgatgatcacagagtccgtgattctgaaagaagaagagaacgcgacaaagatgggcatcgtaggcatcgttctcggtctcgttcaaggggtagagatcgaagatctaggtcacgttcaagaagcaagcgagttagtggattcgacgccccacccccgcaagcaatgggttcaacatttccagttattccaaccccaagcaaccatgtatggtaacaaggccaatcttgggtcacttgcctcacttctaccagtggaatgagctgcctactatagctttaatgtacaaggaagaatcagtgcgccggtttgatatcgtcatgttcatcttcaactagctagtactaggtcagttaccaggctcttcgcttcccaacattggtggcatgtttccaaacatgctccctttcggtgttgctgggcagttcaatccccttgtcatccagccacaagcaatgactcaacaggctactcgtcatgctcggcgtgtttatgtcggtggccttcctccatctgctaacgaacagacagtggcaatttactttaatcaagtcatggctgctattgggggaaacactgctggtccaggtgatgctgttctcaatgtatacataaatcatgacaagaaatttgcttttgtggagatgagatctgttgaggaagcaagcaatgcaatggccctggatggcattatgttcgaaggggcaccggtgaaggttagaaggccaacagactacaacccttcccttgcagccgccctgggcccaagccagccaagccccaatctgaatcttgctgcagttggcctaacagcaggatctaatggaggactagaaggtccagaccgtatttttgtgggtggcctcccgtattacttcactgaagcgcaagacctcaccgtcactgacatcgcttgtgctgcactaaatggtatcaagatgggtgacaaaacccttactgtcagacgagcaaaccagggggcatctcagcccagaccagagcaggaaagtatcctattgcaggcacaacaacaggtgcagttgcagaaacttgtgtatcaagttggagcgcttcctacaaaggttgtatgcctcacacaggtggtaactgcagatgaattgaaagatgatgaagagtatgaggacattatggaagacatgaggctagaagcaggcaaatatggtaatttggtgaaagttatcatcccacgccctgaccccagcggacagccagttgtaggagttgggaaggtgttcctggaatatgcagatatcgatggtgctgccaaagcaaagacagcgctgcatggaaggaaatttggtgggaacccagtggtcgctgtctgctatgcggaggacaagtttgccaatggggaatatgatggatgaaaatcttatccctcttgaactatagcagtagccggtctttgtctttggctctatgctacctgcttgtttaattgcaacaaagatgaacggtctctcatttaagctgaacctctacctgtattgatatccctggattttttctgagccaccacctgttgtgatttgtgaacgttgtaagaataggtttctttgcttgggttcgcttgttgctgtcgaaaatatgtaacgaatgttattaataaagaatttcttgtatgactttactaccgtgtgtttgatttggtttgagttttttttactga

SEQ ID NO: 203650 - DNA, 2277 bp, Zea Mays
gccgattaccataaagacttggcccatcacgtttacgggccgctaggaggaaaagaggccgacatccctgctagcctctcgttgtagtaaggagaagaaaaaaaaacaagaataataaaaagccgggccccggccgaagaaacttgcgagcaacccggcgaaagccccccaaaccctcgcaccctaaaacagcggcgcacaagatgtccgacgaccccaccaacggcggcggcggtgatcgcgtggaggacgtcgtccgcgccgagggtgaaacacaacctcgtgatgatggcttgtcgaaatccaaggatagggacaaagatagagaaaaggacaaggacagagatcgtcgccgagaccgtgacagagatcgagggagagacagggaccgtgatagggatagggacagggacagggatcgggacagagacaaggatcgccaaagtaggcatcaccgtgaaagacgggaacagcgagaccgtcctgatgatcacagagtccgtgattctgaaagaagaagagaacgcgacaaagatgggcatcgtaggcatcgttctcggtctcgttcaaggggtagagatcgaagatctaggtcacgttcaagaagcaagcgagttagtggattcgacgccccacccccgcaagcaatgggttcaacatttccagttattccaaccccaaaaggcaaccatgtatggtaacaaggccaatcttgggtcacttgcctcacttctaccagtggaatgagctgcctactatagctttaatgtacaaggaagaatcagtgcgccggtttgatatcgtcatgttcatcttcaactagctagtactaggtcagttaccaggctcttcgcttcccaacattggtggcatgtttccaaacatgctccctttcggtgttgctgggcagttcaatccccttgtcatccagccacaagcaatgactcaacaggctactcgtcatgctcggcgtgtttatgtcggtggccttcctccatctgctaacgaacagacagtggcaatttactttaatcaagtcatggctgctattgggggaaacactgctggtccaggtgatgctgttctcaatgtatacataaatcatgacaagaaatttgcttttgtggagatgagatctgttgaggaagcaagcaatgcaatggccctggatggcattatgttcgaaggggcaccggtgaaggttagaaggccaacagactacaacccttcccttgcagccgccctgggcccaagccagccaagccccaatctgaatcttgctgcagttggcctaacagcaggatctaatggaggactagaaggtccagaccgtatttttgtgggtggcctcccgtattacttcactgaagcgcaagttcgggagttgcttgaatcattcggtcctcttcgagggtttgatcttgtgaaggatagggaaactggtaactcaaaaggctatgcattctgtgtttaccaggacctcaccgtcactgacatcgcttgtgctgcactaaatggtatcaagatgggtgacaaaacccttactgtcagacgagcaaaccagggggcatctcagcccagaccagagcaggaaagtatcctattgcaggcacaacaacaggtgcagttgcagaaacttgtgtatcaagttggagcgcttcctacaaaggttgtatgcctcacacaggtggtaactgcagatgaattgaaagatgatgaagagtatgaggacattatggaagacatgaggctagaagcaggcaaatatggtaatttggtgaaagttatcatcccacgccctgaccccagcggacagccagttgtaggagttgggaaggtgttcctggaatatgcagatatcgatggtgctgccaaagcaaagacagcgctgcatggaaggaaatttggtgggaacccagtggtcgctgtctgctatgcggaggacaagtttgccaatggggaatatgatggatgaaaatcttatccctcttgaactatagcagtagccggtctttgtctttggctctatgctacctgcttgtttaattgcaacaaagatgaacggtctctcatttaagctgaacctctacctgtattgatatccctggattttttctgagccaccacctgttgtgatttgtgaacgttgtaagaataggtttctttgcttgggttcgcttgttgctgtcgaaaatatgtaacgaatgttattaataaagaatttcttgtatgactttactaccgtgtgtttgatttggtttgagttttttttactga

SEQ ID NO: 203651 - DNA, 2026 bp, Zea Mays
gccgattaccataaagacttggcccatcacgtttacgggccgctaggaggaaaagaggccgacatccctgctagcctctcgttgtagtaaggagaagaaaaaaaaacaagaataataaaaagccgggccccggccgaagaaacttgcgagcaacccggcgaaagccccccaaaccctcgcaccctaaaacagcggcgcacaagatgtccgacgaccccaccaacggcggcggcggtgatcgcgtggaggacgtcgtccgcgccgagaagaagagaacgcgacaaagatgggcatcgtaggcatcgttctcggtctcgttcaaggggtagagatcgaagatctaggtcacgttcaagaagcaagcgagttagtggattcgacgccccacccccgcaagcaatgggttcaacatttccagttattccaaccccaagcaaccatgtatggtaacaaggccaatcttgggtcacttgcctcacttctaccagtggaatgagctgcctactatagctttaatgtacaaggaagaatcagtgcgccggtttgatatcgtcatgttcatcttcaactagctagtactaggtcagttaccaggctcttcgcttcccaacattggtggcatgtttccaaacatgctccctttcggtgttgctgggcagttcaatccccttgtcatccagccacaagcaatgactcaacaggctactcgtcatgctcggcgtgtttatgtcggtggccttcctccatctgctaacgaacagacagtggcaatttactttaatcaagtcatggctgctattgggggaaacactgctggtccaggtgatgctgttctcaatgtatacataaatcatgacaagaaatttgcttttgtggagatgagatctgttgaggaagcaagcaatgcaatggccctggatggcattatgttcgaaggggcaccggtgaaggttagaaggccaacagactacaacccttcccttgcagccgccctgggcccaagccagccaagccccaatctgaatcttgctgcagttggcctaacagcaggatctaatggaggactagaaggtccagaccgtatttttgtgggtggcctcccgtattacttcactgaagcgcaagttcgggagttgcttgaatcattcggtcctcttcgagggtttgatcttgtgaaggatagggaaactggtaactcaaaaggctatgcattctgtgtttaccaggacctcaccgtcactgacatcgcttgtgctgcactaaatggtatcaagatgggtgacaaaacccttactgtcagacgagcaaaccagggggcatctcagcccagaccagagcaggaaagtatcctattgcaggcacaacaacaggtgcagttgcagaaacttgtgtatcaagttggagcgcttcctacaaaggttgtatgcctcacacaggtggtaactgcagatgaattgaaagatgatgaagagtatgaggacattatggaagacatgaggctagaagcaggcaaatatggtaatttggtgaaagttatcatcccacgccctgaccccagcggacagccagttgtaggagttgggaaggtgttcctggaatatgcagatatcgatggtgctgccaaagcaaagacagcgctgcatggaaggaaatttggtgggaacccagtggtcgctgtctgctatgcggaggacaagtttgccaatggggaatatgatggatgaaaatcttatccctcttgaactatagcagtagccggtctttgtctttggctctatgctacctgcttgtttaattgcaacaaagatgaacggtctctcatttaagctgaacctctacctgtattgatatccctggattttttctgagccaccacctgttgtgatttgtgaacgttgtaagaataggtttctttgcttgggttcgcttgttgctgtcgaaaatatgtaacgaatgttattaataaagaatttcttgtatgactttactaccgtgtgtttgatttggtttgagttttttttactga

SEQ ID NO: 203652 - DNA, 2273 bp, Zea Mays
atttctaggccgattaccataaagacttggcccatcacgtttacgggccgctaggaggaaaagaggccgacatccctgctagcctctcgttgtagtaaggagaagaaaaaaaaacaagaataataaaaagccgggccccggccgaagaaacttgcgagcaacccggcgaaagccccccaaaccctcgcaccctaaaacagcggcgcacaagatgtccgacgaccccaccaacggcggcggcggtgatcgcgtggaggacgtcgtccgcgccgagggtgaaacacaacctcgtgatgatggcttgtcgaaatccaaggatagggacaaagatagagaaaaggacaaggacagagatcgtcgccgagaccgtgacagagatcgagggagagacagggaccgtgatagggatagggacagggacagggatcgggacagagacaaggatcgccaaagtaggcatcaccgtgaaagacgggaacagcgagaccgtcctgatgatcacagagtccgtgattctgaaagaagaagagaacgcgacaaagatgggcatcgtaggcatcgttctcggtctcgttcaaggggtagagatcgaagatctaggtcacgttcaagaagcaagcgagttagtggattcgacgccccacccccgcaagcaatgggttcaacatttccagttattccaaccccaagcaaccatgtatggtaacaaggccaatcttgggtcacttgcctcacttctaccagtggaatgagctgcctactatagctttaatgtacaaggaagaatcagtgcgccggtttgatatcgtcatgttcatcttcaactagctagtactaggtcagttaccaggctcttcgcttcccaacattggtggcatgtttccaaacatgctccctttcggtgttgctgggcagttcaatccccttgtcatccagccacaagcaatgactcaacaggctactcgtcatgctcggcgtgtttatgtcggtggccttcctccatctgctaacgaacagacagtggcaatttactttaatcaagtcatggctgctattgggggaaacactgctggtccaggtgatgctgttctcaatgtatacataaatcatgacaagaaatttgcttttgtggagatgagatctgttgaggaagcaagcaatgcaatggccctggatggcattatgttcgaaggggcaccggtgaaggttagaaggccaacagactacaacccttcccttgcagccgccctgggcccaagccagccaagccccaatctgaatcttgctgcagttggcctaacagcaggatctaatggaggactagaaggtccagaccgtatttttgtgggtggcctcccgtattacttcactgaagcgcaagttcgggagttgcttgaatcattcggtcctcttcgagggtttgatcttgtgaaggatagggaaactggtaactcaaaaggctatgcattctgtgtttaccaggacctcaccgtcactgacatcgcttgtgctgcactaaatggtatcaagatgggtgacaaaacccttactgtcagacgagcaaaccagggggcatctcagcccagaccagagcaggaaagtatcctattgcaggcacaacaacaggtgcagttgcagaaacttgtgtatcaagttggagcgcttcctacaaaggttgtatgcctcacacaggtggtaactgcagatgaattgaaagatgatgaagagtatgaggacattatggaagacatgaggctagaagcaggtaatttggtgaaagttatcatcccacgccctgaccccagcggacagccagttgtaggagttgggaaggtgttcctggaatatgcagatatcgatggtgctgccaaagcaaagacagcgctgcatggaaggaaatttggtgggaacccagtggtcgctgtctgctatgcggaggacaagtttgccaatggggaatatgatggatgaaaatcttatccctcttgaactatagcagtagccggtctttgtctttggctctatgctacctgcttgtttaattgcaacaaagatgaacggtctctcatttaagctgaacctctacctgtattgatatccctggattttttctgagccaccacctgttgtgatttgtgaacgttgtaagaataggtttctttgcttgggttcgcttgttgctgtcgaaaatatgtaacgaatgttattaataaagaatttcttgtatgactttactaccgtgtgtttgatttggtttgagttttttttactga

SEQ ID NO: 203653 - DNA, 3076 bp, Zea Mays
ctcctgtagatctgcgtcaatttcctcctccactcgcgcgctttttcctccagtcgccgcggcaattaatcaccaccaacactactactagtagtatcgtatcgcctggtggagggtaggagctatctccctgcagaggtcaggaacggcctcgagaccctgaagcggaggaggctcgagagagtgcgtttgagtgctcagaacgaagctggcgacaatcctgctgtggctgcgagaagtggcggtgatgccttgcggagccccgctaactgtggagtcagattgcattccaacaacagtacaggtttacctggaaatgtccatgacaagagtccttttgcaaagcgcaaggtggagaagtttgatatgtccaaccttgagtggatagacaagattccagagtgccctgtgtattgtcccaccaaggaggaatttgaggatcccattgcatatatacagaagatttcacctgaggctgctaaatatggtatttgtaaaatcgtctctcctgtatgtgcgtctgttcctgccggtgttgtgctgatgaaggaacatcccaattttaagttcatgactagagttcagccccttcgactcgctgaatgggctgaggatgatacagtcactttcttcatgagtggaagaaagtacaccttccgggactatgagaaaatggcgaacaaagtgttctctaagaaatattccagctctagttgtctcccagctaggtatgtggaggaggagttctggcgtgaaattgcttttggcaaaatggatttcgtagaatatgcttgtgacgttgatgggagtgccttctcttcatctcctcatgatcaacttgggaaaagcaactggaacctcaagaatttttcatggctccccaattctgttctaagacttcttcagacgccaattccaggagtgacagatccaatgctttatattgggatgctcttcagcatgtttgcgtggcacgtggaagaccattacttgtacagcatcaattaccatcactgtggggcatttaaaacatggtatgggataccaggcgatgcggctcctgggtttgaaagggttgctagccagtacgtatataacaaggacattttgattggtgatggagaggatgcagcatttgatgtcctactagggaaaacaacaatgttccctccaaatgtcttgctagatcacaatgttcctgtctataaagctgtacaaagacctggagaatttgttattacttttcctcgttcttaccatgcaggcttcagtcatggcttcaattgtggagaggctgttaattttgctattggcgattggtttcctcttggttctctggctagcaagcgctatgcacttctgaacagaactccattgcttgcacatgaggagctactttgtcgttctgctgtgcttctatcccaaaagctgttgaactgtgatccaagatccttggacaagttggaacatccatattcccagaattgtgtgaaatcctgctttgtgcggttgatacgattccagcgacgtgctcgtggccttcttgctaaaatgggttctgaaatatgctataagccaaagacatttccaaaatctgtcctgtagcatttgtcggcgtgattgctatatcacacacgtgttgtgtagatgtaactttgatcctgtctgcctacatcatgaacaagaactgcggagctgcccttgtaagtccaatcgcgttgtctatgttagagaggacatactggagctagaggctctatcaagaaaatttgagcaggatgtcagctcgtataaggaaggaagttgcattagcccatgtaaggaggttgagatctctgatactactgatgaacaacttccaaatcttgggattactctggatttcgttaatagtaaagctggtagctcaggctttatgactgttgatggaggaaacagttcttctgcagtatcaattttgacatcttctgtgcatcatgaggcatataagcatacagaagcaagggcaataaatacatcaatgaccaaaggaacttacactatggatgagagttcatccggcatagatggtgcttgtaatgaacacggttcatgtaatgcttcagccatggaatgcagtgataattcggattcggagtgtgaaatcttccgagtcaagcgcaggtccacctcatttgacaaacctacttctgaagctaagacatcaaccttgtctgaacagcaggttctgaggcggctgaagaaggtacatcctgaagtacagcaagtcatcagtaagcgtcaagaagaatctggtaatggttcagttcgcgctgcccacatgagccagaaaagctcaaatcctgcccctgctgatgacgaaacagaggacatggctcccataatgtggagaataaagcggcgacagtcagaaacccaagatgctacatgtcctggtacgagaccgcagtcatatccgccttccagtggtggttctggagaagagtttgtggaaagaactagagatgctgcagtagaactccgtccaaaacgagtgaaaatccggctaccttctaatgccagtaggcagattgagcagcagcgcagttcagggcagagatttgctagggaggacaggttgccgcttggttttccacgtacattttagggaatcacagggcctccaatttgaggccactgggggcacgcttagaagatacacgtgataatattcttgttgctggaggttccgtgtcactgccgatagctctttgatgcctggctatcagtgacacagattaaagagaacctcgctaccttgatatgtccgctagtgtttagagcatgtagctagcttagctgttatctctctcactgtaccaacggcctttcccttgtaatttcctgtaaacaggcttagctgctacactatggctaactctattcttttgttggtttagccttaacgttaaattcaatgcatttcttttttggttagttggtacttgttatggtgttgctgctctcaactgtgggtggaatattctgatggcatgatactgattattgctgtcaatagtaacaactcggtttttac

SEQ ID NO: 203654 - DNA, 3116 bp, Zea Mays
ccaccaacactactactagtagtatcgtatcgcctggtggagggtaggagctatctccctgcagaggtcaggaacggcctcgagaccctgaagcggaggaggctcgagagagtgcgtttgagtgctcagaacgaagctggcgacaatcctgctgtggctgcgagaagtggcggtgatgccttgcggagccccgctaactgtggagtcagattgcattccaacaacagtacaggtttacctggaaatgtccatgacaagagtccttttgcaaagcgcaaggtggagaagtttgatatgtccaaccttgagtggatagacaagattccagagtgccctgtgtattgtcccaccaaggaggaatttgaggatcccattgcatatatacagaagatttcacctgaggctgctaaatatggtatttgtaaaatcgtctctcctgtatgtgcgtctgttcctgccggtgttgtgctgatgaaggaacatcccaattttaagttcatgactagagttcagccccttcgactcgctgaatgggctgaggatgatacagtcactttcttcatgagtggaagaaagtacaccttccgggactatgagaaaatggcgaacaaagtgttctctaagaaatattccagctctagttgtctcccagctaggtatgtggaggaggagttctggcgtgaaattgcttttggcaaaatggatttcgtagaatatgcttgtgacgttgatgggagtgccttctcttcatctcctcatgatcaacttgggaaaagcaactggaacctcaagaatttttcatggctccccaattctgttctaagacttcttcagacgccaattccaggagtgacagatccaatgctttatattgggatgctcttcagcatgtttgcgtggcacgtggaagaccattacttgtacaggcgatgcggctcctgggtttgaaagggttgctagccagtacgtatataacaaggacattttgattggtgatggagaggatgcagcatttgatgtcctactagggaaaacaacaatgttccctccaaatgtcttgctagatcacaatgttcctgtctataaagctgtacaaagacctggagaatttgttattacttttcctcgttcttaccatgcaggcttcagtcatggcttcaattgtggagaggctgttaattttgctattggcgattggtttcctcttggttctctggctagcaagcgctatgcacttctgaacagaactccattgcttgcacatgaggagctactttgtcgttctgctgtgcttctatcccaaaagctgttgaactgtgatccaagatccttggacaagttggaacatccatattcccagaattgtgtgaaatcctgctttgtgcggttgatacgattccagcgacgtgctcgtggccttcttgctaaaatgggttctgaaatatgctataagccaaagacatttccaaaatctgtcctgtagcatttgtcggcgtgattgctatatcacacacgtgttgtgtagatgtaactttgatcctgtctgcctacatcatgaacaagaactgcggagctgcccttgtaagtccaatcgcgttgtctatgttagagaggacatactggagctagaggctctatcaagaaaatttgagcaggatgtcagctcgtataaggaaggaagttgcattagcccatgtaaggaggttgagatctctgatactactgatgaacaacttccaaatcttgggattactctggatttcgttaatagtaaagctggtagctcaggctttatgactgttgatggaggaaacagttcttctgcagtatcaattttgacatcttctgtgcatcatgaggcatataagcatacagaagcaagggcaataaatacatcaatgaccaaaggaacttacactatggatgagagttcatccggcatagatggtgcttgtaatgaacacggttcatgtaatgcttcagccatggaatgcagtgataattcggattcggagtgtgaaatcttccgagtcaagcgcaggtccacctcatttgacaaacctacttctgaagctaagacatcaaccttgtctgaacagcaggttctgaggcggctgaagaaggtacatcctgaagtacagcaagtcatcagtaagcgtcaagaagaatctggtaatggttcagttcgcgctgcccacatgagccagaaaagctcaaatcctgcccctgctgatgacgaaacagaggacatggctcccataatgtggagaataaagcggcgacagtcagaaacccaagatgctacatgtcctggtacgagaccgcagtcatatccgccttccagtggtggttctggagaagagtttgtggaaagaactagagatgctgcagtagaactccgtccaaaacgagtgaaaatccggctaccttctaatgccagtaggcagattgagcagcagcgcagttcagggcagagatttgctagggaggacaggttgccgcttggttttccacgtacattttagggaatcacaggtgctactaacctctacttgagcagacgaattctttgtttaggtacactgttaactacaaaacgtggtgacagaagggaggagtgggagggatcagttgcagactgactttagaattggcaggaaaggaagcggctatctaatcgattcttttgtgcagcagggcctccaatttgaggccactgggggcacgcttagaagatacacgtgataatattcttgttgctggaggttccgtgtcactgccgatagctctttgatgcctggctatcagtgacacagattaaagagaacctcgctaccttgatatgtccgctagtgtttagagcatgtagctagcttagctgttatctctctcactgtaccaacggcctttcccttgtaatttcctgtaaacaggcttagctgctacactatggctaactctattcttttgttggtttagccttaacgttaaattcaatgcatttcttttttggttagttggtacttgttatggtgttgctgctctcaactgtgggtggaatattctgatggcatgatactgattattgctgtcaatagtaacaactcggtttttac

SEQ ID NO: 203655 - DNA, 2504 bp, Zea Mays
ccgggcctccggctgggtggctagcgtgcctctttttgttgtcgtaaaccctctctctctctctcgcgcagtctcgctccctctgtctctctcttagcgacgactgggcggccgtcgctgctggcctgctgccctacgccaggtgcccaagtcttcttcgggctcgtcgtcgtcggcgacgaccaccaccaggtccctgttgtttttaagaaaaacaaaacaatggaggcaacattagcattctcccaggacagcccaccaatttcgataatttgtgcagcaaagtttgtgggtctacccctaaccattgatcctagccttgcttctggcttggcacccaccctacgttttgcttctggagaatcactccatggtgtcaacccaatcctcctgtacattgccagcggtgcaacaattccctgcttctctgggaagaatgatattgagtttgggcatgttgttgaatggcttgaatatgtccccatctttctttcaggctctgaatttgaaaatgcctgcttatttgttgatggattcttggcctcccggacctttctggttggtcatggcctcacaattgctgacattgtagtttggtcaaatcttgctggaattggtcaacgatgggagagtctaaggaaatcaaagaaataccaaaatcttgtccgctggttcaacagcatagattcagaatacagtgacacactgaacgaagttttggctgcatatgttgggaaaagaggaattggaaaatctcctgcaccaagccttaaggaaaaggtacatgtttcaaaggatccatcagctccagaagttgatctccctggtgcaaaagttgggaaagtctgcgttcgttttgccccagaacctagcggttacctccatatcgggcatgcaaaggctgggctattgaacaaatactttgctgaaagatatcaagggcgcctaatagttcgatttgatgatacaaacccttcaaaagaaagtaatgagtttgtcgagaacgttttgaaagatattgagacgttggggatcaaatatgatgctgtcacatacacatctgattatttcccaaagttaatggaaatggctggaagcttgattaaacagggtaaagcatatattgatgacacaccgaaggagcaaatgaggaaagagaggatggatggtattgagtcaaggtgcagaaatagtaccgtggaggaaaatctgtcattatggaacgagatggttaatggaactgaaaggggtatgcagtgctgtgtacggggtaaacttgacatgcaggatcctaacaagtcactcagggatcctgtttactaccgctgtaatattgatcctcaccatcgtgttggttcaaagtacaaggtctatccaacatatgactttgcttgcccatttgttgatgcattggagggggtgacgcatgcccttcggtccagtgaatatcatgacaggaatgcacaatattatcgaatccttcaagacatggggttgaggagagtagaaatttatgaattcagccgattgaatatggtttacactcttctaagcaagcggaagcttctctggtttgtacaaaacaagaaggtcgaagattggactgatccacgttttcctactgtccaagggatagtacgtcgtggcttgaagattgaggcattgatacaatttatactccaacagggtgcttcaaaaaatctgaatctcatggagtgggataaactctggacaatcaacaagaagataattgatccattgtgcgcaaggcatactgctgtgctaaaagaccagcgtgtcatctttactcttacaaatggtccagagaagccatttgttcgaattttaccaaggcataagaaatttgtgggtgctggaaagaaggctacaaccttcgccaacagaatttggttagattatgctgatgcagcagccattagcaagggtgaggaagtaacccttatggattgggggaatgctatcgttaaagagatcaaggtggagagtggagtaattactgaactagttggagaattacatcttgaggggtctgtgaagacaacaaaattgaagatcacatggctagcagatatagaggagctagtccccctctcattggttgaatttgattatctcatcagcaagaaaaagctagaggaagatgatgacttcctcgagaatctcaacccttgcactcgacgagaaaacccagcccttggagatgcaaacatgatgaacctcaagcgtggagagatcatacagctcgagaggaaaggctactataggtcttggcctagagatctttggaaaagatctttttttcaatttcttcaagagacatggttggatgagtttttttgtgatggatgcgtagtgtgtgcactgtggcgcttacaacgacccaaacaaatatcgctaagcgcgcgtaatattgtactatgatcatttggcagttgattgtattaaccaaacaaggaaacggatatcgtagacctctgtccaac

SEQ ID NO: 203656 - DNA, 2377 bp, Zea Mays
ctaacttcgattattttgcaaggtccctgttgtttttaagaaaaacaaaacaatggaggcaacattagcattctcccaggacagcccaccaatttcgataatttgtgcagcaaagtttgtgggtctacccctaaccattgatcctagccttgcttctggcttggcacccaccctacgttttgcttctggagaatcactccatggtgtcaacccaatcctcctgtacattgccagcggtgcaacaattccctgcttctctgggaagaatgatattgagtttgggcatgttgttgaatggcttgaatatgtccccatctttctttcaggctctgaatttgaaaatgcctgcttatttgttgatggattcttggcctcccggacctttctggttggtcatggcctcacaattgctgacattgtagtttggtcaaatcttgctggaattggtcaacgatgggagagtctaaggaaatcaaagaaataccaaaatcttgtccgctggttcaacagcatagattcagaatacagtgacacactgaacgaagttttggctgcatatgttgggaaaagaggaattggaaaatctcctgcaccaagccttaaggaaaaggtacatgtttcaaaggatccatcagctccagaagttgatctccctggtgcaaaagttgggaaagtctgcgttcgttttgccccagaacctagcggttacctccatatcgggcatgcaaaggctgggctattgaacaaatactttgctgaaagatatcaagggcgcctaatagttcgatttgatgatacaaacccttcaaaagaaagtaatgagtttgtcgagaacgttttgaaagatattgagacgttggggatcaaatatgatgctgtcacatacacatctgattatttcccaaagttaatggaaatggctggaagcttgattaaacagggtaaagcatatattgatgacacaccgaaggagcaaatgaggaaagagaggatggatggtattgagtcaaggtgcagaaatagtaccgtggaggaaaatctgtcattatggaacgagatggttaatggaactgaaaggggtatgcagtgctgtgtacggggtaaacttgacatgcaggatcctaacaagtcactcagggatcctgtttactaccgctgtaatattgatcctcaccatcgtgttggttcaaagtacaaggtctatccaacatatgactttgcttgcccatttgttgatgcattggagggggtgacgcatgcccttcggtccagtgaatatcatgacaggaatgcacaatattatcgaatccttcaagacatggggttgaggagagtagaaatttatgaattcagccgattgaatatggtttacactcttctaagcaagcggaagcttctctggtttgtacaaaacaagaaggtcgaagattggactgatccacgttttcctactgtccaagggatagtacgtcgtggcttgaagattgaggcattgatacaatttatactccaacagggtgcttcaaaaaatctgaatctcatggagtgggataaactctggacaatcaacaagaagataattgatccattgtgcgcaaggcatactgctgtgctaaaagaccagcgtgtcatctttactcttacaaatggtccagagaagccatttgttcgaattttaccaaggcataagaaatttgtgggtgctggaaagaaggctacaaccttcgccaacagaatttggttagattatgctgatgcagcagccattagcaagggtgaggaagtaacccttatggattgggggaatgctatcgttaaagagatcaaggtggagagtggagtaattactgaactagttggagaattacatcttgaggggtctgtgaagacaacaaaattgaagatcacatggctagcagatatagaggagctagtccccctctcattggttgaatttgattatctcatcagcaagaaaaagctagaggaagatgatgacttcctcgagaatctcaacccttgcactcgacgagaaaacccagcccttggagatgcaaacatgatgaacctcaagcgtggagagatcatacagctcgagaggaaaggctactataggtcttggcctagagatctttggaaaaggtattacaaagaataagttgttttatgaatggacaatgagaatggttatcacacatgtttttttttgtttctagatctttttttcaatttcttcaagagacatggttggatgagtttttttgtgatggatgcgtagtgtgtgcactgtggcgcttacaacgacccaaacaaatatcgctaagcgcgcgtaatattgtactgtaagtaccaacttagcttattagaacatttgtca

SEQ ID NO: 203657 - DNA, 2494 bp, Zea Mays
tgggtggctagcgtgcctctttttgttgtcgtaaaccctctctctctctctcgcgcagtctcgctccctctgtctctctcttagcgacgactgggcggccgtcgctgctggcctgctgccctacgccaggtgcccaagtcttcttcgggctcgtcgtcgtcggcgacgaccaccaccaggtccctgttgtttttaagaaaaacaaaacaatggaggcaacattagcattctcccaggacagcccaccaatttcgataatttgtgcagcaaagtttgtgggtctacccctaaccattgatcctagccttgcttctggcttggcacccaccctacgttttgcttctggagaatcactccatggtgtcaacccaatcctcctgtacattgccagcggtgcaacaattccctgcttctctgggaagaatgatattgagtttgggcatgctctgaatttgaaaatgcctgcttatttgttgatggattcttggcctcccggacctttctggttggtcatggcctcacaattgctgacattgtagtttggtcaaatcttgctggaattggtcaacgatgggagagtctaaggaaatcaaagaaataccaaaatcttgtccgctggttcaacagcatagattcagaatacagtgacacactgaacgaagttttggctgcatatgttgggaaaagaggaattggaaaatctcctgcaccaagccttaaggaaaaggtacatgtttcaaaggatccatcagctccagaagttgatctccctggtgcaaaagttgggaaagtctgcgttcgttttgccccagaacctagcggttacctccatatcgggcatgcaaaggctgggctattgaacaaatactttgctgaaagatatcaagggcgcctaatagttcgatttgatgatacaaacccttcaaaagaaagtaatgagtttgtcgagaacgttttgaaagatattgagacgttggggatcaaatatgatgctgtcacatacacatctgattatttcccaaagttaatggaaatggctggaagcttgattaaacagggtaaagcatatattgatgacacaccgaaggagcaaatgaggaaagagaggatggatggtattgagtcaaggtgcagaaatagtaccgtggaggaaaatctgtcattatggaacgagatggttaatggaactgaaaggggtatgcagtgctgtgtacggggtaaacttgacatgcaggatcctaacaagtcactcagggatcctgtttactaccgctgtaatattgatcctcaccatcgtgttggttcaaagtacaaggtctatccaacatatgactttgcttgcccatttgttgatgcattggagggggtgacgcatgcccttcggtccagtgaatatcatgacaggaatgcacaatattatcgaatccttcaagacatggggttgaggagagtagaaatttatgaattcagccgattgaatatggtttacactcttctaagcaagcggaagcttctctggtttgtacaaaacaagaaggtcgaagattggactgatccacgttttcctactgtccaagggatagtacgtcgtggcttgaagattgaggcattgatacaatttatactccaacagggtgcttcaaaaaatctgaatctcatggagtgggataaactctggacaatcaacaagaagataattgatccattgtgcgcaaggcatactgctgtgctaaaagaccagcgtgtcatctttactcttacaaatggtccagagaagccatttgttcgaattttaccaaggcataagaaatttgtgggtgctggaaagaaggctacaaccttcgccaacagaatttggttagattatgctgatgcagcagccattagcaagggtgaggaagtaacccttatggattgggggaatgctatcgttaaagagatcaaggtggagagtggagtaattactgaactagttggagaattacatcttgaggggtctgtgaagacaacaaaattgaagatcacatggctagcagatatagaggagctagtccccctctcattggttgaatttgattatctcatcagcaagaaaaagctagaggaagatgatgacttcctcgagaatctcaacccttgcactcgacgagaaaacccagcccttggagatgcaaacatgatgaacctcaagcgtggagagatcatacagctcgagaggaaaggctactataggtcttggcctagagatctttggaaaaggtattacaaagaataagttgttttatgaatggacaatgagaatggttatcacacatgtttttttttgtttctagatctttttttcaatttcttcaagagacatggttggatgagtttttttgtgatggatgcgtagtgtgtgcactgtggcgcttacaacgacccaaacaaatatcgctaagcgcgcgtaatattgtactgtaagtaccaacttagcttattagaacatttgtca

SEQ ID NO: 203658 - DNA, 909 bp, Zea Mays
cttgtacagaaaccatatgaagaaggtgatgaaaggggcttaaagctactgcagtccattttgaagccaataatgctgagaaggactaaaaattgcacagacaaggagggcaggccaatccttaatttaccccctgcaaacattgaagtaaaatactgtgttttatctgaggctgagaaggatttctatgaagctctatttcgaagatctaaggtaaaatttgatcaatttgttgagcaaggaagggttctgcacaactatgcttcaattttggagttacttttgcgcctaaggcaatgctgtgatcatccattccttattatgagtcgtggggatacaaaagagtatgcagacctaaacaagcttgcaaagcgttttctgcgtggtggtaatggtgctgttaatggtgattcttgcatcccctctagagcttatatcaaacaggttgtccaagaattgcaaaaggatgaaggggagtgccctatttgtcttgaagcctttgaggatgcagtattaactccctgtgctcatcgtttatgccgagagtgtctcttatctagttggcggagtgcgacagcaggcctttgtcctgtctgtagaatgtcaatgagcaagcaggaccttataactgctcctactgataaccgctttcaaatcgatgtcgaaaaaaattgggttgaatcttccaagatatctgctctcctgcaggagttggaagctcttcgcagttcaggcgccaagagtatcgtgtttagccagtggactgcttttttagatctgttgcaaattccactttctaggaataatttctcatttgctaggctggatgggacgttgaatcttcagcaaagggagaaagttataaaggagttctcagaggacaaaggcattttgggagcccaaacaaca

SEQ ID NO: 203659 - DNA, 2994 bp, Zea Mays
  misc_feature (2993)..(2994): n is a, c, g, or t
ctcccgccctagcttgataatgtgtccaaccctgccatactgatgtactacctgaattattgtcagatcataatgtagagagataacatatacatacatagaatgatgtgcttacactatattttttccagcttatcagcaaattaagagatcttctacagtagcaagggctaagacagacacgatacgatatattccatatatatattcagtaaaaacacaataatttaatgccctctactgtcaaatgactaaaaagagatcgtcattgcaaaatatattgttccataccagccagctaagacgtccccgttcatcggggtccgaggagtgaccgaattctttcaggacttcttcccaggccggaataagcagtctctgcgccaaaatagcatccttgcattagaccatgcaccgtaccaccagcagcagcatttataggacgtccaattttatgttcgctgcctttattgttggttcaatcctgtcttcgcttctatcccgtacctctcccgaccgcaattgtagcagagaaacttctgggagctgactagcttccttgctcctcggtgttgtcatccgagaagctgcgccgcgcgccaatctgatcatctccatgcgctgaagatcgttggtgcccgccatgcttcccgatgattgctgccacatcgtcgctgaggaaatttcaagccccatagctgcacatatactcgacttctactacggcgacggcctgggcgatgacctctttgccgcggtgactgccacctctggcccattccctgccactgacgatgatgtttcttcgtctaccgctaccacccctcctatctgcggctacagtgaagacaccgcagctgctggtggagccacagcctacaccccgttgacatccttcgacaccactctcacagccctcctggaggaagagcagcaccatggccttgacgccgggttcctcccgcagatcgatggcctatcagaggtagcagcatactatccaactgccaccgatgaggccagcatagggcagttcgaccagatgggacttccagagaccttagacgagcaggtgcctcctccagtgcagatgagcagcagtgcatctgccttgatgccgctcgctacagactatgatgagtgcttcatggcagccgtagcagctggagggttcatgggtctggatggagccatgtatcagcaaactggagcagttcttccaggctgcagtgcagatgcatcacaacaggaattcttcagcagtgccggcagcaacagtatggtgatgattggcgagtatcagaagatgatggaaggtgaagggctgacaacaacatatgacgacacagattccatgcaagggacatttaacactaatgcagagatgcaggtaggaggaaataatcagcacctgataaacggatgcaacgggaacccagcaacgttacctccgacggaactatcagtactggaagactccacgtttaaggtcgtccgcttgtcgcctgaagagagaaaggaaaagatccataggtacataaagaaacggaacgagagaaatttccgcaaaaaaataaagtacgcatgtagaaaaaccttggcggatagcaggccccgtgtccgtggaaggtttgccaagaatgatgaactctgtgaagcagcgcaatcaggctcccagagtcatgaacattatgaacaaactgaccatatgaaagaagaggacatgctggacacatctgacattcttgcgcaactaaatggattaaatccctacaactacaagtataaatccaccattgaatcatggatatgattctcaagtctcaaccacacaaaaactaagacccaatgtcttatttgaagttgtgcgacgtcgagcacagtttttttatttccattaaaataaacttacatcattagaagctcaagaatttagttcaactaatgtagatttaatgtatgtgtcaatctgctgtcacttgtttaccattgtcacaagtgaatgtggtagtgagtctccagaagagtcatttgtgtatataactatgtcatctatagaaataaaagttctgaggatctcttaagtatttcttcgtagcagagtctagatttgatctgctcatcagagaatttcaaggatagaatgtagcaatggtacatcagagaatcaaaaaacatggcaacagagcacagtaataagtaaacttaatatattgggcctttttagcctgtgcccttatgtgcagaaggatcaagagttggaactaacaagaacaatatgaataagcatagcaaaaatgttcaacattatactctttgagtttagtaaggttaatgatcttgctgataaatcataggcccatgaaattccagatatccaattctgttgattttctgtttaatttgagttatccaagaacaaactacagatctatagagagtaatgtatccacagttgcattacggcaaagagtaaaatcttaatgaactaaaaggtttgacgctacggggtaagtaggcaatgtaccaggttgcaaatctccattacagctaagctacaatgagtggtcaaatttacaaactatgcttcacccaaaccagcattctacagaattggaactccgactggatggcaatctagaaaacaacactcagaattccatgtcagaatttactctggcaaaaaagatttgatcgatgaaatcaatacgattggatccttaatgaggtgtttggtttgatgaatcactctatccaaaatgaagtggtgcataataggttcattcctcaaatttggtgggatgactctattccacatattagtactaaacaactaactttgaggaatgaggtggtgatggattaactcactccatttcacaaaccaaacaaaaaagtgaagtgtgagaagatgatggactacatcattcctcaaaccaaacactctataaattgatgtacagtttcttgaaccacacttgtctattcgtacnn

SEQ ID NO: 203660 - DNA, 2409 bp, Zea Mays
  misc_feature (2408)..(2409): n is a, c, g, or t
cgagcggctctggtaccatcgtatacaaataatgatgatgttgttcgaggaggacgcagccgccatggccatcccagatgccttgtgcattgaggaaatttcaagccccatagctgcacatatactcgacttctactacggcgacggcctgggcgatgacctctttgccgcggtgactgccacctctggcccattccctgccactgacgatgatgtttcttcgtctaccgctaccacccctcctatctgcggctacagtgaagacaccgcagctgctggtggagccacagcctacaccccgttgacatccttcgacaccactctcacagccctcctggaggaagagcagcaccatggccttgacgccgggttcctcccgcagatcgatggcctatcagaggtagcagcatactatccaactgccaccgatgaggccagcatagggcagttcgaccagatgggacttccagagaccttagacgagcaggtgcctcctccagtgcagatgagcagcagtgcatctgccttgatgccgctcgctacagactatgatgagtgcttcatggcagccgtagcagctggagggttcatgggtctggatggagccatgtatcagcaaactggagcagttcttccaggctgcagtgcagatgcatcacaacaggaattcttcagcagtgccggcagcaacagtatggtgatgattggcgagtatcagaagatgatggaaggtgaagggctgacaacaacatatgacgacacagattccatgcaagggacatttaacactaatgcagagatgcaggtaggaggaaataatcagcacctgataaacggatgcaacgggaacccagcaacgttacctccgacggaactatcagtactggaagactccacgtttaaggtcgtccgcttgtcgcctgaagagagaaaggaaaagatccataggtacataaagaaacggaacgagagaaatttccgcaaaaaaataaagtacgcatgtagaaaaaccttggcggatagcaggccccgtgtccgtggaaggtttgccaagaatgatgaactctgtgaagcagcgcaatcaggctcccagagtcatgaacattatgaacaaactgaccatatgaaagaagaggacatgctggacacatctgacattcttgcgcaactaaatggattaaatccctacaactacaagtataaatccaccattgaatcatggatatgattctcaagtctcaaccacacaaaaactaagacccaatgtcttatttgaagttgtgcgacgtcgagcacagtttttttatttccattaaaataaacttacatcattagaagctcaagaatttagttcaactaatgtagatttaatgtatgtgtcaatctgctgtcacttgtttaccattgtcacaagtgaatgtggtagtgagtctccagaagagtcatttgtgtatataactatgtcatctatagaaataaaagttctgaggatctcttaagtatttcttcgtagcagagtctagatttgatctgctcatcagagaatttcaaggatagaatgtagcaatggtacatcagagaatcaaaaaacatggcaacagagcacagtaataagtaaacttaatatattgggcctttttagcctgtgcccttatgtgcagaaggatcaagagttggaactaacaagaacaatatgaataagcatagcaaaaatgttcaacattatactctttgagtttagtaaggttaatgatcttgctgataaatcataggcccatgaaattccagatatccaattctgttgattttctgtttaatttgagttatccaagaacaaactacagatctatagagagtaatgtatccacagttgcattacggcaaagagtaaaatcttaatgaactaaaaggtttgacgctacggggtaagtaggcaatgtaccaggttgcaaatctccattacagctaagctacaatgagtggtcaaatttacaaactatgcttcacccaaaccagcattctacagaattggaactccgactggatggcaatctagaaaacaacactcagaattccatgtcagaatttactctggcaaaaaagatttgatcgatgaaatcaatacgattggatccttaatgaggtgtttggtttgatgaatcactctatccaaaatgaagtggtgcataataggttcattcctcaaatttggtgggatgactctattccacatattagtactaaacaactaactttgaggaatgaggtggtgatggattaactcactccatttcacaaaccaaacaaaaaagtgaagtgtgagaagatgatggactacatcattcctcaaaccaaacactctataaattgatgtacagtttcttgaaccacacttgtctattcgtacnn

SEQ ID NO: 203661 - DNA, 1504 bp, Zea Mays
caatggtggatttatacttgtagttgtagggatttaatccatttagttgcgcaagaatgtcagatgtgtccagcatgtcctcttctttcatatggtcctgaaaaaaaggtaagagatcttgttaactatgcatagaagtattccaggttcttgtttaaaaacaatgagaatgcataagaagaatcatgtttttttttattccaggttctcgtttgataagactgtgtatagttcaattgaaaacttacagtttgttcataatgttcatgactctgggagcctgattgcgctgcttcacagagttcatcattcttggcaaaccttccacggacacggggcctgctatccgccaaggtttttctacatgcgtactgcatttcgttgtatgtcaggctgtcagcacagctgaatacgtaagatgtccatgcggaggcgacaagcggacgaccttaaacgtggagtcttccagtactgatagttccgtcggaggtaacgttgctgggttcccgttgcatccgtttatcaggcaagcacctgttgtcctaggaaacgtaacggatcggacttgttgccattttaattacaactccacatgggcatcggcatgcgttgatgcatatataggcacgatgcaagaaacgcggcagcaaaaggatgtcgagaaggaaacgaatgaaatcgctcggttgggtttcataaaaacatcatcatcccagaaagtaggaagaggcgagcaaaaaaccgtgttgggtcagagaagcaaaattacagcgacgatgtggcagcaatcatcgggaagcatggcgggcaccaacgatcttcagcgcatggagatgatcagattggcgcgcggcgcagcttctcggatgacaacaccgaggagcaaggaagctagtcagctcccagaagtttctctgctacaattgcggtcgggagagagactgcttattccggcctgggaagaagtcctgaaagaattcggtcactcctcggaccccgatgaacggggacgtcttagctggctgtatggcagggttggacacattatcaagctagggcgggagggagacgacttacaatgcacaaggcatctgggatggccatggcggctgcgtcctcctcgaacaacatcatcattatttgtatacgatggtaccagagccgctcgatcaataatggaggctgggggagagtggagggttgatggtgtcccccatggagaacgcatgagctcgatacttatatatgcggaagggagaacaagaacaactgcacgggcatctttttttttatttttatgtttttctctccctaaccttttgctataattgggtggtgccgttggtgagacgaaccgagccgacaaacaacagcctagcctggtggcgctcgatggagtttttggcgtttactactcatatatggtgcatatattcatgcgtgagagtacgcaagtagctaggtagatgtgactgttggattagtgcagctgattactgtcgta

SEQ ID NO: 203662 - DNA, 2143 bp, Zea Mays
gtggatttatacttgtagttgtagggatttaatccatttagttgcgcaagaatgtcagatgtgtccagcatgtcctcttctttcatatggtcctgaaaaaaaggtaagagatcttgttaactatgcatagaagtattccaggttcttgtttaaaaacaatgagaatgcataagaagaatcatgtttttttttattccaggttctcgtttgataagactgtgtatagttcaattgaaaacttacagtttgttcataatgttcatgactctgggagcctgattgcgctgcttcacagagttcatcattcttggcaaaccttccacggacacggggcctgctatccgccaaggtttttctacatgcgtactgcatttcgttgtatgtcaggctgtcagcacagctgaatacgtaagatgtccatgcggaggcgacaagcggacgaccttaaacgtggagtcttccagtactgatagttccgtcggagcctggaagaactgctccagtttgctgatacatggctccatccagacccatgaaccctccagctgctacggctgccatgaagcactcatcatagtctgtagcgagcggcatcaaggcagatgcactgctgctcatctgcactggaggaggcacctgctcgtctaaggtctctggaagtcccatctggtcgaactgccctatgctggcctcatcggtggcagttggatagtatgctgctacctctgataggccatcgatctgcgggaggaacccggcgtcaaggccatggtgctgctcttcctccaggagggctgtgagagtggtgtcgaaggatgtcaacggggtgtaggctgtggctccaccagcagctgcggtgtcttcactgtagccgcagataggaggggtggtagcggtagacgaagaaacatcatcgtcagtggcagggaatgggccagaggtggcagtcaccgcggcaaagaggtcatcgcccaggccgtcgccgtagtagaagtcgagtatatgtgcagctatggggcttgaaatttcctcctgcaaatttcagagcgggacaagacatgcaagcacctgttgtcctaggaaacgtaacggatcggacttgttgccattttaattacaactccacatgggcatcggcatgcgttgatgcatatataggcacgatgcaagaaacgcggcagcaaaaggatgtcgagaaggaaacgaatgaaatcgctcggttgggtttcataaaaacatcatcatcccagaaagtaggaagaggcgagcaaaaaaccgtgttgggtcagagaagcaaaattacagcgacgatgtggcagcaatcatcgggaagcatggcgggcaccaacgatcttcagcgcatggagatgatcagattggcgcgcggcgcagcttctcggagagggggggcatgtgtgcgagcaaggtgggccgaaaataagcctgttttggccatgcagatgcacatgcatgacttcctctctctgtttttttttttggccaagatgacaacaccgaggagcaaggaagctagtcagctcccagaagtttctctgctacaattgcggtcgggagagagactgcttattccggcctgggaagaagtcctgaaagaattcggtcactcctcggaccccgatgaacggggacgtcttagctggctgtatggcagggttggacacattatcaagctagggcgggagggagacgacttacaatgcacaaggcatctgggatggccatggcggctgcgtcctcctcgaacaacatcatcattatttgtatacgatggtaccagagccgctcgatcaataatggaggctgggggagagtggagggttgatggtgtcccccatggagaacgcatgagctcgatacttatatatgcggaagggagaacaagaacaactgcacgggcatctttttttttatttttatgtttttctctccctaaccttttgctataattgggtggtgccgttggtgagacgaaccgagccgacaaacaacagcctagcctggtggcgctcgatggagtttttggcgtttactactcatatatggtgcatatattcatgcgtgagagtacgcaagtagctaggtagatgtgactgttggattagtgcagctgattactgtcgta

SEQ ID NO: 203663 - DNA, 1966 bp, Zea Mays
cgctttcctcgcctctctttccgttttccttcctcgtcgcggtcgtgggtcacttgccgccgcgccggcaacgtccccttcccatccccagccacgcataaatcaatcgatgcattggtccttggcacgacttgattcctgattccctctgctgttctccacccgctctctctctttcgcgtggcatttcttcctgccagcgacgaattggcgcgcgccgccgccgccgtctgcccaggcccttcgcccacccaccagacagacgtgtataagcgagaggaaattatctgccggccattttcactgacagctggtggagtccgagagtaatgagagctgtgaagtttaatggcatgtttggaagcaccagtttttaagaaactggtttatgaaaattgatgtggacctaaatagatgaagctgcatcaagtttggcagttaggcgttaaggatatgaaggccgttccacttccacgtccgagatcagctccaaaaagacgtgcgtggatccctgccgttgcagcttttatctccatcgcgctagtctgggcttatctgtatcctcccccgcattacacttcttctgtgagggattggcttcctgcggaaccagccagggaattgaccgatgaggagagggcctcgcgtgttgtttttaggcagatcctaacaacacctcctgttctatccaagaattcaaaaatagctttcatgttcttgactccggggacattgccatttgaaagattatgggaaaagttctttgagggccatgaaggaaggtataccatatatattcatgcctcaagggagaagcctgaacatgtcagtcccatatttgttggtcgagagatacacagtgaaaaggtaacttggggtaaaatttctatggttgatgctgagaggaggttgatggcaaatgctctacaagatattgacaatcagcattttgttttgctatctgatagctgtgtacctttgcacagttttgattatgtatatgactacctgatgggtgcaaatctcagttttattgactgcttttatgatcctggaccacatggaaattttagatattcacaaaatatgttgcctgaggtcacagagactgattttagaaagggttcacagtggttctcagtcaaacgccaacatgcgttgatgattattgcagatagtctttactatactaagttcaagcttcattgcaggcctgggatggaagatggtcgcaactgctacgctgacgaacattatttgccaacagtattccgtatgatggacccagatggaattgctaattggtctgtaacccatgttgactggtctgaagggaagtggcatccaaaagcttaccgggcaaagcacgttaatttggagcttctgaagaatatagcatcaatcgacgtgagccaccatgtcactagtgatggcaagaaagtggtcacagagaacccctgcctatggaatggagcaaagaggccatgctacctgtttgcgaggaagttctaccctgaatccataaacaatctcttgaccttgttcgcgaattacacacttatttgagcttctaggtgacgcttagaggctacagggaatattttgttatagaaatccttgtacattggttaggaacataataggagattaattaacaggatagcagttggtgaggagaaggctttcggctttcgctgcagcaacacagtggcttcggatataccacaactggtcattgctactcctttagcctcgtgttgctttcatagtttcttctacccacatttttagctgcggcgttttaccatgtacatcaagctttgtttttacaaggaatggtcattcaataggaaaatctgagatcatggtcttgtatttgccctcaagttctcggttctgactgccaaagcacggttcaaagggatacatggaaaattttactttataggaaacaaatcctacgagt

SEQ ID NO: 203664 - DNA, 1808 bp, Zea Mays
cgcattgccaaattaaaactttcggaacgaaacgagggaaaggcaacaacacacatttggcgcgccctctgcggtgtatcaaaacaaacaaaccgcatcgtcgctttcctcgcctctctttccgttttccttcctcgtcgcggtcgtgggtcacttgccgccgcgccggcaacgtccccttcccatccccagccacgcataaatcaatcgatgcattggtccttggcacgacttgattcctgattccctctgctgttctccacccgctctctctctttcgcgtggcatttcttcctgccagcgacgaattggcgcgcgccgccgccgccgtctgcccaggcccttcgcccacccaccaggacctaaatagatgaagctgcatcaagtttggcagttaggcgttaaggatatgaaggccgttccacttccacgtccgagatcagctccaaaaagacccagggaattgaccgatgaggagagggcctcgcgtgttgtttttaggcagatcctaacaacacctcctgttctatccaagaattcaaaaatagctttcatgttcttgactccggggacattgccatttgaaagattatgggaaaagttctttgagggccatgaaggaaggtataccatatatattcatgcctcaagggagaagcctgaacatgtcagtcccatatttgttggtcgagagatacacagtgaaaaggtaacttggggtaaaatttctatggttgatgctgagaggaggttgatggcaaatgctctacaagatattgacaatcagcattttgttttgctatctgatagctgtgtacctttgcacagttttgattatgtatatgactacctgatgggtgcaaatctcagttttattgactgcttttatgatcctggaccacatggaaattttagatattcacaaaatatgttgcctgaggtcacagagactgattttagaaagggttcacagtggttctcagtcaaacgccaacatgcgttgatgattattgcagatagtctttactatactaagttcaagcttcattgcaggcctgggatggaagatggtcgcaactgctacgctgacgaacattatttgccaacagtattccgtatgatggacccagatggaattgctaattggtctgtaacccatgttgactggtctgaagggaagtggcatccaaaagcttaccgggcaaagcacgttaatttggagcttctgaagaatatagcatcaatcgacgtgagccaccatgtcactagtgatggcaagaaagtggtcacagagaacccctgcctatggaatggagcaaagaggccatgctacctgtttgcgaggaagttctaccctgaatccataaacaatctcttgaccttgttcgcgaattacacacttatttgagcttctaggtgacgcttagaggctacagggaatattttgttatagaaatccttgtacattggttaggaacataataggagattaattaacaggatagcagttggtgaggagaaggctttcggctttcgctgcagcaacacagtggcttcggatataccacaactggtcattgctactcctttagcctcgtgttgctttcatagtttcttctacccacatttttagctgcggcgttttaccatgtacatcaagctttgtttttacaaggaatggtcattcaataggaaaatctgagatcatggtcttgtatttgccctcaagttctcggttctgactgccaaagcacggttcaaagggatacatggaaaattttactttataggaaacaaatcctacgagt

SEQ ID NO: 203665 - DNA, 1880 bp, Zea Mays
aacacgcattgccaaattaaaactttcggaacgaaacgagggaaaggcaacaacacacatttggcgcgccctctgcggtgtatcaaaacaaacaaaccgcatcgtcgctttcctcgcctctctttccgttttccttcctcgtcgcggtcgtgggtcacttgccgccgcgccggcaacgtccccttcccatccccagccacgcataaatcaatcgatgcattggtccttggcacgacttgattcctgattccctctgctgttctccacccgctctctctctttcgcgtggcatttcttcctgccagcgacgaattggcgcgcgccgccgccgccgtctgcccaggcccttcgcccacccaccagacagacgtgtataagcgagaggaaattatctgccggccattttcactgacagctggtggagtccgagagacctaaatagatgaagctgcatcaagtttggcagttaggcgttaaggatatgaaggccgttccacttccacgtccgagatcagctccaaaaagacccagggaattgaccgatgaggagagggcctcgcgtgttgtttttaggcagatcctaacaacacctcctgttctatccaagaattcaaaaatagctttcatgttcttgactccggggacattgccatttgaaagattatgggaaaagttctttgagggccatgaaggaaggtataccatatatattcatgcctcaagggagaagcctgaacatgtcagtcccatatttgttggtcgagagatacacagtgaaaaggtaacttggggtaaaatttctatggttgatgctgagaggaggttgatggcaaatgctctacaagatattgacaatcagcattttgttttgctatctgatagctgtgtacctttgcacagttttgattatgtatatgactacctgatgggtgcaaatctcagttttattgactgcttttatgatcctggaccacatggaaattttagatattcacaaaatatgttgcctgaggtcacagagactgattttagaaagggttcacagtggttctcagtcaaacgccaacatgcgttgatgattattgcagatagtctttactatactaagttcaagcttcattgcaggcctgggatggaagatggtcgcaactgctacgctgacgaacattatttgccaacagtattccgtatgatggacccagatggaattgctaattggtctgtaacccatgttgactggtctgaagggaagtggcatccaaaagcttaccgggcaaagcacgttaatttggagcttctgaagaatatagcatcaatcgacgtgagccaccatgtcactagtgatggcaagaaagtggtcacagagaacccctgcctatggaatggagcaaagaggccatgctacctgtttgcgaggaagttctaccctgaatccataaacaatctcttgaccttgttcgcgaattacacacttatttgagcttctaggtgacgcttagaggctacagggaatattttgttatagaaatccttgtacattggttaggaacataataggagattaattaacaggatagcagttggtgaggagaaggctttcggctttcgctgcagcaacacagtggcttcggatataccacaactggtcattgctactcctttagcctcgtgttgctttcatagtttcttctacccacatttttagctgcggcgttttaccatgtacatcaagctttgtttttacaaggaatggtcattcaataggaaaatctgagatcatggtcttgtatttgccctcaagttctcggttctgactgccaaagcacggttcaaagggatacatggaaaattttactttataggaaacaaatcctacgagt

SEQ ID NO: 203666 - DNA, 605 bp, Zea Mays
gaggactggagaaagttggtggagaagtggtctacccaaaacacaagaaagaagagaaatataaggatgctgaaccgagtgcaatagatcttttcaaggacatgcattgcagcaagaagaaaggtttttctgaaaatgtaaagaaagcaattgttgacatggaagcaagggtgacaacaccagttgaggatggacaacaacaaaagtctcctatagaagttgtttctgaagtgctatggggctccagtttatttctacagaatgttggtctgcaagataactccaagaaaagctccacaacaactgtttttgctaaggttcaagaacttcataatcaattggagtctgagaggctagaaaaagatgggcttcaagaagaagtagaaaccttaaaggctcaggcacaggcctcaaaggagaccatggacaatatgaagagatcgatggaagaaaataacagtctcctccgtcaactgttgagcttcaatcgaagccaaacgtccccatcttaagtctgctatagtatcatgttatattagttctggattcaggttttataaatttggaatatgtttaaaactttcatactttgagttgaagttata

SEQ ID NO: 203667 - DNA, 1039 bp, Zea Mays
atcgcaggtgtgggaaacatggttgctgtcggcgaacggcgttaacagccgcacctccgttcctccgggcgtgcctccgttcctccggctgcgcccccgctcctccgaccgcccccggtcgaccgttgtatctaatggtcgttgatccggtgacctcccccacaacaactctacccaaagactacgatggctctagggaagaggtccacatggacctcacggaaacccgaagaacttgtgccaactgattacgagaaaataagggctatgaatatgatgaagaacaatcaattgtttcaacggctaggccttggacaattgaaatcactggtgactgctacagctgcaaacaacaaagaagactgtcctcagcaatcagagagtttatatgatggtgaaaacactgacaattctaatgaagaggaatcccaatgtactaacggtggttgtgccaacatctccaatgatggtgatcagatctcaacaaaagtaacaagaggaaataaaataattgtggcacctacggaggagcgaacaattagagtcactaggcaaagaattgctaaagtaaaccaagaaaatagccacaacctgtctattcataaacaactcagttcatgtcctgctacaaaccatgattcgatagaaactcttgttgttcctacacaacctagttcaaatgccaccataaacaataacacaacacataacgtagataatgctatagagcctaattctctgatataggaggagagtgataaccacaatgcagttgaaggtaactaaacattttaactgtttagacattgaactatccttgagcaaataacttttatgttttccagcattagtttaggtaactagtataacttaaatttgaacaaaattactcatatgtttttgtatgatttatggcaactaattcttagttatatgcagcatcacacatatcaacaagtttttgtgtcctgaccaggaacaatagatatcataccaaggagaaaaagtatgggctaacaacttgaatcgttaagcagag

SEQ ID NO: 203668 - DNA, 1075 bp, Zea Mays
atcgcaggtgtgggaaacatggttgctgtcggcgaacggcgttaacagccgcacctccgttcctccgggcgtgcctccgttcctccggctgcgcccccgctcctccgaccgcccccggtacctctggttgacctcgcccccattcctccggctccgcttcgtgttctccggcctcgcccctgttcatccaaccttcggttctagcccctcgtgaagactacgatggctctagggaagaggtccacatggacctcacggaaacccgaagaacttgtgccaactgattacgagaaaataagggctatgaatatgatgaagaacaatcaattgtttcaacggctaggccttggacaattgaaatcactggtgactgctacagctgcaaacaacaaagaagactgtcctcagcaatcagagagtttatatgatggtgaaaacactgacaattctaatgaagaggaatcccaatgtactaacggtggttgtgccaacatctccaatgatggtgatcagatctcaacaaaagtaacaagaggaaataaaataattgtggcacctacggaggagcgaacaattagagtcactaggcaaagaattgctaaagtaaaccaagaaaatagccacaacctgtctattcataaacaactcagttcatgtcctgctacaaaccatgattcgatagaaactcttgttgttcctacacaacctagttcaaatgccaccataaacaataacacaacacataacgtagataatgctatagagcctaattctctgatataggaggagagtgataaccacaatgcagttgaaggtaactaaacattttaactgtttagacattgaactatccttgagcaaataacttttatgttttccagcattagtttaggtaactagtataacttaaatttgaacaaaattactcatatgtttttgtatgatttatggcaactaattcttagttatatgcagcatcacacatatcaacaagtttttgtgtcctgaccaggaacaatagatatcataccaaggagaaaaagtatgggctaacaacttgaatcgttaagcagag

SEQ ID NO: 203669 - DNA, 713 bp, Zea Mays
ctgaaaaaagtaccatttccgaagtactactactaccgcatggcgagcgagtagacggttcttctaatgggccgttccgtgggcttcattgtttaacctggggctagctatatagtaataccatcccaccccgctcctcaaaaccctagctagcgccgccgccgctgcagactcctccttttcgatcccttcacaaagcgccgccgtcgccccatcgaacatggctccgaagaaggataaggccccgcccccgtcgtcgaagcccgccaagtccggcggtggcaagcagaagaagaagaagtggagcaagggaaagctaaaggagaaggtgaacaacgcggtgctgttcgaccaggctacctacgacaagctgctctctgaggtgcccaagtacaagcagatctacaccagggcaacaaatacctaaggatgggattcccttgtttgccctctctgtaggagctcgtcttctttagaacagttgccatctctgtcaagagtttgctaatgctatgttagatgagtttagtttggcttgcctattataccttatctggccttagctttttctatggaaatctgccttgaaatgtctgatccgtgattatgcaactctatctaaactactgttatgctgcaattctgtcaacttgtctgaccagcaagtctgatgaatgaacttctgtatagatgtgatatttgcttgtgctgaa

SEQ ID NO: 203670 - DNA, 4413 bp, Zea Mays
aaaagaccacatgtcaacaaatctgcctgtcctcgcacgtagtttagaagaaggtcgttccattcccttcctcagaggagagagaaagagagcgagcaagtctgggagggggaggcacagcagtcaggcaggcaggcaacgcccaccccccacagaggagagagagagagaaagaggcagcagagcacataaccaaacgacacccatccgaaaaccccgaaaggaggagggaaaagggtgagagaaaaccacgcagtcgcttgtccagacaaaacaagaacaagaacccaccagtacgcacttcctcctcctcctcctcctctctgcctctctctcctccctccctccgccagtccgctcccccctggcccatcagatccaattccttcccccgacccccgtcccggatccgccgcaattccttcctgcgtcgagctcgactgctccctctccctgcccgcaagaatcccgccgtggccggcggcttagtgggactcccaagtcgaagccaaggctggtggggggcgcgctcctgccgggcgtagcgggccatgggcgcgctgttgccgttcgtgcgtcgggtaaccagggccgtcaggctcagtccgctgcagcgcagcgccgaggatcggtgaggtaatttctcgtgaacgcattccgctattgactgctcgccctgtcgagcagattgagctatccaatatccatttagctcgacacagtgaagaactgaagatacacattgggcttgcttgtgttccgtctctctcaaacatcctgttggtgtgctgtgaaggtctgaaggtcacataatccacttggctatatgccggggtgggtaatgtgagtcgggcttgataaatgcagacttgttaacttgttttgcaacaagaatgggggcaaaagtagaacgggaaagttatatgcctggatattatgccacgggggatctcaatttggaaccaaatggtagatggtctccatactatgaggagatgacatcaaatgatcagttatgcaatggcttcacaacaaaaccaacaaatgactattcagaatttgacaaagaaatactcaagcatcaaatacttgaacatgaagctgtgtttagacaacaggtgtatgaactgcaccgagtttacaaaatacagaaggatatgatgaaacaacatcaaagcaaagaggtatattcatacccaactttggcagttgcatcacatacaaattcaccatcacaagtgccacaaaacggtgcaaagatgatgtggcagatgccagttcctccaatgtccacaacatacaggaaagctattggagagcataatgatacaaaccagtcctccatgaagttccttagagaaggcagtgtgcagtcctcaccaaatggatttatatcaagtgatgttggtccaagaagcagacaaggcacttttgaccttcaacttccagctgatcattatatagatgacgatggcacatcagataacaagcccatagatttccttggtttggcatcagatacaaaaccccggaatgatgctgagcttacattagttagtgcagaaggcttgggcaagttcagtgataatagttcatcctcgggtttgcagactacaaataatcttggaccccggcaggttaccgacctgaatgaatcaaatactggcttccatatgggtagagcaaatggatcagtttccagaggccttccgcgtacccttgagaactcatggaaccaaccaatattgagagcaaacacaactaatttcagtttcagtaaaaaacactccaaagaaaagcacacagatgaaggtacaagctcaaatttctttgacacaagtgtgaaaacaatacatgacgacaaaccatcaatcaataaaggtaaacaagtcagcagtgtaacttttttagcacccagatataatgatgctgaccccccaaaatacttcaaagctgttgatgggaggcctgccactgccagttataaccactttgtttaccaaggtcagaatagttcagttggatggattgcacaaagtcctctggaaccttctgttatcaataattttgctagagttgaccgtccacatcatttgaatatgggtacatttactgcccccgtctctattcctcaaatagacaatccttcaattgtctccccgatgggttcttgcacagcagacccaaggagcagcgttatcaataatcctgctttaattccaagattcaatgggttctcaactgtgaattcgtacaccagtcttagtgctgtgacgcagagcattggaacttcaatcccaaagctgataaatgtggataatgtagataaacgctatcgtggttttccacttgattcgttttccgtgtctcactcacgacatcaggtagcagtttcaagtaacctggagcaaaagaattcccagaagttggaagattcagatcaacagtcccatggcaagggtatgaagaacttcaatttgaatgagacactgtcagattgtcaggaagatggtcttgtagaacaagatgggagatgtgcttccagttttcagcatgataaagatggggggtcagtacttgggatctcttggctcaaaaaaaaacttatgtctgctgacccaacagctgtggagaagccagggaagatttttggacattcattgggaactgcaatagagctgaaaaatactaaagaccagaatgaaccagctgtgactattcggaatttgtcagattctgcttctacatctgttggctgtgcaattaagaaggataggccttcggataacattgttaccggaactctgcctgtctgtaataaagcccaagagggtgctacatgtttacctctttcgtgccagaagcatgtgcctaaagatggacaagccgctgaaggagccaccaagaaaagtggcgcccccatcaggaacttcatcgatctcaatgatgatgtaccaaatgatgacaattctgaggaatcagtagtgtcacacgaatgccacgtggaaccttcacggaacaaccatcctaaacgagcatttgtgattgatttagaggtgccggcctgtgaagaggacgcttcgtgggatattgatcaagaatgcgcgcagccgaaacctgatgcgtaccaggaagttgacgacggatctgatacatccgctctagctgcagccgagaacatcgtagcgttgtcaaggaatacgccaacagccgcagaggcatcggacgatacgttgcagtggtttgcagatctcgctgtattaaacatcaacgaccttgctgagcaagctgaactccaagcttgtacgaatgattccagtaactacgagtcggattcattcgagtccttgacactgaagctggaagagaccaagatcgacgatctctggagcaggccactggaacctgaaaccgcaaccgatgaacagacagtttcagctgctcaccttctcaccaagcccagaaggggccagcaaaggagacggcggcagaagcgagatttccagagagatgtcttgcctggcctttcgtcgctttcccggcctgagatcacagaggacgtccagttgctcgaggggttagtccaggcttccgggggatcctgggagtcgagcttgactaggcgaggacgttgtggtgggcgtgctagaggcaggaaacctcggaaaactgtagtaaccgtaattgtagaggaggaggaagaggaggaggtagaggttagcccaccgccaaaacctgctggcactggggaattggaagccgatggcaggggtatgatcgggtggggcagaacaacaaggcggtgtcgcagagcgagatgtccgtcaggtaacagcatggctactgcgtcttgagtgggagggtatttcttggcagcaagcattggacctgattaggtactgggtggttcacaattgttgtattgactccgatggatgggctggtggtataaggtgatcacactcatatgagtgtcggcctactggtctcagcacaactttcgtgcttttgggtcgaaacatggtttacgttcttataataagttcggtaaattagctggcgagacatttctgcgacagcattgtactaagctgttccaggttatgaggcccggtgccccggtatatattcattgtgagaaaaactgcaatgcatgtaaaccaccttgatctctgaagaatagctcatcacatgtgtaacaaaagggtgtgaatgaggctctgagcctgtattctttttgtagctgtatgccctgcctaattggcgctagtatccagcatgcgaattgctaatttagttttataccgtggatattgctcatatcgtgtcccaacgcttttcttccctatgggaatgcatatgccactgctatgtataaggcaaatactgtaattatttgttcaaatatttgcc

SEQ ID NO: 203671 - DNA, 4164 bp, Zea Mays
aaaagaccacatgtcaacaaatctgcctgtcctcgcacgtagtttagaagaaggtcgttccattcccttcctcagaggagagagaaagagagcgagcaagtctgggagggggaggcacagcagtcaggcaggcaggcaacgcccaccccccacagaggagagagagagagaaagaggcagcagagcacataaccaaacgacacccatccgaaaaccccgaaaggaggagggaaaagggtgagagaaaaccacgcagtcgcttgtccagacaaaacaagaacaagaacccaccagtacgcacttcctcctcctcctcctcctctctgcctctctctcctccctccctccgccagtccgctcccccctggcccatcagatccaattccttcccccgacccccgtcccggatccgccgcaattccttcctgcgtcgagctcgactgctccctctccctgcccgcaagaatcccgccgtggccggcggcttagtgggactcccaagtcgaagccaaggctggtggggggcgcgctcctgccgggcgtagcgggccatgggcgcgctgttgccgttcgtgcgtcgggtaaccagggccgtcaggctcagtccgctgcagcgcagcgccgaggatcgttttgcaacaagaatgggggcaaaagtagaacgggaaagttatatgcctggatattatgccacgggggatctcaatttggaaccaaatggtagatggtctccatactatgaggagatgacatcaaatgatcagttatgcaatggcttcacaacaaaaccaacaaatgactattcagaatttgacaaagaaatactcaagcatcaaatacttgaacatgaagctgtgtttagacaacaggtgtatgaactgcaccgagtttacaaaatacagaaggatatgatgaaacaacatcaaagcaaagaggtatattcatacccaactttggcagttgcatcacatacaaattcaccatcacaagtgccacaaaacggtgcaaagatgatgtggcagatgccagttcctccaatgtccacaacatacaggaaagctattggagagcataatgatacaaaccagtcctccatgaagttccttagagaaggcagtgtgcagtcctcaccaaatggatttatatcaagtgatgttggtccaagaagcagacaaggcacttttgaccttcaacttccagctgatcattatatagatgacgatggcacatcagataacaagcccatagatttccttggtttggcatcagatacaaaaccccggaatgatgctgagcttacattagttagtgcagaaggcttgggcaagttcagtgataatagttcatcctcgggtttgcagactacaaataatcttggaccccggcaggttaccgacctgaatgaatcaaatactggcttccatatgggtagagcaaatggatcagtttccagaggccttccgcgtacccttgagaactcatggaaccaaccaatattgagagcaaacacaactaatttcagtttcagtaaaaaacactccaaagaaaagcacacagatgaaggtacaagctcaaatttctttgacacaagtgtgaaaacaatacatgacgacaaaccatcaatcaataaaggtaaacaagtcagcagtgtaacttttttagcacccagatataatgatgctgaccccccaaaatacttcaaagctgttgatgggaggcctgccactgccagttataaccactttgtttaccaaggtcagaatagttcagttggatggattgcacaaagtcctctggaaccttctgttatcaataattttgctagagttgaccgtccacatcatttgaatatgggtacatttactgcccccgtctctattcctcaaatagacaatccttcaattgtctccccgatgggttcttgcacagcagacccaaggagcagcgttatcaataatcctgctttaattccaagattcaatgggttctcaactgtgaattcgtacaccagtcttagtgctgtgacgcagagcattggaacttcaatcccaaagctgataaatgtggataatgtagataaacgctatcgtggttttccacttgattcgttttccgtgtctcactcacgacatcaggtagcagtttcaagtaacctggagcaaaagaattcccagaagttggaagattcagatcaacagtcccatggcaagggtatgaagaacttcaatttgaatgagacactgtcagattgtcaggaagatggtcttgtagaacaagatgggagatgtgcttccagttttcagcatgataaagatggggggtcagtacttgggatctcttggctcaaaaaaaaacttatgtctgctgacccaacagctgtggagaagccagggaagatttttggacattcattgggaactgcaatagagctgaaaaatactaaagaccagaatgaaccagctgtgactattcggaatttgtcagattctgcttctacatctgttggctgtgcaattaagaaggataggccttcggataacattgttaccggaactctgcctgtctgtaataaagcccaagagggtgctacatgtttacctctttcgtgccagaagcatgtgcctaaagatggacaagccgctgaaggagccaccaagaaaagtggcgcccccatcaggaacttcatcgatctcaatgatgatgtaccaaatgatgacaattctgaggaatcagtagtgtcacacgaatgccacgtggaaccttcacggaacaaccatcctaaacgagcatttgtgattgatttagaggtgccggcctgtgaagaggacgcttcgtgggatattgatcaagaatgcgcgcagccgaaacctgatgcgtaccaggaagttgacgacggatctgatacatccgctctagctgcagccgagaacatcgtagcgttgtcaaggaatacgccaacagccgcagaggcatcggacgatacgttgcagtggtttgcagatctcgctgtattaaacatcaacgaccttgctgagcaagctgaactccaagcttgtacgaatgattccagtaactacgagtcggattcattcgagtccttgacactgaagctggaagagaccaagatcgacgatctctggagcaggccactggaacctgaaaccgcaaccgatgaacagacagtttcagctgctcaccttctcaccaagcccagaaggggccagcaaaggagacggcggcagaagcgagatttccagagagatgtcttgcctggcctttcgtcgctttcccggcctgagatcacagaggacgtccagttgctcgaggggttagtccaggcttccgggggatcctgggagtcgagcttgactaggcgaggacgttgtggtgggcgtgctagaggcaggaaacctcggaaaactgtagtaaccgtaattgtagaggaggaggaagaggaggaggtagaggttagcccaccgccaaaacctgctggcactggggaattggaagccgatggcaggggtatgatcgggtggggcagaacaacaaggcggtgtcgcagagcgagatgtccgtcaggtaacagcatggctactgcgtcttgagtgggagggtatttcttggcagcaagcattggacctgattaggtactgggtggttcacaattgttgtattgactccgatggatgggctggtggtataaggtgatcacactcatatgagtgtcggcctactggtctcagcacaactttcgtgcttttgggtcgaaacatggtttacgttcttataataagttcggtaaattagctggcgagacatttctgcgacagcattgtactaagctgttccaggttatgaggcccggtgccccggtatatattcattgtgagaaaaactgcaatgcatgtaaaccaccttgatctctgaagaatagctcatcacatgtgtaacaaaagggtgtgaatgaggctctgagcctgtattctttttgtagctgtatgccctgcctaattggcgctagtatccagcatgcgaattgctaatttagttttataccgtggatattgctcatatcgtgtcccaacgcttttcttccctatgggaatgcatatgccactgctatgtataaggcaaatactgtaattatttgttcaaatatttgcc

SEQ ID NO: 203672 - DNA, 4169 bp, Zea Mays
aaaagaccacatgtcaacaaatctgcctgtcctcgcacgtagtttagaagaaggtcgttccattcccttcctcagaggagagagaaagagagcgagcaagtctgggagggggaggcacagcagtcaggcaggcaggcaacgcccaccccccacagaggagagagagagagaaagaggcagcagagcacataaccaaacgacacccatccgaaaaccccgaaaggaggagggaaaagggtgagagaaaaccacgcagtcgcttgtccagacaaaacaagaacaagaacccaccagtacgcacttcctcctcctcctcctcctctctgcctctctctcctccctccctccgccagtccgctcccccctggcccatcagatccaattccttcccccgacccccgtcccggatccgccgcaattccttcctgcgtcgagctcgactgctccctctccctgcccgcaagaatcccgccgtggccggcggcttagtgggactcccaagtcgaagccaaggctggtggggggcgcgctcctgccgggcgtagcgggccatgggcgcgctgttgccgttcgtgcgtcgggtaaccagggccgtcaggctcagtccgctgcagcgcagcgccgaggatcggtgagttttgcaacaagaatgggggcaaaagtagaacgggaaagttatatgcctggatattatgccacgggggatctcaatttggaaccaaatggtagatggtctccatactatgaggagatgacatcaaatgatcagttatgcaatggcttcacaacaaaaccaacaaatgactattcagaatttgacaaagaaatactcaagcatcaaatacttgaacatgaagctgtgtttagacaacaggtgtatgaactgcaccgagtttacaaaatacagaaggatatgatgaaacaacatcaaagcaaagaggtatattcatacccaactttggcagttgcatcacatacaaattcaccatcacaagtgccacaaaacggtgcaaagatgatgtggcagatgccagttcctccaatgtccacaacatacaggaaagctattggagagcataatgatacaaaccagtcctccatgaagttccttagagaaggcagtgtgcagtcctcaccaaatggatttatatcaagtgatgttggtccaagaagcagacaaggcacttttgaccttcaacttccagctgatcattatatagatgacgatggcacatcagataacaagcccatagatttccttggtttggcatcagatacaaaaccccggaatgatgctgagcttacattagttagtgcagaaggcttgggcaagttcagtgataatagttcatcctcgggtttgcagactacaaataatcttggaccccggcaggttaccgacctgaatgaatcaaatactggcttccatatgggtagagcaaatggatcagtttccagaggccttccgcgtacccttgagaactcatggaaccaaccaatattgagagcaaacacaactaatttcagtttcagtaaaaaacactccaaagaaaagcacacagatgaaggtacaagctcaaatttctttgacacaagtgtgaaaacaatacatgacgacaaaccatcaatcaataaaggtaaacaagtcagcagtgtaacttttttagcacccagatataatgatgctgaccccccaaaatacttcaaagctgttgatgggaggcctgccactgccagttataaccactttgtttaccaaggtcagaatagttcagttggatggattgcacaaagtcctctggaaccttctgttatcaataattttgctagagttgaccgtccacatcatttgaatatgggtacatttactgcccccgtctctattcctcaaatagacaatccttcaattgtctccccgatgggttcttgcacagcagacccaaggagcagcgttatcaataatcctgctttaattccaagattcaatgggttctcaactgtgaattcgtacaccagtcttagtgctgtgacgcagagcattggaacttcaatcccaaagctgataaatgtggataatgtagataaacgctatcgtggttttccacttgattcgttttccgtgtctcactcacgacatcaggtagcagtttcaagtaacctggagcaaaagaattcccagaagttggaagattcagatcaacagtcccatggcaagggtatgaagaacttcaatttgaatgagacactgtcagattgtcaggaagatggtcttgtagaacaagatgggagatgtgcttccagttttcagcatgataaagatggggggtcagtacttgggatctcttggctcaaaaaaaaacttatgtctgctgacccaacagctgtggagaagccagggaagatttttggacattcattgggaactgcaatagagctgaaaaatactaaagaccagaatgaaccagctgtgactattcggaatttgtcagattctgcttctacatctgttggctgtgcaattaagaaggataggccttcggataacattgttaccggaactctgcctgtctgtaataaagcccaagagggtgctacatgtttacctctttcgtgccagaagcatgtgcctaaagatggacaagccgctgaaggagccaccaagaaaagtggcgcccccatcaggaacttcatcgatctcaatgatgatgtaccaaatgatgacaattctgaggaatcagtagtgtcacacgaatgccacgtggaaccttcacggaacaaccatcctaaacgagcatttgtgattgatttagaggtgccggcctgtgaagaggacgcttcgtgggatattgatcaagaatgcgcgcagccgaaacctgatgcgtaccaggaagttgacgacggatctgatacatccgctctagctgcagccgagaacatcgtagcgttgtcaaggaatacgccaacagccgcagaggcatcggacgatacgttgcagtggtttgcagatctcgctgtattaaacatcaacgaccttgctgagcaagctgaactccaagcttgtacgaatgattccagtaactacgagtcggattcattcgagtccttgacactgaagctggaagagaccaagatcgacgatctctggagcaggccactggaacctgaaaccgcaaccgatgaacagacagtttcagctgctcaccttctcaccaagcccagaaggggccagcaaaggagacggcggcagaagcgagatttccagagagatgtcttgcctggcctttcgtcgctttcccggcctgagatcacagaggacgtccagttgctcgaggggttagtccaggcttccgggggatcctgggagtcgagcttgactaggcgaggacgttgtggtgggcgtgctagaggcaggaaacctcggaaaactgtagtaaccgtaattgtagaggaggaggaagaggaggaggtagaggttagcccaccgccaaaacctgctggcactggggaattggaagccgatggcaggggtatgatcgggtggggcagaacaacaaggcggtgtcgcagagcgagatgtccgtcaggtaacagcatggctactgcgtcttgagtgggagggtatttcttggcagcaagcattggacctgattaggtactgggtggttcacaattgttgtattgactccgatggatgggctggtggtataaggtgatcacactcatatgagtgtcggcctactggtctcagcacaactttcgtgcttttgggtcgaaacatggtttacgttcttataataagttcggtaaattagctggcgagacatttctgcgacagcattgtactaagctgttccaggttatgaggcccggtgccccggtatatattcattgtgagaaaaactgcaatgcatgtaaaccaccttgatctctgaagaatagctcatcacatgtgtaacaaaagggtgtgaatgaggctctgagcctgtattctttttgtagctgtatgccctgcctaattggcgctagtatccagcatgcgaattgctaatttagttttataccgtggatattgctcatatcgtgtcccaacgcttttcttccctatgggaatgcatatgccactgctatgtataaggcaaatactgtaattatttgttcaaatatttgcc

SEQ ID NO: 203673 - DNA, 4193 bp, Zea Mays
aaaagaccacatgtcaacaaatctgcctgtcctcgcacgtagtttagaagaaggtcgttccattcccttcctcagaggagagagaaagagagcgagcaagtctgggagggggaggcacagcagtcaggcaggcaggcaacgcccaccccccacagaggagagagagagagaaagaggcagcagagcacataaccaaacgacacccatccgaaaaccccgaaaggaggagggaaaagggtgagagaaaaccacgcagtcgcttgtccagacaaaacaagaacaagaacccaccagtacgcacttcctcctcctcctcctcctctctgcctctctctcctccctccctccgccagtccgctcccccctggcccatcagatccaattccttcccccgacccccgtcccggatccgccgcaattccttcctgcgtcgagctcgactgctccctctccctgcccgcaagaatcccgccgtggccggcggcttagtgggactcccaagtcgaagccaaggctggtggggggcgcgctcctgccgggcgtagcgggccatgggcgcgctgttgccgttcgtgcgtcgggtaaccagggccgtcaggctcagtccgctgcagcgcagcgccgaggatcggtgagttttgcaacaagaatgggggcaaaagtagaacgggaaagttatatgcctggatattatgccacgggggatctcaatttggaaccaaatggtagatggtctccatactatgaggagatgacatcaaatgatcagttatgcaatggcttcacaacaaaaccaacaaatgactattcagaatttgacaaagaaatactcaagcatcaaatacttgaacatgaagctgtgtttagacaacagcctcacaacccactcgctatccaggtgtatgaactgcaccgagtttacaaaatacagaaggatatgatgaaacaacatcaaagcaaagaggtatattcatacccaactttggcagttgcatcacatacaaattcaccatcacaagtgccacaaaacggtgcaaagatgatgtggcagatgccagttcctccaatgtccacaacatacaggaaagctattggagagcataatgatacaaaccagtcctccatgaagttccttagagaaggcagtgtgcagtcctcaccaaatggatttatatcaagtgatgttggtccaagaagcagacaaggcacttttgaccttcaacttccagctgatcattatatagatgacgatggcacatcagataacaagcccatagatttccttggtttggcatcagatacaaaaccccggaatgatgctgagcttacattagttagtgcagaaggcttgggcaagttcagtgataatagttcatcctcgggtttgcagactacaaataatcttggaccccggcaggttaccgacctgaatgaatcaaatactggcttccatatgggtagagcaaatggatcagtttccagaggccttccgcgtacccttgagaactcatggaaccaaccaatattgagagcaaacacaactaatttcagtttcagtaaaaaacactccaaagaaaagcacacagatgaaggtacaagctcaaatttctttgacacaagtgtgaaaacaatacatgacgacaaaccatcaatcaataaaggtaaacaagtcagcagtgtaacttttttagcacccagatataatgatgctgaccccccaaaatacttcaaagctgttgatgggaggcctgccactgccagttataaccactttgtttaccaaggtcagaatagttcagttggatggattgcacaaagtcctctggaaccttctgttatcaataattttgctagagttgaccgtccacatcatttgaatatgggtacatttactgcccccgtctctattcctcaaatagacaatccttcaattgtctccccgatgggttcttgcacagcagacccaaggagcagcgttatcaataatcctgctttaattccaagattcaatgggttctcaactgtgaattcgtacaccagtcttagtgctgtgacgcagagcattggaacttcaatcccaaagctgataaatgtggataatgtagataaacgctatcgtggttttccacttgattcgttttccgtgtctcactcacgacatcaggtagcagtttcaagtaacctggagcaaaagaattcccagaagttggaagattcagatcaacagtcccatggcaagggtatgaagaacttcaatttgaatgagacactgtcagattgtcaggaagatggtcttgtagaacaagatgggagatgtgcttccagttttcagcatgataaagatggggggtcagtacttgggatctcttggctcaaaaaaaaacttatgtctgctgacccaacagctgtggagaagccagggaagatttttggacattcattgggaactgcaatagagctgaaaaatactaaagaccagaatgaaccagctgtgactattcggaatttgtcagattctgcttctacatctgttggctgtgcaattaagaaggataggccttcggataacattgttaccggaactctgcctgtctgtaataaagcccaagagggtgctacatgtttacctctttcgtgccagaagcatgtgcctaaagatggacaagccgctgaaggagccaccaagaaaagtggcgcccccatcaggaacttcatcgatctcaatgatgatgtaccaaatgatgacaattctgaggaatcagtagtgtcacacgaatgccacgtggaaccttcacggaacaaccatcctaaacgagcatttgtgattgatttagaggtgccggcctgtgaagaggacgcttcgtgggatattgatcaagaatgcgcgcagccgaaacctgatgcgtaccaggaagttgacgacggatctgatacatccgctctagctgcagccgagaacatcgtagcgttgtcaaggaatacgccaacagccgcagaggcatcggacgatacgttgcagtggtttgcagatctcgctgtattaaacatcaacgaccttgctgagcaagctgaactccaagcttgtacgaatgattccagtaactacgagtcggattcattcgagtccttgacactgaagctggaagagaccaagatcgacgatctctggagcaggccactggaacctgaaaccgcaaccgatgaacagacagtttcagctgctcaccttctcaccaagcccagaaggggccagcaaaggagacggcggcagaagcgagatttccagagagatgtcttgcctggcctttcgtcgctttcccggcctgagatcacagaggacgtccagttgctcgaggggttagtccaggcttccgggggatcctgggagtcgagcttgactaggcgaggacgttgtggtgggcgtgctagaggcaggaaacctcggaaaactgtagtaaccgtaattgtagaggaggaggaagaggaggaggtagaggttagcccaccgccaaaacctgctggcactggggaattggaagccgatggcaggggtatgatcgggtggggcagaacaacaaggcggtgtcgcagagcgagatgtccgtcaggtaacagcatggctactgcgtcttgagtgggagggtatttcttggcagcaagcattggacctgattaggtactgggtggttcacaattgttgtattgactccgatggatgggctggtggtataaggtgatcacactcatatgagtgtcggcctactggtctcagcacaactttcgtgcttttgggtcgaaacatggtttacgttcttataataagttcggtaaattagctggcgagacatttctgcgacagcattgtactaagctgttccaggttatgaggcccggtgccccggtatatattcattgtgagaaaaactgcaatgcatgtaaaccaccttgatctctgaagaatagctcatcacatgtgtaacaaaagggtgtgaatgaggctctgagcctgtattctttttgtagctgtatgccctgcctaattggcgctagtatccagcatgcgaattgctaatttagttttataccgtggatattgctcatatcgtgtcccaacgcttttcttccctatgggaatgcatatgccactgctatgtataaggcaaatactgtaattatttgttcaaatatttgcc

SEQ ID NO: 203674 - DNA, 3827 bp, Zea Mays
tttctgcctttttcctcctcctcctcctcttcttctttgagccgtccaaggtaatttctcgtgaacgcattccgctattgactgctcgccctgtcgagcagattgagctatccaatatccatttagctcgacacagtgaagaactgaagatacacattgggcttgcttgtgttccgtctctctcaaacatcctgttggtgtgctgtgaaggtctgaaggtcacataatccacttggctatatgccggggtgggtaatgtgagtcgggcttgataaatgcagacttgttaacttgttttgcaacaagaatgggggcaaaagtagaacgggaaagttatatgcctggatattatgccacgggggatctcaatttggaaccaaatggtagatggtctccatactatgaggagatgacatcaaatgatcagttatgcaatggcttcacaacaaaaccaacaaatgactattcagaatttgacaaagaaatactcaagcatcaaatacttgaacatgaagctgtgtttagacaacaggtgtatgaactgcaccgagtttacaaaatacagaaggatatgatgaaacaacatcaaagcaaagaggtatattcatacccaactttggcagttgcatcacatacaaattcaccatcacaagtgccacaaaacggtgcaaagatgatgtggcagatgccagttcctccaatgtccacaacatacaggaaagctattggagagcataatgatacaaaccagtcctccatgaagttccttagagaaggcagtgtgcagtcctcaccaaatggatttatatcaagtgatgttggtccaagaagcagacaaggcacttttgaccttcaacttccagctgatcattatatagatgacgatggcacatcagataacaagcccatagatttccttggtttggcatcagatacaaaaccccggaatgatgctgagcttacattagttagtgcagaaggcttgggcaagttcagtgataatagttcatcctcgggtttgcagactacaaataatcttggaccccggcaggttaccgacctgaatgaatcaaatactggcttccatatgggtagagcaaatggatcagtttccagaggccttccgcgtacccttgagaactcatggaaccaaccaatattgagagcaaacacaactaatttcagtttcagtaaaaaacactccaaagaaaagcacacagatgaaggtacaagctcaaatttctttgacacaagtgtgaaaacaatacatgacgacaaaccatcaatcaataaaggtaaacaagtcagcagtgtaacttttttagcacccagatataatgatgctgaccccccaaaatacttcaaagctgttgatgggaggcctgccactgccagttataaccactttgtttaccaaggtcagaatagttcagttggatggattgcacaaagtcctctggaaccttctgttatcaataattttgctagagttgaccgtccacatcatttgaatatgggtacatttactgcccccgtctctattcctcaaatagacaatccttcaattgtctccccgatgggttcttgcacagcagacccaaggagcagcgttatcaataatcctgctttaattccaagattcaatgggttctcaactgtgaattcgtacaccagtcttagtgctgtgacgcagagcattggaacttcaatcccaaagctgataaatgtggataatgtagataaacgctatcgtggttttccacttgattcgttttccgtgtctcactcacgacatcaggtagcagtttcaagtaacctggagcaaaagaattcccagaagttggaagattcagatcaacagtcccatggcaagggtatgaagaacttcaatttgaatgagacactgtcagattgtcaggaagatggtcttgtagaacaagatgggagatgtgcttccagttttcagcatgataaagatggggggtcagtacttgggatctcttggctcaaaaaaaaacttatgtctgctgacccaacagctgtggagaagccagggaagatttttggacattcattgggaactgcaatagagctgaaaaatactaaagaccagaatgaaccagctgtgactattcggaatttgtcagattctgcttctacatctgttggctgtgcaattaagaaggataggccttcggataacattgttaccggaactctgcctgtctgtaataaagcccaagagggtgctacatgtttacctctttcgtgccagaagcatgtgcctaaagatggacaagccgctgaaggagccaccaagaaaagtggcgcccccatcaggaacttcatcgatctcaatgatgatgtaccaaatgatgacaattctgaggaatcagtagtgtcacacgaatgccacgtggaaccttcacggaacaaccatcctaaacgagcatttgtgattgatttagaggtgccggcctgtgaagaggacgcttcgtgggatattgatcaagaatgcgcgcagccgaaacctgatgcgtaccaggaagttgacgacggatctgatacatccgctctagctgcagccgagaacatcgtagcgttgtcaaggaatacgccaacagccgcagaggcatcggacgatacgttgcagtggtttgcagatctcgctgtattaaacatcaacgaccttgctgagcaagctgaactccaagcttgtacgaatgattccagtaactacgagtcggattcattcgagtccttgacactgaagctggaagagaccaagatcgacgatctctggagcaggccactggaacctgaaaccgcaaccgatgaacagacagtttcagctgctcaccttctcaccaagcccagaaggggccagcaaaggagacggcggcagaagcgagatttccagagagatgtcttgcctggcctttcgtcgctttcccggcctgagatcacagaggacgtccagttgctcgaggggttagtccaggcttccgggggatcctgggagtcgagcttgactaggcgaggacgttgtggtgggcgtgctagaggcaggaaacctcggaaaactgtagtaaccgtaattgtagaggaggaggaagaggaggaggtagaggttagcccaccgccaaaacctgctggcactggggaattggaagccgatggcaggggtatgatcgggtggggcagaacaacaaggcggtgtcgcagagcgagatgtccgtcaggtaacagcatggctactgcgtcttgagtgggagggtatttcttggcagcaagcattggacctgattaggtactgggtggttcacaattgttgtattgactccgatggatgggctggtggtataaggtgatcacactcatatgagtgtcggcctactggtctcagcacaactttcgtgcttttgggtcgaaacatggtttacgttcttataataagttcggtaaattagctggcgagacatttctgcgacagcattgtactaagctgttccaggttatgaggcccggtgccccggtatatattcattgtgagaaaaactgcaatgcatgtaaaccaccttgatctctgaagaatagctcatcacatgtgtaacaaaagggtgtgaatgaggctctgagcctgtattctttttgtagctgtatgccctgcctaattggcgctagtatccagcatgcgaattgctaatttagttttataccgtggatattgctcatatcgtgtcccaacgcttttcttccctatgggaatgcatatgccactgctatgtataaggcaaatactgtaattatttgttcaaatatttgcc

SEQ ID NO: 203675 - DNA, 4131 bp, Zea Mays
tcttcttctttgagccgtccaaggtcccgttttttttcctttttcttttctgctgtaattacttcatgtgtcaaatttgggttcgattgacggcacgaagctgatgattgcatctagccttcgcagcctttcggtttccgcgtttggtcggcttcttgggatttattattattattattatcaagtgcgttgaaccgtcgggtgctgacttgtcttctcccctccagttccttcctgtctcgcgagttgacatccgaacggcttcacaggaatatatttgagccttctgtcctgtttcttttgatcttctgtatgtttgcttcattatggaaaggggtcgtgtgtttccatgttgcgttttgtgtgtggtacgtacaacgcattgggccgtcttggttcctagatcttttaccttactcacttcagtgtctcaatcatttaacgggcaggtaatttctcgtgaacgcattccgctattgactgctcgccctgtcgagcagattgagctatccaatatccatttagctcgacacagtgaagaactgaagatacacattgggcttgcttgtgttccgtctctctcaaacatcctgttggtgtgctgtgaaggtctgaaggtcacataatccacttggctatatgccggggtgggtaatgtgagtcgggcttgataaatgcagacttgttaacttgttttgcaacaagaatgggggcaaaagtagaacgggaaagttatatgcctggatattatgccacgggggatctcaatttggaaccaaatggtagatggtctccatactatgaggagatgacatcaaatgatcagttatgcaatggcttcacaacaaaaccaacaaatgactattcagaatttgacaaagaaatactcaagcatcaaatacttgaacatgaagctgtgtttagacaacagcctcacaacccactcgctatccaggtgtatgaactgcaccgagtttacaaaatacagaaggatatgatgaaacaacatcaaagcaaagaggaaagctattggagagcataatgatacaaaccagtcctccatgaagttccttagagaaggcagtgtgcagtcctcaccaaatggatttatatcaagtgatgttggtccaagaagcagacaaggcacttttgaccttcaacttccagctgatcattatatagatgacgatggcacatcagataacaagcccatagatttccttggtttggcatcagatacaaaaccccggaatgatgctgagcttacattagttagtgcagaaggcttgggcaagttcagtgataatagttcatcctcgggtttgcagactacaaataatcttggaccccggcaggttaccgacctgaatgaatcaaatactggcttccatatgggtagagcaaatggatcagtttccagaggccttccgcgtacccttgagaactcatggaaccaaccaatattgagagcaaacacaactaatttcagtttcagtaaaaaacactccaaagaaaagcacacagatgaaggtacaagctcaaatttctttgacacaagtgtgaaaacaatacatgacgacaaaccatcaatcaataaaggtaaacaagtcagcagtgtaacttttttagcacccagatataatgatgctgaccccccaaaatacttcaaagctgttgatgggaggcctgccactgccagttataaccactttgtttaccaaggtcagaatagttcagttggatggattgcacaaagtcctctggaaccttctgttatcaataattttgctagagttgaccgtccacatcatttgaatatgggtacatttactgcccccgtctctattcctcaaatagacaatccttcaattgtctccccgatgggttcttgcacagcagacccaaggagcagcgttatcaataatcctgctttaattccaagattcaatgggttctcaactgtgaattcgtacaccagtcttagtgctgtgacgcagagcattggaacttcaatcccaaagctgataaatgtggataatgtagataaacgctatcgtggttttccacttgattcgttttccgtgtctcactcacgacatcaggtagcagtttcaagtaacctggagcaaaagaattcccagaagttggaagattcagatcaacagtcccatggcaagggtatgaagaacttcaatttgaatgagacactgtcagattgtcaggaagatggtcttgtagaacaagatgggagatgtgcttccagttttcagcatgataaagatggggggtcagtacttgggatctcttggctcaaaaaaaaacttatgtctgctgacccaacagctgtggagaagccagggaagatttttggacattcattgggaactgcaatagagctgaaaaatactaaagaccagaatgaaccagctgtgactattcggaatttgtcagattctgcttctacatctgttggctgtgcaattaagaaggataggccttcggataacattgttaccggaactctgcctgtctgtaataaagcccaagagggtgctacatgtttacctctttcgtgccagaagcatgtgcctaaagatggacaagccgctgaaggagccaccaagaaaagtggcgcccccatcaggaacttcatcgatctcaatgatgatgtaccaaatgatgacaattctgaggaatcagtagtgtcacacgaatgccacgtggaaccttcacggaacaaccatcctaaacgagcatttgtgattgatttagaggtgccggcctgtgaagaggacgcttcgtgggatattgatcaagaatgcgcgcagccgaaacctgatgcgtaccaggaagttgacgacggatctgatacatccgctctagctgcagccgagaacatcgtagcgttgtcaaggaatacgccaacagccgcagaggcatcggacgatacgttgcagtggtttgcagatctcgctgtattaaacatcaacgaccttgctgagcaagctgaactccaagcttgtacgaatgattccagtaactacgagtcggattcattcgagtccttgacactgaagctggaagagaccaagatcgacgatctctggagcaggccactggaacctgaaaccgcaaccgatgaacagacagtttcagctgctcaccttctcaccaagcccagaaggggccagcaaaggagacggcggcagaagcgagatttccagagagatgtcttgcctggcctttcgtcgctttcccggcctgagatcacagaggacgtccagttgctcgaggggttagtccaggcttccgggggatcctgggagtcgagcttgactaggcgaggacgttgtggtgggcgtgctagaggcaggaaacctcggaaaactgtagtaaccgtaattgtagaggaggaggaagaggaggaggtagaggttagcccaccgccaaaacctgctggcactggggaattggaagccgatggcaggggtatgatcgggtggggcagaacaacaaggcggtgtcgcagagcgagatgtccgtcaggtaacagcatggctactgcgtcttgagtgggagggtatttcttggcagcaagcattggacctgattaggtactgggtggttcacaattgttgtattgactccgatggatgggctggtggtataaggtgatcacactcatatgagtgtcggcctactggtctcagcacaactttcgtgcttttgggtcgaaacatggtttacgttcttataataagttcggtaaattagctggcgagacatttctgcgacagcattgtactaagctgttccaggttatgaggcccggtgccccggtatatattcattgtgagaaaaactgcaatgcatgtaaaccaccttgatctctgaagaatagctcatcacatgtgtaacaaaagggtgtgaatgaggctctgagcctgtattctttttgtagctgtatgccctgcctaattggcgctagtatccagcatgcgaattgctaatttagttttataccgtggatattgctcatatcgtgtcccaacgcttttcttccctatgggaatgcatatgccactgctatgtataaggcaaatactgtaattatttgttcaaatatttgcc

SEQ ID NO: 203676 - DNA, 4145 bp, Zea Mays
tcttcttctttgagccgtccaaggtcccgttttttttcctttttcttttctgctgtaattacttcatgtgtcaaatttgggttcgattgacggcacgaagctgatgattgcatctagccttcgcagcctttcggtttccgcgtttggtcggcttcttgggatttattattattattattatcaagtgcgttgaaccgtcgggtgctgacttgtcttctcccctccagttccttcctgtctcgcgagttgacatccgaacggcttcacaggaatatatttgagccttctgtcctgtttcttttgatcttctgtatgtttgcttcattatggaaaggggtcgtgtgtttccatgttgcgttttgtgtgtggtaatttctcgtgaacgcattccgctattgactgctcgccctgtcgagcagattgagctatccaatatccatttagctcgacacagtgaagaactgaagatacacattgggcttgcttgtgttccgtctctctcaaacatcctgttggtgtgctgtgaaggtctgaaggtcacataatccacttggctatatgccggggtgggtaatgtgagtcgggcttgataaatgcagacttgttaacttgttttgcaacaagaatgggggcaaaagtagaacgggaaagttatatgcctggatattatgccacgggggatctcaatttggaaccaaatggtagatggtctccatactatgaggagatgacatcaaatgatcagttatgcaatggcttcacaacaaaaccaacaaatgactattcagaatttgacaaagaaatactcaagcatcaaatacttgaacatgaagctgtgtttagacaacaggtgtatgaactgcaccgagtttacaaaatacagaaggatatgatgaaacaacatcaaagcaaagaggtatattcatacccaactttggcagttgcatcacatacaaattcaccatcacaagtgccacaaaacggtgcaaagatgatgtggcagatgccagttcctccaatgtccacaacatacaggaaagctattggagagcataatgatacaaaccagtcctccatgaagttccttagagaaggcagtgtgcagtcctcaccaaatggatttatatcaagtgatgttggtccaagaagcagacaaggcacttttgaccttcaacttccagctgatcattatatagatgacgatggcacatcagataacaagcccatagatttccttggtttggcatcagatacaaaaccccggaatgatgctgagcttacattagttagtgcagaaggcttgggcaagttcagtgataatagttcatcctcgggtttgcagactacaaataatcttggaccccggcaggttaccgacctgaatgaatcaaatactggcttccatatgggtagagcaaatggatcagtttccagaggccttccgcgtacccttgagaactcatggaaccaaccaatattgagagcaaacacaactaatttcagtttcagtaaaaaacactccaaagaaaagcacacagatgaaggtacaagctcaaatttctttgacacaagtgtgaaaacaatacatgacgacaaaccatcaatcaataaaggtaaacaagtcagcagtgtaacttttttagcacccagatataatgatgctgaccccccaaaatacttcaaagctgttgatgggaggcctgccactgccagttataaccactttgtttaccaaggtcagaatagttcagttggatggattgcacaaagtcctctggaaccttctgttatcaataattttgctagagttgaccgtccacatcatttgaatatgggtacatttactgcccccgtctctattcctcaaatagacaatccttcaattgtctccccgatgggttcttgcacagcagacccaaggagcagcgttatcaataatcctgctttaattccaagattcaatgggttctcaactgtgaattcgtacaccagtcttagtgctgtgacgcagagcattggaacttcaatcccaaagctgataaatgtggataatgtagataaacgctatcgtggttttccacttgattcgttttccgtgtctcactcacgacatcaggtagcagtttcaagtaacctggagcaaaagaattcccagaagttggaagattcagatcaacagtcccatggcaagggtatgaagaacttcaatttgaatgagacactgtcagattgtcaggaagatggtcttgtagaacaagatgggagatgtgcttccagttttcagcatgataaagatggggggtcagtacttgggatctcttggctcaaaaaaaaacttatgtctgctgacccaacagctgtggagaagccagggaagatttttggacattcattgggaactgcaatagagctgaaaaatactaaagaccagaatgaaccagctgtgactattcggaatttgtcagattctgcttctacatctgttggctgtgcaattaagaaggataggccttcggataacattgttaccggaactctgcctgtctgtaataaagcccaagagggtgctacatgtttacctctttcgtgccagaagcatgtgcctaaagatggacaagccgctgaaggagccaccaagaaaagtggcgcccccatcaggaacttcatcgatctcaatgatgatgtaccaaatgatgacaattctgaggaatcagtagtgtcacacgaatgccacgtggaaccttcacggaacaaccatcctaaacgagcatttgtgattgatttagaggtgccggcctgtgaagaggacgcttcgtgggatattgatcaagaatgcgcgcagccgaaacctgatgcgtaccaggaagttgacgacggatctgatacatccgctctagctgcagccgagaacatcgtagcgttgtcaaggaatacgccaacagccgcagaggcatcggacgatacgttgcagtggtttgcagatctcgctgtattaaacatcaacgaccttgctgagcaagctgaactccaagcttgtacgaatgattccagtaactacgagtcggattcattcgagtccttgacactgaagctggaagagaccaagatcgacgatctctggagcaggccactggaacctgaaaccgcaaccgatgaacagacagtttcagctgctcaccttctcaccaagcccagaaggggccagcaaaggagacggcggcagaagcgagatttccagagagatgtcttgcctggcctttcgtcgctttcccggcctgagatcacagaggacgtccagttgctcgaggggttagtccaggcttccgggggatcctgggagtcgagcttgactaggcgaggacgttgtggtgggcgtgctagaggcaggaaacctcggaaaactgtagtaaccgtaattgtagaggaggaggaagaggaggaggtagaggttagcccaccgccaaaacctgctggcactggggaattggaagccgatggcaggggtatgatcgggtggggcagaacaacaaggcggtgtcgcagagcgagatgtccgtcaggtaacagcatggctactgcgtcttgagtgggagggtatttcttggcagcaagcattggacctgattaggtactgggtggttcacaattgttgtattgactccgatggatgggctggtggtataaggtgatcacactcatatgagtgtcggcctactggtctcagcacaactttcgtgcttttgggtcgaaacatggtttacgttcttataataagttcggtaaattagctggcgagacatttctgcgacagcattgtactaagctgttccaggttatgaggcccggtgccccggtatatattcattgtgagaaaaactgcaatgcatgtaaaccaccttgatctctgaagaatagctcatcacatgtgtaacaaaagggtgtgaatgaggctctgagcctgtattctttttgtagctgtatgccctgcctaattggcgctagtatccagcatgcgaattgctaatttagttttataccgtggatattgctcatatcgtgtcccaacgcttttcttccctatgggaatgcatatgccactgctatgtataaggcaaatactgtaattatttgttcaaatatttgcc

SEQ ID NO: 203677 - DNA, 3675 bp, Zea Mays
tgcatatactctcagtaatcatcactaaatttatcaggacttaggagttggtgttctcttgtaagctgccaatttatttgtttcttatgtcaacctatgaataatgcacacttgtcttcttccacaattaggccattattgcagaatcttttctgtgatctattgtatttattattccattgagggtttgattcactggtctcttgcacagttttgcaacaagaatgggggcaaaagtagaacgggaaagttatatgcctggatattatgccacgggggatctcaatttggaaccaaatggtagatggtctccatactatgaggagatgacatcaaatgatcagttatgcaatggcttcacaacaaaaccaacaaatgactattcagaatttgacaaagaaatactcaagcatcaaatacttgaacatgaagctgtgtttagacaacaggtgtatgaactgcaccgagtttacaaaatacagaaggatatgatgaaacaacatcaaagcaaagaggtatattcatacccaactttggcagttgcatcacatacaaattcaccatcacaagtgccacaaaacggtgcaaagatgatgtggcagatgccagttcctccaatgtccacaacatacaggaaagctattggagagcataatgatacaaaccagtcctccatgaagttccttagagaaggcagtgtgcagtcctcaccaaatggatttatatcaagtgatgttggtccaagaagcagacaaggcacttttgaccttcaacttccagctgatcattatatagatgacgatggcacatcagataacaagcccatagatttccttggtttggcatcagatacaaaaccccggaatgatgctgagcttacattagttagtgcagaaggcttgggcaagttcagtgataatagttcatcctcgggtttgcagactacaaataatcttggaccccggcaggttaccgacctgaatgaatcaaatactggcttccatatgggtagagcaaatggatcagtttccagaggccttccgcgtacccttgagaactcatggaaccaaccaatattgagagcaaacacaactaatttcagtttcagtaaaaaacactccaaagaaaagcacacagatgaaggtaaacaagtcagcagtgtaacttttttagcacccagatataatgatgctgaccccccaaaatacttcaaagctgttgatgggaggcctgccactgccagttataaccactttgtttaccaaggtcagaatagttcagttggatggattgcacaaagtcctctggaaccttctgttatcaataattttgctagagttgaccgtccacatcatttgaatatgggtacatttactgcccccgtctctattcctcaaatagacaatccttcaattgtctccccgatgggttcttgcacagcagacccaaggagcagcgttatcaataatcctgctttaattccaagattcaatgggttctcaactgtgaattcgtacaccagtcttagtgctgtgacgcagagcattggaacttcaatcccaaagctgataaatgtggataatgtagataaacgctatcgtggttttccacttgattcgttttccgtgtctcactcacgacatcaggtagcagtttcaagtaacctggagcaaaagaattcccagaagttggaagattcagatcaacagtcccatggcaagggtatgaagaacttcaatttgaatgagacactgtcagattgtcaggaagatggtcttgtagaacaagatgggagatgtgcttccagttttcagcatgataaagatggggggtcagtacttgggatctcttggctcaaaaaaaaacttatgtctgctgacccaacagctgtggagaagccagggaagatttttggacattcattgggaactgcaatagagctgaaaaatactaaagaccagaatgaaccagctgtgactattcggaatttgtcagattctgcttctacatctgttggctgtgcaattaagaaggataggccttcggataacattgttaccggaactctgcctgtctgtaataaagcccaagagggtgctacatgtttacctctttcgtgccagaagcatgtgcctaaagatggacaagccgctgaaggagccaccaagaaaagtggcgcccccatcaggaacttcatcgatctcaatgatgatgtaccaaatgatgacaattctgaggaatcagtagtgtcacacgaatgccacgtggaaccttcacggaacaaccatcctaaacgagcatttgtgattgatttagaggtgccggcctgtgaagaggacgcttcgtgggatattgatcaagaatgcgcgcagccgaaacctgatgcgtaccaggaagttgacgacggatctgatacatccgctctagctgcagccgagaacatcgtagcgttgtcaaggaatacgccaacagccgcagaggcatcggacgatacgttgcagtggtttgcagatctcgctgtattaaacatcaacgaccttgctgagcaagctgaactccaagcttgtacgaatgattccagtaactacgagtcggattcattcgagtccttgacactgaagctggaagagaccaagatcgacgatctctggagcaggccactggaacctgaaaccgcaaccgatgaacagacagtttcagctgctcaccttctcaccaagcccagaaggggccagcaaaggagacggcggcagaagcgagatttccagagagatgtcttgcctggcctttcgtcgctttcccggcctgagatcacagaggacgtccagttgctcgaggggttagtccaggcttccgggggatcctgggagtcgagcttgactaggcgaggacgttgtggtgggcgtgctagaggcaggaaacctcggaaaactgtagtaaccgtaattgtagaggaggaggaagaggaggaggtagaggttagcccaccgccaaaacctgctggcactggggaattggaagccgatggcaggggtatgatcgggtggggcagaacaacaaggcggtgtcgcagagcgagatgtccgtcaggtaacagcatggctactgcgtcttgagtgggagggtatttcttggcagcaagcattggacctgattaggtactgggtggttcacaattgttgtattgactccgatggatgggctggtggtataaggtgatcacactcatatgagtgtcggcctactggtctcagcacaactttcgtgcttttgggtcgaaacatggtttacgttcttataataagttcggtaaattagctggcgagacatttctgcgacagcattgtactaagctgttccaggttatgaggcccggtgccccggtatatattcattgtgagaaaaactgcaatgcatgtaaaccaccttgatctctgaagaatagctcatcacatgtgtaacaaaagggtgtgaatgaggctctgagcctgtattctttttgtagctgtatgccctgcctaattggcgctagtatccagcatgcgaattgctaatttagttttataccgtggatattgctcatatcgtgtcccaacgcttttcttccctatgggaatgcatatgccactgctatgtataaggcaaatactgtaattatttgttcaaatatttgcc

SEQ ID NO: 203678 - DNA, 670 bp, Zea Mays
atgattttcaaaggattctgctgtcttcatttgcaccaaactagaggatgaactggttgccgcacggaaagtatcttcagaacgacagttggcggttacagacctgtacaaacatttcctccaacttcaggactacaatgatagggtcaaaacagctgaacagaggctgcagtctctcgttgatgctgccttggtcgagctcgacatggccgaagatgctactaccagagatggctcgatgtacgagaacggcgtgctttgaacacccaactgccatgggtttgtgtggttgctgatttgttagatttgtagtttgcgtctgccatgtaatagaactgcattgtaactagaaacaggaaaaatgttgtgtaagggtcggagaatctgctgtcgtggtccctgagcccggatttctctttcgaagttggattcattaaccggcctgattattcctgataccaataacataagaaaaaaaaagaagctagtaactatggtcttgattggatgactgcatgtctgtaatcaggctcgcggctcgtcccatcctggctgtccggatacggttgtttcgagggtacgagtggatacaatcaaaatgatttaaaatgacatattttgtatccgtttatccagtctacgtctctcatgtgcagccaaccaaataaaa

SEQ ID NO: 203679 - DNA, 2914 bp, Zea Mays
cctgtatcaccccacctcgtctcgtcgcctaccctcccaacccgcattcgcggcgcgggcgccttggaaccctagtcacccgcgccccccctccactgtccactcaacccccgtcccctccctcggcggcggcggcatcggcgtcaaccaagatgtcgggcggcttcttccgggggacgtccgctgaccaggacacgcgcttctcgaataagcaagccaagctgctcaagacgcaaaagttcgcgcccgagcttgaccatctggtggatacgtcaaaggtaaagatggacgtgatgaagccctggattgctaagcgggtcactgagctccttgggttcgaggacgaagttctcatcaacttcatttatggcctcctcgaggagaaggaagccgatggaaagaagattcagatccagctgacagggttcatggagaagaacacagtgaagttcatgagggagctctggaccctccttctcagtgcacagcagaatgccagtggggtgcctcaacagtttctggatgaaaaagaggctgagatacagcagaaaaaggcagaggatgataggattgcacaggagattcaaaagaagcgagagatggaggaaaatgattcagaactggtaaagaacaaagtgatggatggggatgctggtaactcaagatcctatggcgatccagttggctctgctttaaatagtacaaatttcaataccgaggaagaaaagaacaatgatttcaagcgtagcttaagagcaaagaacaggggaagtcgcagatccaggagcatatctttgtcgccacgtgctaggcaaagatccatctctcctagaaataattctcgttctcctcctaggcgttcccactctattgatagacaccatagatcatcatggcgttcaacttcacctagacgttctatttctccccgaaggcattctccaagaagtaccccttcaatttctagaaggagatcaccttactcaaggagagggtcgccttccttgtcaagatatccatccccatttacacgccggagatctcctcttcgcagaaaatcaccatcatctgggccactaaggtcactttctcctcgccatcgccgctcaccagctcgtgtaccaaggaggtcaccatctcctgcaagtcgaaggtctcctgttcgacgcagattctcaccaggtagacgtacatctccatctccagtaaggcgcaggccaaggtctccatcacctgggaggcgtaggccaaggtctccatcacctgggaggcgtaggccaaggtccccatccccaagaaggcgtaggccaaggtccccatccccaggaaggcgcaggccacggtccccatccccaggaaggcgcaggctacggtccccatctccaggaaggcgcaggccacggtccccatccccaggaaggcgcaggccacggtccccatccccaggaaggcgcaggccacggtccccatccccaggaagacgcagacctttatcgccagagggaaggaggagtaccagtccgtacaatagcaggagtcctaatcgctctcgccagagtttaagtaaagatactgagaaagaaacaaatggcaccccttccgttaaggacagagttgtgcactcaagggggcaagaacaaaaatcagatgataataatagggatggtgcaaggattgttggcaataattccccagattctgagcatagattgtcaaagtccttgaggcctcctaactatgaagaaaggaattccacacgtgacagttcttacaagaactcagacaaacctatacctagtcagggcagcacagatacaagtggagatgaggaacacagtcgtgctagagaaaatgcccggaaagcaaattcatgtcgtaggaaaacaaaggatctctcggcaggtctgcaacctaagaaaatcagtgctggtgactcaagccccagagacaaatctccattcattttacaacagagtggcaaggtcgtccaaaagaaacaccccgatcaattgtcagaatcatcagaagatgagcttgctggtagaagaacaaagcatcaaactgattcacctgatgattctcgtcgaaaacagcattccccgactagaattgaaaatgatgagtcttattcaaagggtggtagaaacagtgagcatgtcatgagaggtttgcgtgatgattctgatgatgctattgatacaaagaaatatttgtctaaagtcaatgaggactcccaatcggacgatggaagtcctttgaaaaaaactaagaaaaaaacagatggtaataggcacattgattctggtagttcagggtctgaagagcctgacaaacatagaacccactcggagaagcgaaggcacaagaaaactcataagcataagaaacagtatgatgatagttccgagtctgattctgagccagatggcaaagacgcaaagaggaggaggaggaaggaagagaagaggctaagaaaagaggaaagacgtcgaagacgtgaagaacgacaccgcagaagggcagaacgccatgccagcaaacgaaaattaaagaacaccgatactgttacaatgccttcagactctgagaaggatcgggattctgattcagatggtgatgttaggaaaagagtttcaaacgctggaagagaagagtctgatcagaagaaactagaaattgaactccttgatctgatgattcctgagctgtttacttgatgcagctgaattcaggcttagcagccagttatctgattagctccatgtgcacaagctttttatgttcctcaggatgatatgatcaacgcctcaacaaaaacaagttggtaacatattgattggaaaatctgctaaagcattccttcttagtttcaggcgctggaaatttctggtgtgatgtcacgttaactcgctgg

SEQ ID NO: 203680 - DNA, 3321 bp, Zea Mays
gtatcaccccacctcgtctcgtcgcctaccctcccaacccgcattcgcggcgcgggcgccttggaaccctagtcacccgcgccccccctccactgtccactcaacccccgtcccctccctcggcggcggcggcatcggcgtcaaccaagatgtcgggcggcttcttccgggggacgtccgctgaccaggacacgcgcttctcgaataagcaagccaagctgctcaagacgcaaaagttcgcgcccgagcttgaccatctggtggatacgtcaaaggtaaagatggacgtgatgaagccctggattgctaagcgggtcactgagctccttgggttcgaggacgaagttctcatcaacttcatttatggcctcctcgaggagaaggaagccgatggaaagaagattcagatccagctgacagggttcatggagaagaacacagtgaagttcatgagggagctctggaccctccttctcagtgcacagcagaatgccagtggggtgcctcaacagtttctggatgaaaaagaggctgagatacagcagaaaaaggcagaggatgataggattgcacaggagattcaaaagaagcgagagatggaggaaaatgattcagaactggatggggatgctggtaactcaagatcctatggcgatccagttggctctgctttaaatagtacaaatttcaataccgaggaagaaaagaacaatgatttcaagcgtagcttaagagcaaagaacaggggaagtcgcagatccaggagcatatctttgtcgccacgtgctaggcaaagatccatctctcctagaaataattctcgttctcctcctaggcgttcccactctattgatagacaccatagatcatcatggcgttcaacttcacctagacgttctatttctccccgaaggcattctccaagaagtaccccttcaatttctagaaggagatcaccttactcaaggagagggtcgccttccttgtcaagatatccatccccatttacacgccggagatctcctcttcgcagaaaatcaccatcatctgggccactaaggtcactttctcctcgccatcgccgctcaccagctcgtgtaccaaggaggtcaccatctcctgcaagtcgaaggtctcctgttcgacgcagattctcaccaggtagacgtacatctccatctccagtaaggcgcaggccaaggtctccatcacctgggaggcgtaggccaaggtctccatcacctgggaggcgtaggccaaggtccccatccccaagaaggcgtaggccaaggtccccatccccaggaaggcgcaggccacggtccccatccccaggaaggcgcaggctacggtccccatctccaggaaggcgcaggccacggtccccatccccaggaaggcgcaggccacggtccccatccccaggaaggcgcaggccacggtccccatccccaggaagacgcagacctttatcgccagagggaaggaggagtaccagtccgtacaatagcaggagtcctaatcgctctcgccagagtttaagtaaagatactgagaaagaaacaaatggcaccccttccgttaaggacagagttgtgcactcaagggggcaagaacaaaaatcagatgataataatagggatggtgcaaggattgttggcaataattccccagattctgagcatagattgtcaaagtccttgaggcctcctaactatgaagaaaggaattccacacgtgacagttcttacaagaactcagacaaacctatacctagtcagggcagcacagatacaagtggagatgaggaacacagtcgtgctagagaaaatgcccggaaagcaaattcatgtcgtaggaaaacaaaggatctctcggcaggtctgcaacctaagaaaatcagtgctggtgactcaagccccagagacaaatctccattcattttacaacagagtggcaaggtcgtccaaaagaaacaccccgatcaattgtcagaatcatcagaagatgagcttgctggtagaagaacaaagcatcaaactgattcacctgatgattctcgtcgaaaacagcattccccgactagaattgaaaatgatgagtcttattcaaagggtggtagaaacagtgagcatgtcatgagaggtttgcgtgatgattctgatgatgctattgatacaaagaaatatttgtctaaagtcaatgaggactcccaatcggacgatggaagtcctttgaaaaaaactaagaaaaaaacagatggtaataggcacattgattctggtagttcagggtctgaagagcctgacaaacatagaacccactcggagaagcgaaggcacaagaaaactcataagcataagaaacagtatgatgatagttccgagtctgattctgagccagatggcaaagacgcaaagaggaggaggaggaaggaagagaagaggctaagaaaagaggaaagacgtcgaagacgtgaagaacgacaccgcagaagggcagaacgccatgccagcaaacgaaaattaaagaacaccgatactgttacaatgccttcagactctgagaaggatcgggattctgattcagatggtgatgttaggaaaagagtttcaaacgctggaagagaagagtctgatcagaagaaactagaaattgaactccgtgagaaggcccttgaatctcttagagcaaagaaagccatcaacaactagactgagaatttttttgtgacacatttgagtttctattttcaagtggaagtgtccttatatgatactatttaatgttctgtgtgtttatgtggcagttgatctgatgattcctgagctgtttacttgatgcagctgaattcaggcttagcagccagttatctgattagctccatgtgcacaagctttttatgttcctcaggatgatatgatcaacgcctcaacaaaaacaagttggtaacatattgattggaaaatctgctaaagcattccttcttagtttcaggtttgtgcagcagtcaatattatctgattaataggttctcatatcagaaaacaatttcaggcactcgataatttacgatgcctagggggctagactgatattaatcattactttcagtaacttatttatgatattgactgaagaaaaagaaatcctgtgccaccttctttcacatatggaatcagcaaaccagctggtgatttgagatacaattaatatttgcagaaatcatcttccacctaggatgaaatgcacacagtttgtaacatcaaaggactttaatggactccaggtttagttcacaaacttatagtgtgtttggtg

SEQ ID NO: 203681 - DNA, 3228 bp, Zea Mays
cctgtatcaccccacctcgtctcgtcgcctaccctcccaacccgcattcgcggcgcgggcgccttggaaccctagtcacccgcgccccccctccactgtccactcaacccccgtcccctccctcggcggcggcggcatcggcgtcaaccaagatgtcgggcggcttcttccgggggacgtccgctgaccaggacacgcgcttctcgaataagcaagccaagctgctcaagacgcaaaagttcgcgcccgagcttgaccatctggtggatacgtcaaaggtaaagatggacgtgatgaagccctggattgctaagcgggtcactgagctccttgggttcgaggacgaagttctcatcaacttcatttatggcctcctcgaggagaaggaagccgatggaaagaagattcagatccagctgacagggttcatggagaagaacacagtgaagttcatgagggagctctggaccctccttctcagtgcacagcagaatgccagtggggtgcctcaacagtttctggatgaaaaagaggctgagatacagcagaaaaaggcagaggatgataggattgcacaggagattcaaaagaagcgagagatggaggaaaatgattcagaactggtaaagaacaaagtgatggatggggatgctggtaactcaagatcctatggcgatccagttggctctgctttaaatagtacaaatttcaataccgaggaagaaaagaacaatgatttcaagcgtagcttaagagcaaagaacaggggaagtcgcagatccaggagcatatctttgtcgccacgtgctaggcaaagatccatctctcctagaaataattctcgttctcctcctaggcgttcccactctattgatagacaccatagatcatcatggcgttcaacttcacctagacgttctatttctccccgaaggcattctccaagaagtaccccttcaatttctagaaggagatcaccttactcaaggagagggtcgccttccttgtcaagatatccatccccatttacacgccggagatctcctcttcgcagaaaatcaccatcatctgggccactaaggtcactttctcctcgccatcgccgctcaccagctcgtgtaccaaggaggtcaccatctcctgcaagtcgaaggtctcctgttcgacgcagattctcaccaggtagacgtacatctccatctccagtaaggcgcaggccaaggtctccatcacctgggaggcgtaggccaaggtctccatcacctgggaggcgtaggccaaggtccccatccccaagaaggcgtaggccaaggtccccatccccaggaaggcgcaggccacggtccccatccccaggaaggcgcaggctacggtccccatctccaggaaggcgcaggccatggtctcggtctccaataagacgtcagtccccatctccaaaacgccagaggacatcaccaagttcaccgaagactcgttctgcaaatcgacctttatcgccagagggaaggaggagtaccagtccgtacaatagcaggagtcctaatcgctctcgccagagtttaagtaaagatactgagaaagaaacaaatggcaccccttccgttaaggacagagttgtgcactcaagggggcaagaacaaaaatcagatgataataatagggatggtgcaaggattgttggcaataattccccagattctgagcatagattgtcaaagtccttgaggcctcctaactatgaagaaaggaattccacacgtgacagttcttacaagaactcagacaaacctatacctagtcagggcagcacagatacaagtggagatgaggaacacagtcgtgctagagaaaatgcccggaaagcaaattcatgtcgtaggaaaacaaaggatctctcggcaggtctgcaacctaagaaaatcagtgctggtgactcaagccccagagacaaatctccattcattttacaacagagtggcaaggtcgtccaaaagaaacaccccgatcaattgtcagaatcatcagaagatgagcttgctggtagaagaacaaagcatcaaactgattcacctgatgattctcgtcgaaaacagcattccccgactagaattgaaaatgatgagtcttattcaaagggtggtagaaacagtgagcatgtcatgagaggtttgcgtgatgattctgatgatgctattgatacaaagaaatatttgtctaaagtcaatgaggactcccaatcggacgatggaagtcctttgaaaaaaactaagaaaaaaacagatggtaataggcacattgattctggtagttcagggtctgaagagcctgacaaacatagaacccactcggagaagcgaaggcacaagaaaactcataagcataagaaacagtatgatgatagttccgagtctgattctgagccagatggcaaagacgcaaagaggaggaggaggaaggaagagaagaggctaagaaaagaggaaagacgtcgaagacgtgaagaacgacaccgcagaagggcagaacgccatgccagcaaacgaaaattaaagaacaccgatactgttacaatgccttcagactctgagaaggatcgggattctgattcagatggtgatgttaggaaaagagtttcaaacgctggaagagaagagtctgatcagaagaaactagaaattgaactccgtgagaaggcccttgaatctcttagagcaaagaaagccatcaacaactagactgagaatttttttgtgacacatttgagtttctattttcaagtggaagtgtccttatatgatactatttaatgttctgtgtgtttatgtggcagttgatctgatgattcctgagctgtttacttgatgcagctgaattcaggcttagcagccagttatctgattagctccatgtgcacaagctttttatgttcctcaggatgatatgatcaacgcctcaacaaaaacaagttggtaacatattgattggaaaatctgctaaagcattccttcttagtttcagtaacttatttatgatattgactgaagaaaaagaaatcctgtgccaccttctttcacatatggaatcagcaaaccagctggtgatttgagatacaattaatatttgcagaaatcatcttccacctaggatgaaatgcacacagtttgtaacatcaaaggactttaatggactccaggtttagttcacaaacttatagtgtgtttggtg

SEQ ID NO: 203682 - DNA, 3242 bp, Zea Mays
gtatcaccccacctcgtctcgtcgcctaccctcccaacccgcattcgcggcgcgggcgccttggaaccctagtcacccgcgccccccctccactgtccactcaacccccgtcccctccctcggcggcggcggcatcggcgtcaaccaagatgtcgggcggcttcttccgggggacgtccgctgaccaggacacgcgcttctcgaataagcaagccaagctgctcaagacgcaaaagttcgcgcccgagcttgaccatctggtggatacgtcaaaggtaaagatggacgtgatgaagccctggattgctaagcgggtcactgagctccttgggttcgaggacgaagttctcatcaacttcatttatggcctcctcgaggagaaggaagccgatggaaagaagattcagatccagctgacagggttcatggagaagaacacagtgaagttcatgagggagctctggaccctccttctcagtgcacagcagaatgccagtggggtgcctcaacagtttctggatgaaaaagaggctgagatacagcagaaaaaggcagaggatgataggattgcacaggagattcaaaagaagcgagagatggaggaaaatgattcagaactggtaaagaacaaagtgatgataacttctccgataatttgggttcatatcgttatttacctcaactgctgtaggatggggatgctggtaactcaagatcctatggcgatccagttggctctgctttaaatagtacaaatttcaataccgaggaagaaaagaacaatgatttcaagcgtagcttaagagcaaagaacaggggaagtcgcagatccaggagcatatctttgtcgccacgtgctaggcaaagatccatctctcctagaaataattctcgttctcctcctaggcgttcccactctattgatagacaccatagatcatcatggcgttcaacttcacctagacgttctatttctccccgaaggcattctccaagaagtaccccttcaatttctagaaggagatcaccttactcaaggagagggtcgccttccttgtcaagatatccatccccatttacacgccggagatctcctcttcgcagaaaatcaccatcatctgggccactaaggtcactttctcctcgccatcgccgctcaccagctcgtgtaccaaggaggtcaccatctcctgcaagtcgaaggtctcctgttcgacgcagattctcaccaggtagacgtacatctccatctccagtaaggcgcaggccaaggtctccatcacctgggaggcgtaggccaaggtctccatcacctgggaggcgtaggccaaggtccccatccccaagaaggcgtaggccaaggtccccatccccaggaaggcgcaggccacggtccccatccccaggaaggcgcaggctacggtccccatctccaggaaggcgcaggccacggtccccatccccaggaaggcgcaggccacggtccccatccccaggaaggcgcaggccacggtccccatccccaggaagacgcagaccacgatccccatcgcctggaaggcgcaggccatggtctcggtctccaataagacgtcagtccccatctccaaaacgccagaggacatcaccaagttcaccgaagactcgttctgcaaatcgacctttatcgccagagggaaggaggagtaccagtccgtacaatagcaggagtcctaatcgctctcgccagagtttaagtaaagatactgagaaagaaacaaatggcaccccttccgttaaggacagagttgtgcactcaagggggcaagaacaaaaatcagatgataataatagggatggtgcaaggattgttggcaataattccccagattctgagcatagattgtcaaagtccttgaggcctcctaactatgaagaaaggaattccacacgtgacagttcttacaagaactcagacaaacctatacctagtcagggcagcacagatacaagtggagatgaggaacacagtcgtgctagagaaaatgcccggaaagcaaattcatgtcgtaggaaaacaaaggatctctcggcaggtctgcaacctaagaaaatcagtgctggtgactcaagccccagagacaaatctccattcattttacaacagagtggcaaggtcgtccaaaagaaacaccccgatcaattgtcagaatcatcagaagatgagcttgctggtagaagaacaaagcatcaaactgattcacctgatgattctcgtcgaaaacagcattccccgactagaattgaaaatgatgagtcttattcaaagggtggtagaaacagtgagcatgtcatgagaggtttgcgtgatgattctgatgatgctattgatacaaagaaatatttgtctaaagtcaatgaggactcccaatcggacgatggaagtcctttgaaaaaaactaagaaaaaaacagatggtaataggcacattgattctggtagttcagggtctgaagagcctgacaaacatagaacccactcggagaagcgaaggcacaagaaaactcataagcataagaaacagtatgatgatagttccgagtctgattctgagccagatggcaaagacgcaaagaggaggaggaggaaggaagagaagaggctaagaaaagaggaaagacgtcgaagacgtgaagaacgacaccgcagaagggcagaacgccatgccagcaaacgaaaattaaagaacaccgatactgttacaatgccttcagactctgagaaggatcgggattctgattcagatggtgatgttaggaaaagagtttcaaacgctggaagagaagagtctgatcagaagaaactagaaattgaactccgtgagaaggcccttgaatctcttagagcaaagaaagccatcaacaactagactgagaatttttttgtgacacatttgagtttctattttcaagtggaagtgtccttatatgatactatttaatgttctgtgtgtttatgtggcagttgatctgatgattcctgagctgtttacttgatgcagctgaattcaggcttagcagccagttatctggtaatgtttgcttctacagatttgtacgcgaaccataaccctgaaaaggatatgttttgttatgtgagcatctgcttccttttttttcattgtgtgaaatgatattctcatgtttctttactagtgtatgatgttgtgttatcgcatacgctgttaaaaaataaccttgcac

SEQ ID NO: 203683 - DNA, 1041 bp, Zea Mays
caattactggcatactgggtctgacaagggtttcgatagtgatcttggtccctcttcatctagtgtatcaacagcaactcctcccaatggtcgcaacggaaggctgctgactccaacctctgatgatggcgagtatgtggagtactcatttgatagcttgtcagatatgcctcacaccgtggaagatgaagatagaatgctaatgcaagcaattcttgaatcactgaaagactatgaacagtcgaatacaaaaaatgtgcaatccactgcatctgatcctgcatctaaagccaatggtactgtaaaagactgcaatggtgttgctgcagcagcattggagcaagatgcatcctcatttgatgctcctgacaagcatacgaatgtccccaacagtggagaaaaagtcagcgaagggcaaagtacagattgcaacgccggaaagagcagtgcttcggtctctgcttctggttcctcagagcccctggcaccaacacagatggtgaatggacaacctgcttcggtagactcccagaaagtgacccagaatgccaatggagaggatggcacaagagcaactttggtagttcagaagagccggacaggcggcctgatagaaaaatggggttccttcttcaagaacaacgactaaggcgaggaaagatagacgatgacacctttgacaatacgtgttccgttgtgttcatagtcatagaatcgccgttggctgatgtccagcttgattggttttacgtgtaaaatggaaaggaaacaggtgatttcaggacgttcgtgtgtatatagaaggaattgtagcgcccccattgatttataccatctctcaacttccactactttcggttgcggtgaattggcaagacctttgttcttactaatgtgctgtagacttgtagcataatttgaaagctgattattttgtagttttttaaatagtaaagggtaatgtgcctcttaacgtagagttgaattcttacacgagcaatagggtcaattttttaaattgtatttaatgtccaaaaaaaa

SEQ ID NO: 203684 - DNA, 2287 bp, Zea Mays
aacatctaatatagagctaaaactgagagccgtaaaatagcaaatttcggcgagacgggcggtgacacagcgcctcatctcgatctccctcccggctccccgacctttgtaaaccctaaaaatcaatctagttcgcaccaaatcgatcgcgcctcagctcaaaatccgaaacggttcgaacgatcagaacgattcagcttcagctcctgaatccagcagcaatggatcgctcccgctccaagcgcggctaccactacgaccaggactccccgccgccccgctccaagcagcgcttcgaccgccgcagcggtggcggccagaatgctaactcgagctatcaccgccgcggccccctcggcggcggcggctccgaccgccgcgggttcctgccccctgcccccgcgccgcccccgcccccgcccccaccgccgcttcctccctcgtcggccacggcgggtggcggcgctggtcccaccaccaccaccacctccttccgcatcctgtgccccgagtgcaaggcctacggcttcccacccggcttcgttgccaaggtccgggacgacagcggcgcgcttgtcactgtgcacccgcccttcgcgggcgactacgtccgggtcatcgagacggtggacggcgcgaggcgcgaggcagacggccgcccgcccatgttctccccggcccaagaggcccttctcatggtgcaccgccggattctcgagaccgacgctgacgacggcgacgaggatggcgagtatgggcccaggggcaaggactccagggacagggggaagaccaccacacgactcatcgtgcccaagatgcacgtcggatgcttgctcggcaaaggtgggaagatcatagagcaaatgaggatggagaccaagacgcacattaggatcctgccgcgtgaccagcacactccgcgctgcgtttccttgtccgaggaggttgtacaggttgttggagatggaaattgtgttaagaaggctgtagcaataatcactgatcgcctaaaggaaagcttacaccgtgaccgtggtcccttccgtgggcgaatgaattcaccagagcctcgaatttctcaggaagatgattatttgggtgtttcgcagatgcctgcatacgaggaatctctgggacgatctgatcagattaggaacaacactagcatggagccaccaggatatgagtttgattcaaatgatggcaaggtgattgaacatccagatatcctgtacgatgacataatttttcgaattctatgcccaaatgacaaggttgacaatttagttgcaacaaatgatggaatactggagatgctacaggctgatgttggtgttgatgttagactatctgatattattgctggttctgatgaaagggtagtaatcatcacatctagagagggaccagaccatgagcttttcccagctcaggaagcagtgctgcacattcaaactcatattgtagacctcggcccagacaaggataacattatcacaacaagactacttgtaccttcaagtgaaattgcttgctttgatggaagggaggggtcattatctgatatacagcgacagactagtgcaaacgtgcagatattaccaaaagaagatcttccattatgcgctttagagtcagatgaactcatacaggatagtggaggcagtgcaagtggctcatttgatcaaggcagcaacattattgatgagatcagacaaggtgctacaaaaagatttgccgttcctctagtaactaggagcacactagaagttgtcataccaaatagtgctgttgcaagcctcaccatgagagctggtagcaagcttgctcaaataagcgagatctctggtgctactgtaacgctagctgaggacagacctgacatcttagagaaagttgttcgaatatctggtacccctgagcaggctagcaaagctgagaatttgctgcagggatttattctaagcattccagatgacattccttcaggctagttgaagacactctgcatgtcatagttgttagttcgtaaaattcctgtgtatattcgaggtagaatatgctgatgtcatgtgattatttgtttaattgagcagcatgtattcatgtgtggatacatgctgttttccttgtagccgttaactggctgacgggggtgtaagattagcatgtgaatttacagattgattcaacattcaattctcatgtccatatgtgaccgctgaacatgaaacctccaacttatttaattctcagtctggtgcttagctgtgaaaacagtacg

SEQ ID NO: 203685 - DNA, 1492 bp, Zea Mays
caccaatttaaaaaacccaataatataatgatgtgcaagctcttttgtgtattccagaaaaaatgtagcaaccaagatgatggatgctaacttaaaaaattgtagattttttacttaaataaccttttgtattatgaaagataccttttgggacaatttacttttaggtaattaacattattttacttattggtttctatgctggaactaatgtgtaagtttttcataatgctgactatagttgaacatcatgaactaatgctgtgtgtcttcgtgcagcctcgtctgtttgttggtagggggatgcatgaaagtgctttctcacttttcatgtacaccatgttctggattgctcttctcttgataaagtttgcatttagctactacgtggagatcaaacctcttgttgaacccaccaaggttatcatgaagacccccatacatacgtttcggtggcatgaatttttcccaagagaaaagagcaatatcggtgttgttattgcaatttgggctccaatcattctggtatatttcatggatacacaaatttggtatacaatcttctccactctacttggtggaatttacggtgctttccaacggctcggagagattcgtactctggggatgctgcgatctcgctttgattcaatacctttagcctttaactcgtgcctaattcctgttgaaacatctgatgcaaaaaggaagaaaggtctgaggtcttacttacacaatcgtttcaaagagatggaacatgctgacaaggagaatatagcagcaaggttcgcacaaatgtggaatgaaattgtcaccagctttcgagatgaagatcttatagacaatagggagaaggagctgctacttgttccttatgtgtctgatcggacccttggtgtcgtgcagtggcctccatttttgcttgccagcaagatcccgatagcagttgacatggctaaagatagcaatggcaaagaccgagatctgagaaagaggcttgacaatgattattattttaagtgtgcaattgaggaatgttatgcatcatttaagaatatcatcaatggccttgtacagggtgaaccagagaaaagggtcataaataagatatttgtagaagttgaaaaatgcatctctgaggacaaagttattgcagatttgaacatgcgggccctgccagatctctacttcaagtttgttgagttggtaaactacttggagaagaatgaccacccaaacctacctagaaattacatgagaccaagatatgctggacaatatcattagcttggtcacaaagagggcaaacagtagggtgtggcaagccacgcttcgcaagatgttcttttgtccagcatctatctattattctctgcaagagcttttccaaatctgcttccatggtgcaaatctagtaccgatgaaaaagcatcatgcgaacgctcttgcagtgcgatggatgtgactcccgatggggagtgcgctcgcccgg

SEQ ID NO: 203686 - DNA, 1216 bp, Zea Mays
gtaagtttttcataatgctgactatagttgaacatcatgaactaatgctgtgtgtcttcgtgcagcctcgtctgtttgttggtagggggatgcatgaaagtgctttctcacttttcatgtacaccatgttctggattgctcttctcttgataaagtttgcatttagctactacgtggagatcaaacctcttgttgaacccaccaaggttatcatgaagacccccatacatacgtttcggtggcatgaatttttcccaagagaaaagagcaatatcggtgttgttattgcaatttgggctccaatcattctggtatatttcatggatacacaaatttggtatacaatcttctccactctacttggtggaatttacggtgctttccaacggctcggagagattcgtactctggggatgctgcgatctcgctttgattcaatacctttagcctttaactcgtgcctaattcctgttgaaacatctgatgcaaaaaggaagaaaggtctgaggtcttacttacacaatcgtttcaaagagatggaacatgctgacaaggagaatatagcagcaaggttcgcacaaatgtggaatgaaattgtcaccagctttcgagatgaagatcttatagacaatagggagaaggagctgctacttgttccttatgtgtctgatcggacccttggtgtcgtgcagtggcctccatttttgcttgccagcaagatcccgatagcagttgacatggctaaagatagcaatggcaaagaccgagatctgagaaagaggcttgacaatgattattattttaagtgtgcaattgaggaatgttatgcatcatttaagaatatcatcaatggccttgtacagggtgaaccagagaaaagatttgaacatgcgggccctgccagatctctacttcaagtttgttgagttggtaaactacttggagaagaatgaccacccaaacctacctagaaattacatgagaccaagatatgctggacaatatcattagcttggtcacaaagagggcaaacagtagggtgtggcaagccacgcttcgcaagatgttcttttgtccagcatctatctattattctctgcaagagcttttccaaatctgcttccatggtgcaaatctagtaccgatgaaaaagcatcatgcgaacgctcttgcagtgcgatggatgtgactcccgatggggagtgcgctcgcccgg

SEQ ID NO: 203687 - DNA, 1898 bp, Zea Mays
gcatgttctttctctactctagtaggcactcagttgatatcagctgcaactgtcatctatgctctaagaaacctgagccatgcttctacaacagctgtggttctgagaccttggttcattgcactagtggcagctggagctatcgaaaggcttgcaggattggcgctaggagtttccatggagcgcgactgggttgtgttgcaggaacaaacaggcctgttgcattagctcaagctaatgctgtgctcaatcgacttgatctagtttgtgagacagttggtgcttctgtttttggccttcttttgtccaaataccatcctgtgacctgtttaaagattgctagtggtctaatgatatgcagtttccctgttctggtaaaccacatttatcatcactcctaaaacttgaatatggtagccagatgtagcgtactcacaatgctatatggtatttccaatttcaggtcatgttgggtcaactaatcaatagagtttcttgccatgcacttgattcctctagaactgccactgatgaatctatttgtgctgatcttttagatgtacgcaggatagttccaaatagcttgagggctatcaaacatggatggaatgagtataagcagcaaacagttctacctgcaagtgcagctaccgtgttcctaaatttcaatgttgcacttgctccaggtgccataatgactgcattattgatgcatcgtggtaccagtccatccattgttggtgctttcagtggattgtgctctatcatgggccttgttgcaacattcatctcctcaagcctggtgaaaagagttggaattctaaaggcgggagctgctggattgatatttcaagcttcactcttgtcaatcgcgctcacagtgtattgggctggttcaatttcgcaaacgacacctctacttatattcctagcatccattgcattgtcgcggttggggcacatgtcttatgatgttgtggggactcaaattgtccagacaggtgttcctgcttcaaaagcaaatctaattggaggaatggaggtttcaattgcaagccttgcggagctagtcatgcttgctatggctataattgcgaatgatgtctcccatttcggcttcctggcgatcctgtctgtgtcatcagttgctggggcagcatggatgttctgtcggtggttaacaaatccaacagatgagcagagggaactattcatggttgatcccctttatcaagttcaggcaatgtaagtactggtttttgtatctttgctgttactttattaggaaatccgggatcagaagtttttgaacttctaattgacaagggatatttgtatgtctctcaatcttattctttggcaggatatttgcatccctgatttccagtttagctattatctaaatggaaactactattattaatgtccagacataaaatattaatcactcgtaacgtaataagatgttacctcacgttttgcagatagtggatgaggcaggaaacaaccaggaaaactgcaggcgcctacttgctggtggtgcttgttggatctgcaataccgttacgatgatactaagatacagtgtgacatttaggttcaatacgggatacacttagggtagaagcatttgctcctcgtggcctcagccatgcgcagaattcaatttgtatactcgttcatctcctcacctgtacaacacatatttgatctgtataagtgttacttgttatagctgatgtagaacaacattaacagccatcggtagcacacagtcaatgaaatctaaccccctcacctttcctctgatgctgcaaatgtgtaactgtatcttttattggatccactgtcttctttctcctgtcatcttggttccttgttaggcatgtacatccctg

SEQ ID NO: 203688 - DNA, 2619 bp, Zea Mays
caccagccctataaaattccacatagattcccgtgcagtgctccagacggaactgtggccgcatctccctctacccattctgggttttcctctacaccacaacgctacgaaactcttcatccatttgatccacatcaaacggctgatagggcccctcctatctctcctacatcttctccactcccctggattgagttggacaacttggcgcttcacctcgctcgctgctctcctctcagtcctctggttctccgtcctctcgcctcgcgcggccgcgcctgcgcctcgtcagcaagataaggctgcagcctgcaggccacagtgcaggcccatgcttccagaatcttccggaaccttgcgccgagcctgaactccccggcggcgcctggccctgtgaaggctgcatgagtagtcgcgccgccgccgccgccgcagcggagccatggggatgctcgccgccgccgttgcccccgctctcctcgcctcgccacaggcatccctcgtccgccgccgcctctccggtgcgtggacgctgcgcctgaagcccgctgctgcctcccacggcgtcgcggcgctcagggtacataattttctcccaaagtgttacattaccaacgttgaggttgatgttagtactgtaaataaagaagaaactttcgatgatcatccatcattggcaccaggacgcaacattccgcttgttaatcttcgaggagatattctagattctagtccttttccgctgcacgatagggcttcctgtccttcaggttttgaagagttgccggtcttgtctgaaggagagcaacatactttggcatccactcctgctcatcctgctggactatatgctctatatgctagttacttatttggtaacttggtggaacaactgtggaattttgcttggcctgccacactggcaattcttcatccaaatctattgcctgtggccattgttggtttcttcacgaagctttcagtgtttgttggggctcccatagttggcaaacttatggatcatttcccccgaatacccatgtacacagcattgaatgctgtgcaggtaggcactcagttgatatcagctgcaactgtcatctatgctctaagaaacctgagccatgcttctacaacagctgtggttctgagaccttggttcattgcactagtggcagctggagctatcgaaaggcttgcaggattggcgctaggagtttccatggagcgcgactgggttgtgttgttagcaggaacaaacaggcctgttgcattagctcaagctaatgctgtgctcaatcgacttgatctagtttgtgagacagttggtgcttctgtttttggccttcttttgtccaaataccatcctgtgacctgtttaaagattgctagtggtctaatgatatgcagtttccctgttctggtcatgttgggtcaactaatcaatagagtttcttgccatgcacttgattcctctagaactgccactgatgaatctatttgtgctgatcttttagatgtacgcaggatagttccaaatagcttgagggctatcaaacatggatggaatgagtataagcagcaaacagttctacctgcaagtgcagctaccgtgttcctaaatttcaatgttgcacttgctccaggtgccataatgactgcattattgatgcatcgtggtaccagtccatccattgttggtgctttcagtggattgtgctctatcatgggccttgttgcaacattcatctcctcaagcctggtgaaaagagttggaattctaaaggcgggagctgctggattgatatttcaagcttcactcttgtcaatcgcgctcacagtgtattgggctggttcaatttcgcaaacgacacctctacttatattcctagcatccattgcattgtcgcggttggggcacatgtcttatgatgttgtggggactcaaattgtccagacaggtgttcctgcttcaaaagcaaatctaattggaggaatggaggtttcaattgcaagccttgcggagctagtcatgcttgctatggctataattgcgaatgatgtctcccatttcggcttcctggcgatcctgtctgtgtcatcagttgctggggcagcatggatgttctgtcggtggttaacaaatccaacagatgagcagagggaactattcatggttgatcccctttatcaagttcaggcaatatagtggatgaggcaggaaacaaccaggaaaactgcaggcgcctacttgctggtggtgcttgttggatctgcaataccgttacgatgatactaagatacagtgtgacatttaggttcaatacgggatacacttagggtagaagcatttgctcctcgtggcctcagccatgcgcagaattcaatttgtatactcgttcatctcctcacctgtacaacacatatttgatctgtataagtgttacttgttatagctgatgtagaacaacattaacagccatcggtagcacacagtcaatgaaatctaaccccctcacctttcctctgatgctgcaaatgtgtaactgtatcttttattggatccactgtcttctttctcctgtcatcttggttccttgttaggcatgtacatccctg

SEQ ID NO: 203689 - DNA, 1335 bp, Zea Mays
gccgcgtcgacgagactgcacatgaaaaccgggggcagcgccgcgccgaaccgggcgcgccgcacaaggttcgatccgccggctccggtggcgcacccagatcagatccccctttcgctggtttctttccccttggccaagcccaaaccgtctttaaatacacccgtcgtcgtccgcatcccccgcctgccttaaccattcctcccaacaccacctcgcctgcgatcttcgtagcctccgtcgcgtcgagcatcgatcatgtcggcctactgcggaaagtacaaggatgagctcatcaagaatgctgcctacattggcacccccggcaagggtatccttgctgctgatgagtccactggcaccattggcaagcgcctttccagcatcaatgtcgagaacgttgaggagaaccgccgtgccctccgtgagctcctattctgctgccctggtgctctccagtacatcagcggtgtgatcctcttcgaggagaccctgtaccagaagaccaaggatggcaagccttttgttgatgtcctcaaggagggaggcgtcctccctggcatcaaggttgacaagggcaccattgaggttgttggcactgataaggagaccaccacccaaggccatgacgaccttggcaagcgttgcgccaagtactacgaggcaggtgcccgctttgccaagtggcgcgctgttctcaagattggccctaatgagccatcacagcttgccatcgacctgaacgctcagggtctggctcgctatgccatcatctgccaggagaatggtctggtgccaattgttgagcctgagatccttgttgatggccctcatgacattgatcgctgcgcttacgtcactgagaccgtccttgctgcctgctacaaggcgctcaacgagcaccatgtcctcctggagggtaccctcctgaagcccaacatggtgactccaggctccgactccaagaaggtgacccctgaggtgattgctgagtacaccgtccgtaccctccagaggaccgtccctgctgctgtgcctgctgttgtcttcctctctggtggacagagcgaggaggaggccacccgcaacctcaatgccatgaacaagctcagcaccaagaagccgtggtccctgtctttctccttcggccgtgccctccaggcgagcaccctcaaggcctgggctggcaaggtggagaacctggagaaggctagagctgccttcctcgccaggtgcaaggccaactctgaggctaccctcggcacctacaagggtgatgctgccgccgacaccgagagcctccacgtcaaggactacaagtactgagttgagaaa

SEQ ID NO: 203690 - DNA, 2004 bp, Zea Mays
ttcatcgattcggcgagttcaaccgtgtcctccgcgctccgtgcctgccagcctgccactgctcggttctagaatccactccctgacctgtgcggcgctccgtgcctggctgccagcctgccactgctcggttctagaatccactccctgacctgtgcggcgttcccgtgcccggccggagtatcgatcgcatggcctgcgccggcgccgcgcagaaggtctcagcggtgctctaccactacccgtgcccggacggcgcgttcgcagcgctcgccgctcacctctatttttccggcgccgcccacccggtccgattcttccccaataccgtctacgaccccatcaggagtgattcacttccactggaagaaataaaagatgtttaccttcttgactttgtgggacctcctggttttgttgaagatatagcccctaaagtcgaaagaataacaatcctggaccatcataagaccgcttttgaaagtttgtgtgtgaatgccacacttgggcaaaatgtgaccaaggtgatagacatgcagcgtagtggtgcgacaattgcatttgacttctttagaaacaagctcttaacagaagttagcacctcacggggtaatgaaagtggtaaagatgtagccaaggtcaaatatgtacctgacaacaaggctgaaacagtacacaagctttttaagtttattgaagacggggacttatggagatggaaaattccaaatagcaaggccttcagcagtggacttaaagatttggacattgaattcaatgtcaatgcaaataataaattgtttgatcagttgttggagttggatcctgagcatgtcatttcccatggacaagcgacattattagagaagcaaagattaatagatgattgtttggagaaatcctatgaaatttccctgggatgtggccagtttgggagttgtctggctgttgatgctgatgctatttcaaatttgagaagcgaacttggaaatcaactagctagcaagagccgtgattttaatctaaggggtattggggctgttgtatacaaagttcctgagttgaataatgaccagatactgaaagtaagtctaagaagtttagaacaagaagacacaacctgtatctctcaggaatatggtggtgggggacatcggaatgcaagctcgtttattttgagtgtgactgagtttgacaggtggaaagtcggatcttctcgaccaaaagttttgaagacatgaactgtcgtgtggatgaggtttcgcgtgcttggccaacgtcagtaacaaaacggcagcaggtgggcatctttgaagcaagtattggttgatgagctatgaattcttagggaagacggcccgaatgaacttcaagaaacgctccgagtagaactgggggtccacaaccgagatcgagtccgagtcatattgcatggaattcacgatcgattttctttgtcatattgtactattgcaatatgtcaatgatgcccaggtagaggaccaggaacggacccagccaaaagtttgagtgggggcttaaatagaagcataattattaatggacctttacagctacagtgaataatacaaacttcgcaagaaccagaaaattaagtgaggcccgtgcttcccactcagcctaacgtgggtccgcccatgtagaggacaacatcgcacacctcacggaggagaaggccaatgcagctgatgaggagttgaaaaccttgatgatatgctagttgtgatgcttctccaaccagtgagatagtagctgatgatatgctagttgaacagctttaaccagtgatgcacaattttactttatgcggggggaagggtgactcggaacgacatgttttacatagtagagatggagtgttcttatcacttggggccttggggtgagacagaaaaagaacaatggaacgctggctggttgtggagcagaaaatcttttattcttggtcttttttttcaaacttaaatagatgcaaatgtgtag

SEQ ID NO: 203691 - DNA, 2071 bp, Zea Mays
ttcatcgattcggcgagttcaaccgtgtcctccgcgctccgtgcctgccagcctgccactgctcggttctagaatccactccctgacctgtgcggcgctccgtgcctggctgccagcctgccactgctcggttctagaatccactccctgacctgtgcggcgttcccgtgcccggccggagtatcgatcgcatggcctgcgccggcgccgcgcagaaggtctcagcggtgctctaccactacccgtgcccggacggcgcgttcgcagcgctcgccgctcacctctatttttccggcgccgcccacccggtccgattcttccccaataccgtctacgaccccatcagatgttcaattctctaattccaaaggtgcggtgatctaagttaatggtgctgtgttaaacatacgaacatcggacagagtgattcacttccactggaagaaataaaagatgtttaccttcttgactttgtgggacctcctggttttgttgaagatatagcccctaaagtcgaaagaataacaatcctggaccatcataagaccgcttttgaaagtttgtgtgtgaatgccacacttgggcaaaatgtgaccaaggtgatagacatgcagcgtagtggtgcgacaattgcatttgacttctttagaaacaagctcttaacagaagttagcacctcacggggtaatgaaagtggtaaagatgtagccaaggtcaaatatgtacctgacaacaaggctgaaacagtacacaagctttttaagtttattgaagacggggacttatggagatggaaaattccaaatagcaaggccttcagcagtggacttaaagatttggacattgaattcaatgtcaatgcaaataataaattgtttgatcagttgttggagttggatcctgagcatgtcatttcccatggacaagcgacattattagagaagcaaagattaatagatgattgtttggagaaatcctatgaaatttccctgggatgtggccagtttgggagttgtctggctgttgatgctgatgctatttcaaatttgagaagcgaacttggaaatcaactagctagcaagagccgtgattttaatctaaggggtattggggctgttgtatacaaagttcctgagttgaataatgaccagatactgaaagtaagtctaagaagtttagaacaagaagacacaacctgtatctctcaggaatatggtggtgggggacatcggaatgcaagctcgtttattttgagtgtgactgagtttgacaggtggaaagtcggatcttctcgaccaaaagacatgaactgtcgtgtggatgaggtttcgcgtgcttggccaacgtcagtaacaaaacggcagcaggtgggcatctttgaagcaagtattggttgatgagctatgaattcttagggaagacggcccgaatgaacttcaagaaacgctccgagtagaactgggggtccacaaccgagatcgagtccgagtcatattgcatggaattcacgatcgattttctttgtcatattgtactattgcaatatgtcaatgatgcccaggtagaggaccaggaacggacccagccaaaagtttgagtgggggcttaaatagaagcataattattaatggacctttacagctacagtgaataatacaaacttcgcaagaaccagaaaattaagtgaggcccgtgcttcccactcagcctaacgtgggtccgcccatgtagaggacaacatcgcacacctcacggaggagaaggccaatgcagctgatgaggagttgaaaaccttgatgatatgctagttgtgatgcttctccaaccagtgagatagtagctgatgatatgctagttgaacagctttaaccagtgatgcacaattttactttatgcggggggaagggtgactcggaacgacatgttttacatagtagagatggagtgttcttatcacttggggccttggggtgagacagaaaaagaacaatggaacgctggctggttgtggagcagaaaatcttttattcttggtcttttttttcaaacttaaatagatgcaaatgtgtag

SEQ ID NO: 203692 - DNA, 1543 bp, Zea Mays
ctgatgaaagtgtgagcctcaagtgattgtaggcattataaagttctgcttcgactcttctagttgtattttattgtgggaaggattcaatctgtactaggtttagcataatcagagctagaatggactacctctgttggatttcattaaatcataaaacacacggcacctttttttatacttttgtgggattttcatcttagtgacacaaactctgtgcaattatgctgatgcttttgttctggtatattccttctgctatgatatttttttgtctgttttgtaggagtgattcacttccactggaagaaataaaagatgtttaccttcttgactttgtgggacctcctggttttgttgaagatatagcccctaaagtcgaaagaataacaatcctggaccatcataagaccgcttttgaaagtttgtgtgtgaatgccacacttgggcaaaatgtgaccaaggtgatagacatgcagcgtagtggtgcgacaattgcatttgacttctttagaaacaagctcttaacagaagttagcacctcacggggtaatgaaagtggtaaagatgtagccaaggtcaaatatgtacctgacaacaaggctgaaacagtacacaagctttttaagtttattgaagacggggacttatggagatggaaaattccaaatagcaaggccttcagcagtggacttaaagatttggacattgaattcaatgtcaatgcaaataataaattgtttgatcagttgttggagttggatcctgagcatgtcatttcccatggacaagcgacattattagagaagcaaagattaatagatgattgtttggagaaatcctatgaaatttccctgggatgtggccagtttgggagttgtctggctgttgatgctgatgctatttcaaatttgagaagcgaacttggaaatcaactagctagcaagagccgtgattttaatctaaggggtattggggctgttgtatacaaagttcctgagttgaataatgaccagatactgaaagtaagtctaagaagtttagaacaagaagacacaacctgtatctctcaggaatatggtggtgggggacatcggaatgcaagctcgtttattttgagtgtgactgagtttgacaggtggaaagtcggatcttctcgaccaaaaggtgcataaccatctggctttcttcattgctctacaagattaatgaagaaacacatgcagagggaacaaaaccccaaacttggggatgtgggacatgagaaacatcatagctgcatatcagacaattctcgacacttacgcagcattctgctatcatgccatatcttaccctatggcacttattaataggctgctatttgggcacttagttttacaaaatctgctgaaatcataattggagaactctacatgtctcacgtactggcttagacactgaacatattagtccttaaatgcgtctttttacattttatttatgcaagtgctactttgattaatgtgtagttctgtaagagcatatgagcatcgtatctgtc

SEQ ID NO: 203693 - DNA, 3023 bp, Zea Mays
ctccaaaactctttctcttcctcaccacaccagcaaaaccaccacaacacccctcgcactacgcgcgccgccgccgccgctagcactggtgagacgagtacggaggagcagcacagggatggacggcggcctcgaggatgagcaggaggacccaagcttcctcaaaccaccacagcacccctcgcactacgggcaccgccactgctgtcgctttcagcgtcggtaagacgagtagggaggggcaatgcagggatggacggtggcctggacggcgagttggaagacgcgggcttcctcgacgaggtattacgcgcgacggacgaggtcatcgcctcccgcaaccctaaccccgctcccgctcccgctcccatccccatgtttgactccttcgtcattgtccccgtctgagagcctcctatcttcccaccgattcgatctcccacctccccgtcgcttcgtagccccgcttcacgatcagcttctcccctccgctaatggaatgagtatttttaccggttaaagtttggttaatgaaggaatagaaaatggggttgtgcaatttcaagactcaggtgtccatggattggagaaatttccatttagatgacccatcaacatcctacattgcctggtgatcacacctgtgtcacctgtatgaatgttggtgggttcgacttgcaatgttgttacaacctgacttgactaatgctcttactcatgcttacaagtaatttgtttcattgggttttgcatgacgtctaatagaatatgttattctgtattcattgtattagtatgttgcaaggggtcataataaatcgggtagcggtaaaatattgtatgactacaagattggcgtcttgagtgcattatgttataatttaaagttcatatttccaaccaaagcaaaaatagtttatgaagcataatagtttttccaatactaaattcttgagtggcatatgtgaaagtactatagctaagacgcgatgaagtatggatcagtgtttatttaatcatttacgatgagatgttatttgtagtgttagttattcatcttcaggttgattctgtacctaactgatatatgtctgtgtgttttcagaaacccctcatatgcaaaagcttaatactgtcaaggctgctacagtggtcataggttagaataaatccatggtaaacttgaacccctacaaactaaagaaaatgccagaatagagaaagtttaagcctagagataagtgagtcaaatccataaaattggcaagtcaaatcatcagtatgaaatgtaccaaggcatattgggtgtagaactatcaaaggtacctaatatgttttgtgtaagtataaaagaaattctggtagaggataacaagaaacatcaagcattgaggccaaggatgaactaatatgatgggcatctattttaagaagctcgattttcagacatcaactatcagttctaggatacagaagactctgaaaggccgcaagaaggtatcaacgacatatctgataactaaatatatgcaccaactgtaggaaaatagtaaaggaaggccctaaatgcccaaaattggccacaatatttcaccgtcaggtctacctactctgttatagtactgtccacactcaacagccgatctttgactgctttagttgcccctcctgttagtttaacaattctgttgagtgttgactccttccatgaattggtcacctagaaaaggtagtaaacatgtgaatgagtgggttgaagaggatgataattacctcaattatatttctgctttcataacttagtttactactttgtattaggtcaactttcagcctctgttaacaacacaattgaccaagagcggggatgagtagaagaggatgatcctggtgtgtatattactgttcgagcattgcatggtagcatcagagaactacgtaacgacgaggctgagcgacaattccagtgtcccaatgttgaataagtgaagtggatgagtcagaaagtggaggagacagtgtgcaggagcagcctgtttatgtggccgtagtggatctcgcatcctgtttgtgagcttggtattcctcctgaaaacatcactgcaaaccaattgttatttggcacattgggggagtacgccggatttgatcccacagagcccacttcacgcagtgggggtaaagcaaaagcagtgcagcaaataaaacagacaattgttacgattagtgatggcgcaactgatctggaggctcggcaacctggcggagcagactgtgtgccgccagagctagcggagggaggcgggtcattcgatttgccatgcttaggattggagaatcactagagtaatagtatatacatggtggggagtgaaaccaacagaggaagaatccgttcttgatcaaaattagtcggctgcttggttcgtcgtctgcgtgttcgatcggaggttggcgacgccttggcgtggccgctttccgcaagaaagcaaggaaattgtgctgaccgccgctaatgcgctggatatttctgggagtggaaacgaaagtgtactctgaatttcaagttcctgtcaaaagtaagatcctctgacgaagaagatggtatcatttgtcaagtgtatgttgggacttgatgctgttgtttgggacattattgggtcgtcattgttggagaaagttgtgtatctacttacagaattggatgttaatataacatgggaagatattcttcaagataaacacaacaaaggtatatttgacatggagcttgaggatttggctgaggatgaacataaccttggccgcacaagtgtggagacttgaattcatatatacttagttaggctcaatgttagcataaacagttgatgaacaagttttcccattagtattttagtttgaatttagagtacaattatgtatgagttatttgacaatgcttatttatgagatattgaatgatatttatctatattgtattaattatagtgttattaaatatatgtgtttgtatttttctc

SEQ ID NO: 203694 - DNA, 3123 bp, Zea Mays
ctccaaaactctttctcttcctcaccacaccagcaaaaccaccacaacacccctcgcactacgcgcgccgccgccgccgctagcactggtgagacgagtacggaggagcagcacagggatggacggcggcctcgaggatgagcaggaggacccaagcttcctcaaaccaccacagcacccctcgcactacgggcaccgccactgctgtcgctttcagcgtcggtaagacgagtagggaggggcaatgcagggatggacggtggcctggacggcgagttggaagacgcgggcttcctcgacgaggtattacgcgcgacggacgaggtcatcgcctcccgcaaccctaaccccgctcccgctcccgctcccatccccatgtttgactccttcgtcattgtccccgtctgagagcctcctatcttcccaccgattcgatctcccacctccccgtcgcttcgtagccccgcttcacgatcagcttctcccctccgctaatggaatgagtatttttaccggttaaagtttggttaatgaaggaatagaaaatggggttgtgcaatttcaagactcaggtgtccatggattggagaaatttccatttagatgacccatcaacatcctacattgcctggtgatcacacctgtgtcacctgtatgaatgttggtgggttcgacttgcaatgttgttacaacctgacttgactaatgctcttactcatgcttacaagtaatttgtttcattgggttttgcatgacgtctaatagaatatgttattctgtattcattgtattagtatgttgcaaggggtcataataaatcgggtagcggtaaaatattgtatgactacaagattggcgtcttgagtgcattatgttataatttaaagttcatatttccaaccaaagcaaaaatagtttatgaagcataatagtttttccaatactaaattcttgagtggcatatgtgaaagtactatagctaagacgcgatgaagtatggatcagtgtttatttaatcatttacgatgagatgttatttgtagtgttagttattcatcttcaggttgattctgtacctaactgatatatgtctgtgtgttttcagaaacccctcatatgcaaaagcttaatactgtcaaggctgctacagtggtcataggttagaataaatccatggtaaacttgaacccctacaaactaaagaaaatgccagaatagagaaagtttaagcctagagataagtgagtcaaatccataaaattggcaagtcaaatcatcagtatgaaatgtaccaaggcatattgggtgtagaactatcaaaggtacctaatatgttttgtgtaagtataaaagaaattctggtagaggataacaagaaacatcaagcattgaggccaaggatgaactaatatgatgggcatctattttaagaagctcgattttcagacatcaactatcagttctaggatacagaagactctgaaaggccgcaagaaggtatcaacgacatatctgataactaaatatatgcaccaactgtaggaaaatagtaaaggaaggccctaaatgcccaaaattggccacaatatttcaccgtcaggtctacctactctgttatagtactgtccacactcaacagccgatctttgactgctttagttgcccctcctgttagtttaacaattctgttgagtgttgactccttccatgaattggtcacctagaaaaggtagtaaacatgtgaatgagtgggttgaagaggatgataattacctcaattatatttctgctttcataacttagtttactactttgtattaggtcaactttcagcctctgttaacaacacaattgaccaagagcggggatgagtagaagaggatgatcctggtgtgtatattactgttcgagcattgcatggtagcatcagagaactacgtaacgacgaggctgagcgacaattccagtgtcccaatgtgtgacccgagttcaactcctctttcgtcgacctcgagatcccagtggatgagtcagaaagtggaggagacagtgtgcaggagcagcctgtttatgtggccgtagtggatctcgcatcctgtttgtgagcttggtattcctcctgaaaacatcactgcaaaccaattgttatttggcacattgggggagtacgccggatttgatcccacagagcccacttcacgcagtgggggtaaagcaaaagcagtgcagcaaataaaacagacaattgttacgattagtgatggcgcaactgatctggaggctcggcaacctggcggagcagactgtgtgccgccagagctagcggagggaggcgggtcattcgatttgccatgcttaggattggagaatcactagagtaatagtatatacatggtggggagtgaaaccaacagaggaagaatccgttcttgatcaaaattagtcggctgcttggttcgtcgtctgcgtgttcgatcggaggttggcgacgccttggcgtggccgctttccgcaagaaagcaaggaaattgtgctgaccgccgctaatgcgctggatatttctgggagtggaaacgaaagtgtactctgaatttcaagttcctgtcaaaagtaagatcctctgacgaaggtgtggttgtgatcatgcataaactaactgttgctgccacatggatcggagagggagatcgatccacagaagatggtatcatttgtcaagtgtatgttgggacttgatgctgttgtttgggacattattgggtcgtcattgttggagaaagttgtgtatctacttacagaattggatgttaatataacatgggaagatattcttcaagataaacacaacaaaggtatatttgacatggagcttgaggatttggctgaggatgaacataaccttggccgcacaagtgtggagacttgaattcatatatacttagttaggctcaatgttagcataaacagttgatgaacaagttttcccattagtattttagtttgaatttagagtacaattatgtatgagttatttgacaatgcttatttatgagatattgaatgatatttatctatattgtattaattatagtgttattaaatatatgtgtttgtatttttctc

SEQ ID NO: 203695 - DNA, 2428 bp, Zea Mays
ccaaaactctttctcttcctcaccacaccagcaaaaccaccacaacacccctcgcactacgcgcgccgccgccgccgctagcactggtgagacgagtacggaggagcagcacagggatggacggcggcctcgaggatgagcaggaggacccaagcttcctcaaaccaccacagcacccctcgcactacgggcaccgccactgctgtcgctttcagcgtcggtaagacgagtagggaggggcaatgcagggatggacggtggcctggacggcgagttggaagacgcgggcttcctcgacgaggtattacgcgcgacggacgaggtcatcgcctcccgcaaccctaaccccgctcccgctcccgctcccatccccatgtttgactccttcgtcattgtccccgtctgagagcctcctatcttcccaccgattcgatctcccacctccccgtcgcttcgtagccccgcttcacgatcagcttctcccctccgctaatggaatgagtatttttaccggttaaagtttggttaatgaaggaatagaaaatggggttgtgcaatttcaagactcaggtgtccatggattggagaaatttccatttagatgacccatcaacatcctacattgcctggtgatcacacctgtgtcacctgtatgaatgttggtcaactttcagcctctgttaacaacacaattgaccaagagcggggatgagtagaagaggatgatcctggtgtgtatattactgttcgagcattgcatggtagcatcagagaactacgtaacgacgaggctgagcgacaattccagtgtcccaatgttgaataagtgaagtggatgagtcagaaagtggaggagacagtgtgcaggagcagcctgtttatgtggccgtagtggatctcgcatcctgtttgtgagcttggtattcctcctgaaaacatcactgcaaaccaattgttatttggcacattgggggagtacgccggatttgatcccacagagcccacttcacgcagtgggggtaaagcaaaagcagtgcagcaaataaaacagacaattgttacgattagtgatggcgcaactgatctggaggctcggcaacctggcggagcagactgtgtgccgccagagctagcggagggaggcgggtcattcgatttgccatgcttaggattggagaatcactagagtaatagtatatacatggtggggagtgaaaccaacagaggaagaatccgttcttgatcaaaattagtcggctgcttggttcgtcgtctgcgtgttcgatcggaggttggcgacgccttggcgtggccgctttccgcaagaaagcaaggaaattgtgctgaccgccgctaatgcgctggatatttctgggagtggaaacgaaagtgtactctgaatttcaagttcctgtcaaaagtaagatcctctgacgaaggtgtggttgtgatcatgcataaactaactgttgctgccacatggatcggagagggagatcgatccacaggttggttaatggcccatgcataccaccacaccttgttccatgattcttcctttatttttcatgaagtggtgattagatgcctagctccctgttctatgttgctatagcttggttagctagggtcactgtttgtctgacagccagcaattcttgacagcaaaacttgggtgcatgtgctagctacgtacagctggttaaatacacacagagacatcacttattcacatgtgcatcatatatatatggtacagtagtgcagtgttattcttataggctattttattttttcaatagctgttgtgtctgtttacagatagtcccaacttgaattctttatagacaattggcacgcgcatggttcagaaaaactataacctctccccatggctctgttgttgtccttgacttcgttcttttctctaattctttattgggttgagcgaggggtagctaaaaaataggatgcaaactaatgttgtccagtttcaacataataagatggtatcatttgtcaagtgtatgttgggacttgatgctgttgtttgggacattattgggtcgtcattgttggagaaagttgtgtatctacttacagaattggatgttaatataacatgggaagatattcttcaagataaacacaacaaaggtatatttgacatggagcttgaggatttggctgaggatgaacataaccttggccgcacaagtgtggagacttgaattcatatatacttagttaggctcaatgttagcataaacagttgatgaacaagttttcccattagtattttagtttgaatttagagtacaattatgtatgagttatttgacaatgcttatttatgagatattgaatgatatttatctatattgtattaattatagtgttattaaatatatgtgtttgtatttttctc

SEQ ID NO: 203696 - DNA, 1969 bp, Zea Mays
ccaaaactctttctcttcctcaccacaccagcaaaaccaccacaacacccctcgcactacgcgcgccgccgccgccgctagcactggtgagacgagtacggaggagcagcacagggatggacggcggcctcgaggatgagcaggaggacccaagcttcctcaaaccaccacagcacccctcgcactacgggcaccgccactgctgtcgctttcagcgtcggtaagacgagtagggaggggcaatgcagggatggacggtggcctggacggcgagttggaagacgcgggcttcctcgacgaggtattacgcgcgacggacgaggtcatcgcctcccgcaaccctaaccccgctcccgctcccgctcccatccccatgtttgactccttcgtcattgtccccgtctgagagcctcctatcttcccaccgattcgatctcccacctccccgtcgcttcgtagccccgcttcacgatcagcttctcccctccgctaatggaatgagtatttttaccggttaaagtttggttaatgaaggaatagaaaatggggttgtgcaatttcaagactcaggtgtccatggattggagaaatttccatttagatgacccatcaacatcctacattgcctggtgatcacacctgtgtcacctgtatgaatgttggtcaactttcagcctctgttaacaacacaattgaccaagagcggggatgagtagaagaggatgatcctggtgtgtatattactgttcgagcattgcatggtagcatcagagaactacgtaacgacgaggctgagcgacaattccagtgtcccaatgtgtgacccgagttcaactcctctttcgtcgacctcgagatcccaggtactatgacacacagctaccttctcgcaacgtgatgtgggatgaattttgacctgtaggttgaataagtgaagtggatgagtcagaaagtggaggagacagtgtgcaggagcagcctgtttatgtggccgtagtggatctcgcatcctgtttgtgagcttggtattcctcctgaaaacatcactgcaaaccaattgttatttggcacattgggggagtacgccggatttgatcccacagagcccacttcacgcagtgggggtaaagcaaaagcagtgcagcaaataaaacagacaattgttacgattagtgatggcgcaactgatctggaggctcggcaacctggcggagcagactgtgtgccgccagagctagcggagggaggcgggtcattcgatttgccatgcttaggattggagaatcactagagtaatagtatatacatggtggggagtgaaaccaacagaggaagaatccgttcttgatcaaaattagtcggctgcttggttcgtcgtctgcgtgttcgatcggaggttggcgacgccttggcgtggccgctttccgcaagaaagcaaggaaattgtgctgaccgccgctaatgcgctggatatttctgggagtggaaacgaaagtgtactctgaatttcaagttcctgtcaaaagtaagatcctctgacgaagaagatggtatcatttgtcaagtgtatgttgggacttgatgctgttgtttgggacattattgggtcgtcattgttggagaaagttgtgtatctacttacagaattggatgttaatataacatgggaagatattcttcaagataaacacaacaaaggtatatttgacatggagcttgaggatttggctgaggatgaacataaccttggccgcacaagtgtggagacttgaattcatatatacttagttaggctcaatgttagcataaacagttgatgaacaagttttcccattagtattttagtttgaatttagagtacaattatgtatgagttatttgacaatgcttatttatgagatattgaatgatatttatctatattgtattaattatagtgttattaaatatatgtgtttgtatttttctc

SEQ ID NO: 203697 - DNA, 690 bp, Zea Mays
cagagctagcggagggaggcgggtcattcgatttgccatgcttaggattggagaatcactagagtaatagtatatacatggtggggagtgaaaccaacagaggaagaatccgttcttgatcaaaattagtcggctgcttggttcgtcgtctgcgtgttcgatcggagtgctgaccgccgctaatgcgctggatatttctgggagtggaaacgaaagtgtactctgaatttcaagttcctgtcaaaagtaagatcctctgacgaagaagatggtatcatttgtcaagtgtatgttgggacttgatgctgttgtttgggacattattgggtcgtcattgttggagaaagttgtgtatctacttacagaattggatgttaatataacatgggaagatattcttcaagataaacacaacaaaggtatatttgacatggagcttgaggatttggctgaggatgaacataaccttggccgcacaagtgtggagacttgaattcatatatacttagttaggctcaatgttagcataaacagttgatgaacaagttttcccattagtattttagtttgaatttagagtacaattatgtatgagttatttgacaatgcttatttatgagatattgaatgatatttatctatattgtattaattatagtgttattaaatatatgtgtttgtatttttctc

SEQ ID NO: 203698 - DNA, 2026 bp, Zea Mays
ttgtttggtttgaagccggccaaagttgcctggcctggcacagatctcaggcgttggactttgagtgcttgggctaggattccttgccaaacagacctgagtgcatgacagcgacagccttctgggctcactcgcacggtcgcacccgaaacgccgcaaatccgggcccgcagcccgacccaactcaactcaggcagacactcgccgccgccacgacgtcactagtagagccgtagagggcaagaggcgacggaatgacggagcggcaggtggcggagctgggtcccgggacggcgtgctgcggctggaaccactgtggccgccgcctcgccgctggcgccgtcgatggctccgtctccgtctatgactcccagccgccaccctcgttcaagtggcaggcccatgagcaagccattgtgaatgtcgtctggcttcctccagagtatggggatgctatagcttgtgtttgtgctgatgggacactgtctttgtgggaggaggttgctgctggttactgcatactcagatggccaagtcaaggtctacgagctcttggattcattggaattagacaagtggcagcttcaggcagagttccaaaacattactgatccaatctctagatttggaaaacctgcatgcacttctgcatccatagcatggaatccaagaagaggtggaagccaacaagctagttttgcaattggctttaattcagattcgcctcatttcaactcttgtaagatttgggagtttgaagaagctcatcagcgctggcttccacttgttgagctaggttcacctgaggatacaggagataaagtgtgtgctgtagcatgggctcctaacattggcagaccatatgagattatcgcagttgcaacctgcaaaggaattgcaatctggcatataggtttgaacgctgatgctgatggcggaccttcgacgcagaacgttgctttacttaatggccacgatggcgaggtgtggcaactggaatgggacatgggcggtatgacactcgcatcaaccggaggagatggcatggttaagctatggcaggctaatttggatggagtttggcatgagcaggctgttcttgactgcagtggatcacatgtctagggtctacgtgtttcagaaaacattttttttttgttcccagcactagaagttgctgctcttgctgcagaattatcaagtacttctttcgcttatccgcccaactattgctgtctcctgtgtggctggttgggcgctatcaaaactgggccattaacggccgtgggaccgcattgaaaagtccagaaaacgaaggtacatttgcttgtaaccttgtaattggggaagctacacagacgttgagtctaagctagtggacggaggtcgagatcaaccacgtgatgtacacgtggtcatgttcctcaaaatcttccgcaggtcctttcagatatcactgatatgcttgtaccattaaaagcagattaacacaggacgaccttcggctgcccacagatcagctatccacaatcaatgtttattttcatggtatattagatttaatattagcgctaggtttttcagatttggaggtagggagatggcagacggaaattgtggcaggatcaagcttcgctagttagctgtgacagcgttttacactaaaactgagtggtgcccagcccataagtgaggccattgtaatactgattctggcgaaccctatttgtggaagtacccaacgataaacctgctgcaggtagggatgtttttttacaattcgttttataatctgatcttatacttaaatttcatagctctaaaatttagagctcgttatcaccctagctgcaggcaaataagagaatttaccgaagtgtttcaatcttcaagtggaaggtgagtgaaatctacgggacctgtctggcgcgaatatattttgatttccatgtaacaattatacgcctttaaagtgaaaaaaatgcaaaacatttaataatttatacttctttccttaacatatgag

SEQ ID NO: 203699 - DNA, 537 bp, Zea Mays
cttttctttgcttttgttttcaaccatattatggtgttattctctggtgaaaatgggcagtgccagaagacattttacccgttctgtggagtgaatgaagaactgaagacgtttgtccatgacatgttggaagctggcaaagatggagatcacaaggctgcaccccgtggttcttatgtcgaaggcgcccgtgatgttgccgtgctagaagccatgttggaatctagtgcgaagcaaggagccccagttcaagtgaagagattctaacagatccgaaatgtcacataaaagagactacgtttcttctagggtgatttgtccattggatcatatattttcggtagtaaaatgaacattgttccaaattcatgtacataccgtcgaggttatatattaaatatatatgtgaaaaaatgacatacattagaaccaccattcctacactcgtaaaaatcatgtaccttttcttatacactagatatgttgccctattagatattataaatattagtttttttacgggaaatacgaaagaga

SEQ ID NO: 203700 - DNA, 1103 bp, Zea Mays
gtcggtgttcccactccaaaaaggttgagctttccctaaagatgctcaaggctggaaaacacgttattcaagagaaacctgcttctggatcaacaacagaagcagaaactgcactgtcaatctaccactcatttcaaaacctgttcccgcataaacccatttgggcagtcggagagaactacagatttgagcctgcctttattgagtcaagcaagctgatcaatgatattggggatatgatgcacatccaagttatcatcgaagggtcaatgaacagttcaaatccatatttcaatagcacctggagacggaattttgtgggtggtttcattctggacatgggtgttcacttcattgcaggactacgaatgcttgtaggttcagaaatcacaagcgtatcttctatctcccgtcatgtggatatggctttgccgccaccagataacatatgttccctcttccaactggaaaatggatgcgctggtgtctttgtgtttgccgtcaattcaagatcaccaaagatattatggcgggtcgatggaacaaaaggaacaattcaggtagaacgtggagttgatagtggaaaacatggctaccaggtgttattctctggtgaaaatgggcagtgccagaagacattttacccgttctgtggagtgaatgaagaactgaagacgtttgtccatgacatgttggaagctggcaaagatggagatcacaaggctgcaccccgtggttcttatgtcgaaggcgcccgtgatgttgccgtgctagaagccatgttggaatctagtgcgaagcaaggagccccagttcaagtgaagagattctaacagatccgaaatgtcacataaaagagactacgtttcttctagggtgatttgtccattggatcatatattttcggtagtaaaatgaacattgttccaaattcatgtacataccgtcgaggttatatattaaatatatatgtgaaaaaatgacatacattagaaccaccattcctacactcgtaaaaatcatgtaccttttcttatacactagatatgttgccctattagatattataaatattagtttttttacgggaaatacgaaagaga

SEQ ID NO: 203701 - DNA, 2432 bp, Zea Mays
atccctaggtacggccactacaacagtgcagagcatctgaagcgtccgattgtctttgtctccatagcagcgttggtcttcgaggtgagaagtcagcgaaggcaaatctgaagtctgcttgattgcttgagtcagatctgatccagtctttcggcaccgagaaggcgagaaccgaggaggagaacatggcgggtgacggcaacggccgcgcggagcttccccggatcgcggtgatcggcgccggtatctttgcgcgcacgcagtacatcccaaggctccgcgagatcgcgcacctcgtcgtcctcaagtccatctggagtcgcacccaggaatctgcaaaggcggccgcggagcttgctcgtgacttcgcgcctgatatcgagtgcaaatggggtgatgcggggctggaggagatcatgggagatagttcaatcatgggcgttgctattgttctcgctgggcaagtccaggttgagctttccctaaagatgctcaaggctggaaaacacgttattcaagagaaacctgcttctggatcaacaacagaagcagaaactgcactgtcaatctaccactcatttcaaaacctgttcccgcataaacccatttgggcagtcggagagaactacagatttgagcctgcctttattgagtcaagcaagctgatcaatgatattggggatatgatgcacatccaagttatcatcgaagggtcaatgaacagttcaaatccatatttcaatagcacctggagacggaattttgtgggtggtttcattctggacatgggtgttcacttcattgcaggactacgaatggtaacttcatcatgttatatttcgaagtctccttttttttctcaaaaaacacaggaaatctgggcatcattaagaagaatagagggtgtaagaacccaacagcacttacaccacacacccaaacacaacgcactcacacaacacactctacagcagccttaaaacacagacacaccaagacagctgaaggtcaacccgcacagacccaaaaaactaatcacctgggaggtgagcggacaagaggaatagtcctcaggaccctgccatggcccacaactggcgttcctcaccatccatgactaaagccccaacaacacttggacccgattcataaaaaacacaacgattatgatggttccaaagaatccaagctccaagaataattaaggaattgacacctttccttcaagactatttccagcggccttaatcatcctatctcctattttaaactctaatctgtaaacagtatagtctacagtgcaaacagtgttttgtatggtcatatgcatgatctgctggtcacatcctaattgctccaaagtagcattatctcattcccaccaataagaaaggaattttcattaggttgtgggtcggcctagagactgacctgccttagcaaatgaaatatggatcagattctgagaatatggatcggactctggcctatgctaccagaagcaacattgtttagttaataactctaatcaatttttagatttggcaccccacatccacatagaaagtttagtcctgaaaaactgcttgtgtcatcttaagttgaagtggtcagatttgccaccatgtaactcttttgatagttgtaccctttggcccaagtttcttagcaatgtttctacctactgaattgaagtgtttaagataacaaattcattcactaattcccttgtctgctttgtgaagatgaggatctttctctaacagcttgtaggttcagaaatcacaagcgtatcttctatctcccgtcatgtggatatggctttgccgccaccagataacatatgttccctcttccaactggaaaatggatgcgctggtgtctttgtgtttgccgtcaattcaagatcaccaaagatattatggcgggtcgatggaacaaaaggaacaattcagtgccagaagacattttacccgttctgtggagtgaatgaagaactgaagacgtttgtccatgacatgttggaagctggcaaagatggagatcacaaggctgcaccccgtggttcttatgtcgaaggcgcccgtgatgttgccgtgctagaagccatgttggaatctagtgcgaagcaaggagccccagttcaagtgaagagattctaacagatccgaaatgtcacataaaagagactacgtttcttctagggtgatttgtccattggatcatatattttcggtagtaaaatgaacattgttccaaattcatgtacataccgtcgaggttatatattaaatatatatgtgaaaaaatgacatacattagaaccaccattcctacactcgtaaaaatcatgtaccttttcttatacactagatatgttgccctattagatattataaatattagtttttttacgggaaatacgaaagaga

SEQ ID NO: 203702 - DNA, 2480 bp, Zea Mays
cattggcccatccctaggtacggccactacaacagtgcagagcatctgaagcgtccgattgtctttgtctccatagcagcgttggtcttcgaggtgagaagtcagcgaaggcaaatctgaagtctgcttgattgcttgagtcagatctgatccagtctttcggcaccgagaaggcgagaaccgaggaggagaacatggcgggtgacggcaacggccgcgcggagcttccccggatcgcggtgatcggcgccggtatctttgcgcgcacgcagtacatcccaaggctccgcgagatcgcgcacctcgtcgtcctcaagtccatctggagtcgcacccaggaatctgcaaaggcggccgcggagcttgctcgtgacttcgcgcctgatatcgagtgcaaatggggtgatgcggggctggaggagatcatgggagatagttcaatcatgggcgttgctattgttctcgctgggcaagtccaggttgagctttccctaaagatgctcaaggctggaaaacacgttattcaagagaaacctgcttctggatcaacaacagaagcagaaactgcactgtcaatctaccactcatttcaaaacctgttcccgcataaacccatttgggcagtcggagagaactacagatttgagcctgcctttattgagtcaagcaagctgatcaatgatattggggatatgatgcacatccaagttatcatcgaagggtcaatgaacagttcaaatccatatttcaatagcacctggagacggaattttgtgggtggtttcattctggacatgggtgttcacttcattgcaggactacgaatggtaacttcatcatgttatatttcgaagtctccttttttttctcaaaaaacacaggaaatctgggcatcattaagaagaatagagggtgtaagaacccaacagcacttacaccacacacccaaacacaacgcactcacacaacacactctacagcagccttaaaacacagacacaccaagacagctgaaggtcaacccgcacagacccaaaaaactaatcacctgggaggtgagcggacaagaggaatagtcctcaggaccctgccatggcccacaactggcgttcctcaccatccatgactaaagccccaacaacacttggacccgattcataaaaaacacaacgattatgatggttccaaagaatccaagctccaagaataattaaggaattgacacctttccttcaagactatttccagcggccttaatcatcctatctcctattttaaactctaatctgtaaacagtatagtctacagtgcaaacagtgttttgtatggtcatatgcatgatctgctggtcacatcctaattgctccaaagtagcattatctcattcccaccaataagaaaggaattttcattaggttgtgggtcggcctagagactgacctgccttagcaaatgaaatatggatcagattctgagaatatggatcggactctggcctatgctaccagaagcaacattgtttagttaataactctaatcaatttttagatttggcaccccacatccacatagaaagtttagtcctgaaaaactgcttgtgtcatcttaagttgaagtggtcagatttgccaccatgtaactcttttgatagttgtaccctttggcccaagtttcttagcaatgtttctacctactgaattgaagtgtttaagataacaaattcattcactaattcccttgtctgctttgtgaagatgaggatctttctctaacagcttgtaggttcagaaatcacaagcgtatcttctatctcccgtcatgtggatatggctttgccgccaccagataacatatgttccctcttccaactggaaaatggatgcgctggtgtctttgtgtttgccgtcaattcaagatcaccaaagatattatggcgggtcgatggaacaaaaggaacaattcaggtagaacgtggagttgatagtggaaaacatggctaccagtgccagaagacattttacccgttctgtggagtgaatgaagaactgaagacgtttgtccatgacatgttggaagctggcaaagatggagatcacaaggctgcaccccgtggttcttatgtcgaaggcgcccgtgatgttgccgtgctagaagccatgttggaatctagtgcgaagcaaggagccccagttcaagtgaagagattctaacagatccgaaatgtcacataaaagagactacgtttcttctagggtgatttgtccattggatcatatattttcggtagtaaaatgaacattgttccaaattcatgtacataccgtcgaggttatatattaaatatatatgtgaaaaaatgacatacattagaaccaccattcctacactcgtaaaaatcatgtaccttttcttatacactagatatgttgccctattagatattataaatattagtttttttacgggaaatacgaaagaga

SEQ ID NO: 203703 - DNA, 4292 bp, Zea Mays
attttcgccgctccaattcgctcatccgtccgcgcgcccctcgccgaccggccggcgcggcgccggccgacgtcctctctccggggtagtcagtcgcgcactgcgcatcgctgttgttccttccggttcctttcgcgtccccccttcggagcagggcaacgtccaagagatattatcgctgccgctgccccgcgcgggccgctcgctgtcccactcgtgcgccacgcctcggactcggaggtgtattccctcttctccccccgtgcttatccgcgacggaatccaatcccttcgctcaagtccttctcctaagcaaagccccctcgcttttggcgtatgcccccgctggcgcgcccatgattcccgccgattcctccgcccgttcagtccagcaacccttgctgctgcagtgctgcggctagttcggtggcggggaaggaggaggaggcgagatcttggagtggggcgaagcggagatgtcgttgccgtcgaacaaccggaggacgtgctcccggagcagctctgcgcggtccaagcacagcgcgcgggtggtggcacagacgcccgtggacgcgcagctgcacgccgagttcgagggctcccagcgccacttcgactactcctcgtcggtgggcgccgccaaccgcccgtcggcaagcaccagcaccgtctccacctacctccagaacatgcagcggggccgctacatccagcccttcggctgcctgctcgccgtccacccggacaccttcgcgctgctcgcctacagcgagaacgcgcccgagatgctcgacctcacgccacacgccgtccccaccatcgaccagcgggatgcgctcggcatcggcgtcgatgtgcgcacgctcttccgctcgcagagctccgtcgcgcttcacaaggccgccgccttcggggaggtcaacctactcaaccccatcctcgtgcacgccaggacgtcggggaagcccttctacgccatattgcaccggatcgacgtcggccttgtcatcgaccttgagccggtcaatccagccgacgtgccagtcaccgccgcgggcgcgctcaagtcgtacaagctcgctgccaaggccatctccaggctgcagtcgctgcccagcgggaacctgtcgttgctgtgcgatgtgcttgtccgtgaggtgagcgaactcacgggctatgaccgggtcatggcctacaagttctatgaggatgagcatggcgaggtcatttccgaatgcaggaggtccgatctggagccgtatcttggactgcactacccagccaccgacatcccgcaggcgtccaggttcctgtttatgaagaacaaagtgcggatgatatgtgattgctgtgccactccagtgaaggtcattcaggatgatagcctagcacaacctctcagcctctgtggttccacactcagggcttcccatggttgccatgcacagtacatggcaaacatgggttctgttgcatcacttgcgatgtcagtcactataaacgaggatgaggaggaagatggggataccgggagtgaccaacaaccgaaaggcaggaagctgtgggggcttgtcgtctgccatcatacaagcccgaggttcgtccctttcccactaaggtatgcttgtgagtttctcttgcaagtatttggcatacagctcaacaaggaggtggaattggctgctcaggcaaaggagaggcacatcctcagaacgcaaacccttctttgtgatatgctcctgcgggatgctcctgttgggatatttactcggtcacctaatgtgatggatctagtaaagtgcgatggagctgcattgtattaccagaaccagcttttggtgcttggatcaacaccctctgagtcagagataaagagcattgcaacatggctgcaggataatcatgatggttcaactgggctgagtactgacagcttagtggaagcgggttatcctggtgctgttgcacttcgtgaagttgtgtgtggcatggcggccataaagatctcttccaaagattttatcttctggttccgatcgcacacaacaaaggagatcaagtggggtggggctaagcatgaaccggttgatgcagatgacgatggcaggaggatgcatccacgatcttcattcaaggccttcttggaggtggttaaatggagaagtgttccctgggaagatgttgaaatggatgctatccattctttgcagttaatattacgtggctccctgccagatgaagatgccaacagaaacaatgtaaggtccattgtaaaagctccatctgatgatatgaagaagatacaggggctacttgaactgagaacagttacaaatgagatggtccgcttaattgagacagcaactgcccctgtcttggctgtcgacattgccggtaacataaatggatggaacaataaagctgcagaactaacaggtttacctgtaatggaagccatagggaggcccctgatagatcttgttgttactgattctatagaagtggttaagcagattttggactcagctttacaaggaattgaagagcaaaatatggaaatcaagcttaaaacattccatgaacatgaatgcaatggtccagtaatcttgaaggttaactcctgctgtagtcgggacctttcagagaaagtcattggagtttgctttgtagcacaagatttgaccaggcagaagatgattatggataagtatactaggatacaaggagactatgttgccatagtaaagaaccccactgagctcatccctcccatatttatgatcaatgatcttggttcctgcttagagtggaataaagctatgcagaagattaccggtataaagagggaagatgcgataaacaaattgttaattggggaggtcttcacgcttcatgattatggctgtagggtgaaagatcatgcaactctaacgaaacttagcatactgatgaatgcagtgatttctggtcaggatcctgagaagctcttttttggtttcttcgacacagatgggaagtatattgaatccttgctgacagtgaacaagaggacagatgctgagggtaagatcactggtgctctttgctttctgcatgtggccagtccagagcttcagcatgctctccaggtgcagaaaatgtcggaacaagctgcgacaaacagctttaaggaattaacttacattcgtcaagaattaaggaacccactcaatggtatgcaatttacttgtaacttattgaagccttctgaattgacagaggaacagcggcaacttctttcatctaatgttctctgtcaggaccagctgaaaaagattttacatgacactgatcttgaaagcattgaacagtgctatatggagatgaacacagtagagttcaaccttgagcaagctctgaatacggttctgatgcaaggcattcctttgggcaaggaaaaacagatttcaattgaacgtaattggcctgtggaagtatcatgcatgtacctttatggggacaatttaaggcttcagcagatcctagcagactatctagcatgcgcccttcaattcacacaaactgctgaaggacctatcgtgctccaggtcatgtctaagaaggaaaacattggatctggcatgcagattgctcatttggagttcagctccaggcgttccagaggccctgatacaggagatgttccagcacaacccaggggtgtccagggagggcctcggcctgtacataagccagaagctggtgaaaacgatgagcggcacggtacagtaccttcgagaagccgacacctcgtcgttcatcatcctgatggagttcccggtcgcccagctcagcagcaagcggtccaagccttcgacgagtaaattctgaccctcatgctgctggaactgcagcgagtgttctgccgtgtcgaagtctcggttgtagctagccaagtggctgctactgaaacatcggttggtcggttctggtatctagcacggcctgtgtagtgcggatagatttggttgtttggctttggagagataagctagctggctaggtgtaacgtaacgtcgaccgataactgtatgtgaatgatgatgagctgtgaggacgaataaaggcttcacttgtgttctctattgctcttcttagagtatgatggccaacagctgtacaggaaagcatccacctaaatctgggctcgctgaatgacggctaaaagttgtttggtggctttaaactcttttatgctttgtaatcccttacagtcggatgttggtctttaaactgtcagttaaatgctggta

SEQ ID NO: 203704 - DNA, 357 bp, Zea Mays
aacggccagatcagcaccatccccatgccactctgagaacttcccgcacctgctcagctagtcctaacccggagccacgaaggcgatccatggcggcgacgggtttgctccgacgtgcggccgcgtcgtcgctaccccgcctcccttccggaatttccctcatacagcctcctctccctgcccctctcaccgagtcgcagtcgctcgtgatccccggcatcggcgccgctgccggaccagccatggagctcatggccgtccctaagaagaaggtctccaagtacaagaagggtttgaggaatggacccaaagccttgaagtctgtgccggtcattattcgctgcaggagagcaaagc

SEQ ID NO: 203705 - DNA, 1742 bp, Zea Mays
gcactactacttagacccttacacagtgcaaccttaagcaaagggtttaatcggggattggggacactaaccgcaggagcttttgctctagtagttgcagaattgtccaaacacctgggaaaactggaggaagttattcttataacaagcatccttattgttgcctttttcacaacattgacaaagctacatccgaagatgaagccgtatgagtatggattccgtgtgttcttgttgacattctgttacgttatggtctctgggtacaacactgggaaattcactgatacagctacaagcagatttatattgattgctattggtgctgctgtcagtcttggaatcaatgtaggcatctacccaatctgggcgggagaggatttgcataacttgatagcaaagaatttcactggtgttgcaaaatccttggaaggttgtgttgatggatatctgagatgcatggaatatgaaaggattccttcaaaaatacttgtgtatcaagcatctgatgatcctgtatatagtgggtacagggcagctgttgaggcatcagcacaggaagaaaccctgcttggctttgctatatgggagccaccccatgggccttacaaaacaatgaactatccttggaggagcttcaccaaagttagtggagcattgaggcactgttcctttgcagtaatggcattacatggttgcattctttcagaaattcaggcaccaccagaaagcagaagagtattttctgcagagattcaaagagtgggacaggaaggagctaaagtattgcgcgagctcggaagcagagttaagacaatgaccaagctgagttcttcaggtattctgttcgaagtgcacatggcagctgaagagctgcaaaaaaagattgatgagaagtcatatcttctggtgaacactgaacgatgggatgctagcaagcaagctcaaggaatcaaagaagttgtaaatggtacccgtgctgtggaaacggaaaacaagaacaaagaaaacaaggatgatggcaccagtgctgtcgaaaaagaaaacaaatccaaagaaaacaacaatggagggctggaacctaccatagttgatcaaactttagtgcatcagtcaaagagctttcttgcaaattcatttctgagcagatatgattcagcgtcaacaattgacggttttaagccagcactttcttggcctgctcgtaaatcattccatccaaacataccacttgaagatgaggattcccaaacatatgaaagcgcgagtgccttgtccttggctacatttgcatcactcctgattgagtttgttgccagactacagaatgttgttaacgcatttgaagagttgagtgagaaggctaactttaaggatcctgtggtggagcctactgcagttagcacaagtaatgttaggtttctcgataaactgtgcaaatttgtaggtttctagagttgacacggatcctgtgaaggctaactctaaggatcctgttttggcatccagtttccctttttaaaattaatttgggggtacggaatgtacactaaacttgtaaatgtgcaatcagatgattgcaagttgtattgctggagttcagtttacagctacagaaatcatcaatctggtaaatgttgatctctgcatctgctgtattgtgttttcagcgccctgactgattgcacgtatgtatatcctgtgaaaagccagcttttcatatatttttttgcactcaccag

SEQ ID NO: 203706 - DNA, 2206 bp, Zea Mays
ctcagcggggtcgtcgggactcgggactcggtcctcggattcggaggcggaccagtgatataccaaacccaggccgcgaaacaaaccagtcgccgacctccctccatccttccctctcaggcacgcagctcgcgtggcattgcgttgcgcggcctgcttctctccggtctccaccgcgccgcgatcgacagcccggccagcgagctcctctcctccgccttctcctcttctaccgctcccgatcacgcggccgcgacatggaggacgacgaggggaagaagcagcaccaacggatcatccccaacgccaacggccacgtcatgatcgtggtccccgacgacgcgcacgcgcacgcgctgcccgcctccgcctccgctcctcctcgtgacgccgacggcccagacgaggagagcggggacgaggaggagcggacgccggcgggggccacgtcctcgctgtggcgagcagcggtgctggcgctcgcggcgctggcgctggcggcggcggcctacgcctgcctgtacgcgggtggggacgacgacgccggcgcggcctggcgcctcttggaggcgcggcggcaggaggacggcggcgacgacgagcacccgggcggccgcacgtccttcctgctgccgctctacccgaagccaccacgccgcggcggcgacgactggccgcagaattccacgttattcccgcactcgctcgccggcaacctcttcccggaagggctatactacaccgctatctctttgggcagtcctccaaggccttattttcttgacgtcgacactgggagccacacaacatgggtccagtgcgacgcgccgccatgcgcgagctgtgcaaagggagctcaccctttatataggcccgcaaggacggcggatgcacttcctgccagcgacccactttgtgaaggagcccagcatgagaacccaaaccagtgcgactatgagatcagctatgccgacggaagctcctccatgggcgtttatgtaagggacagtatgcaattcgtcggcgaagatggtgaaagggagaatgcagacattgtgtttgggtgcgggtacgaccagcagggagttcttttgaacgcactagaaaccaccgacggagttctcggcctgaccaacaaggcactgagccttcctacacagctagccagcagaggtatcatttccaatgcgttcggccactgcatgtcgacagatcccagcggtgctggtggttacttgtttcttggcgacgattacattcccaggtggggaatgacttgggtccctatccgcgatggtccagcagaagcccaagtcaagcagataaaccatggggatcaacagctcaatgcgcaagggaagttgactcaagtggtctttgacactgggtccacatacacatatttcccagacgaggcgcttacaagattgatatcttcgctgaaggaggctgcatccccaaggttcgtacaagatgactcggacaaaacacttcctttctgcatgaaatctgattttccagtgaggtctgtggaggatgtgaagcattttttcaagcccttgagtctgcaattcgagaaacggtttttcttctccaggaccttcaacatccgccccgaacattacttggtcatcagtgacaagggcaatgtctgcctcggggtgctcaatgggacaacgatcggttacgattcagtagtaatagtcggagatgtttctcttcgtgggaaattggttgcttacgacaacgataagaatgaggtcgggtgggttgatttcgactgcaccaaccctcgcaaacgaagcaggattccttccttcctgcgacgagcgttgcgcaaccaacttctgtaaatactggctactgtgagactggctatgcttgttcttattacagacgtgctattccgcgtctgaattctgaaactgccatggaaccctcctataatcgtcgctgtaatcgtgtggagggatgtaactacgaggtagtaaaaaagcggttacaggacaggaaatagtggaaaggtagataagcatagatagtatatagtcaaaagaggtcatgtttgctatgttgtagagatctctcactttttaagactaaagtggggaagcataatccatagcagttcatttaaaaaaattggctggagcactgccatgtcatagaggctgggacagttgtgatacttctgattggtattcag

SEQ ID NO: 203707 - DNA, 2050 bp, Zea Mays
cggattcggaggcggaccagtgatataccaaacccaggccgcgaaacaaaccagtcgccgacctccctccatccttccctctcaggcacgcagctcgcgtggcattgcgttgcgcggcctgcttctctccggtctccaccgcgccgcgatcgacagcccggccagcgagctcctctcctccgccttctcctcttctaccgctcccgatcacgcggccgcgacatggaggacgacgaggggaagaagcagcaccaacggatcatccccaacgccaacggccacgtcatgatcgtggtccccgacgacgcgcacgcgcacgcgctgcccgcctccgcctccgctcctcctcgtgacgccgacggcccagacgaggagagcggggacgaggaggagcggacgccggcgggggccacgtcctcgctgtggcgagcagcggtgctggcgctcgcggcgctggcgctggcggcggcggcctacgcctgcctgtacgcgggtggggacgacgacgccggcgcggcctggcgcctcttggaggcgcggcggcaggaggacggcggcgacgacgagcacccgggcggccgcacgtccttcctgctgccgctctacccgaagccaccacgccgcggcggcgacgactggccgcagaattccacgttattcccgcactcgctcgccggcaacctcttcccggaagggctatactacaccgctatctctttgggcagtcctccaaggccttattttcttgacgtcgacactgggagccacacaacatgggtccagtgcgacgcgccgccatgcgcgagctgtgcaaagggagctcaccctttatataggcccgcaaggacggcggatgcacttcctgccagcgacccactttgtgaaggagcccagcatgagaacccaaaccagtgcgactatgagatcagctatgccgacggaagctcctccatgggcgtttatgtaagggacagtatgcaattcgtcggcgaagatggtgaaagggagaatgcagacattgtgtttgggtgcgggtacgaccagcagggagttcttttgaacgcactagaaaccaccgacggagttctcggcctgaccaacaaggcactgagccttcctacacagctagccagcagagtgatgtacgcagagcccaagtcaagcagataaaccatggggatcaacagctcaatgcgcaagggaagttgactcaagtggtctttgacactgggtccacatacacatatttcccagacgaggcgcttacaagattgatatcttcgctgaaggaggctgcatccccaaggttcgtacaagatgactcggacaaaacacttcctttctgcatgaaatctgattttccagtgaggtctgtggaggatgtgaagcattttttcaagcccttgagtctgcaattcgagaaacggtttttcttctccaggaccttcaacatccgccccgaacattacttggtcatcagtgacaagggcaatgtctgcctcggggtgctcaatgggacaacgatcggttacgattcagtagtaatagtcggagatgtttctcttcgtgggaaattggttgcttacgacaacgataagaatgaggtcgggtgggttgatttcgactgcaccaaccctcgcaaacgaagcaggattccttccttcctgcgacgagcgttgcgcaaccaacttctgtaaatactggctactgtgagactggctatgcttgttcttattacagacgtgctattccgcgtctgaattctgaaactgccatggaaccctcctataatcgtcgctgtaatcgtgtggagggatgtaactacgaggtagtaaaaaagcggttacaggacaggaaatagtggaaaggtagataagcatagatagtatatagtcaaaagaggtcatgtttgctatgttgtagagatctctcactttttaagactaaagtggggaagcataatccatagcagttcatttaaaaaaattggctggagcactgccatgtcatagaggctgggacagttgtgatacttctgattggtattcag

SEQ ID NO: 203708 - DNA, 2026 bp, Zea Mays
ctccatccttccctctcaggcacgcagctcgcgtggcattgcgttgcgcggcctgcttctctccggtctccaccgcgccgcgatcgacagcccggccagcgagctcctctcctccgccttctcctcttctaccgctcccgatcacgcggccgcgacatggaggacgacgaggggaagaagcagcaccaacggatcatccccaacgccaacggccacgtcatgatcgtggtccccgacgacgcgcacgcgcacgcgctgcccgcctccgcctccgctcctcctcgtgacgccgacggcccagacgaggagagcggggacgaggaggagcggacgccggcgggggccacgtcctcgctgtggcgagcagcggtgctggcgctcgcggcgctggcgctggcggcggcggcctacgcctgcctgtacgcgggtggggacgacgacgccggcgcggcctggcgcctcttggaggcgcggcggcaggaggacggcggcgacgacgagcacccgggcggccgcacgtccttcctgctgccgctctacccgaagccaccacgccgcggcggcgacgactggccgcagaattccacgttattcccgcactcgctcgccggcaacctcttcccggaagggctatactacaccgctatctctttgggcagtcctccaaggccttattttcttgacgtcgacactgggagccacacaacatgggtccagtgcgacgcgccgccatgcgcgagctgtgcaaagggagctcaccctttatataggcccgcaaggacggcggatgcacttcctgccagcgacccactttgtgaaggagcccagcatgagaacccaaaccagtgcgactatgagatcagctatgccgacggaagctcctccatgggcgtttatgtaagggacagtatgcaattcgtcggcgaagatggtgaaagggagaatgcagacattgtgtttgggtgcgggtacgaccagcagggagttcttttgaacgcactagaaaccaccgacggagttctcggcctgaccaacaaggcactgagccttcctacacagctagccagcagaggtggggaatgacttgggtccctatccgcgatggtccagcagatgatgtacgcagagcccaagtcaagcagataaaccatggggatcaacagctcaatgcgcaagggaagttgactcaagtggtctttgacactgggtccacatacacatatttcccagacgaggcgcttacaagattgatatcttcgctgaaggaggctgcatccccaaggttcgtacaagatgactcggacaaaacacttcctttctgcatgaaatctgattttccagtgaggtctgtggaggatgtgaagcattttttcaagcccttgagtctgcaattcgagaaacggtttttcttctccaggaccttcaacatccgccccgaacattacttggtcatcagtgacaagggcaatgtctgcctcggggtgctcaatgggacaacgatcggttacgattcagtagtaatagtcggagatgtttctcttcgtgggaaattggttgcttacgacaacgataagaatgaggtcgggtgggttgatttcgactgcaccaaccctcgcaaacgaagcaggattccttccttcctgcgacgagcgttgcgcaaccaacttctgtaaatactggctactgtgagactggctatgcttgttcttattacagacgtgctattccgcgtctgaattctgaaactgccatggaaccctcctataatcgtcgctgtaatcgtgtggagggatgtaactacgaggtagtaaaaaagcggttacaggacaggaaatagtggaaaggtagataagcatagatagtatatagtcaaaagaggtcatgtttgctatgttgtagagatctctcactttttaagactaaagtggggaagcataatccatagcagttcatttaaaaaaattggctggagcactgccatgtcatagaggctgggacagttgtgatacttctgattggtattcag

SEQ ID NO: 203709 - DNA, 3487 bp, Zea Mays
ttgtttggtttgaagccggccaaagttgcctggcctggcacagatctcaggcgttggactttgagtgcttgggctaggattccttgccaaacagacctgagtgcatgacagcgacagccttctgggctcactcgcacggtcgcacccgaaacgccgcaaatccgggcccgcagcccgacccaactcaactcaggcagacactcgccgccgccacgacgtcactagtagagccgtagagggcaagaggcgacggaatgacggagcggcaggtggcggagctgggtcccgggacggcgtgctgcggctggaaccactgtggccgccgcctcgccgctggcgccgtcgatggctccgtctccgtctatgactcccagccgccaccctcgttcaagtggcaggcccatgagcaagccattgtgaatgtcgtctggcttcctccagagtatggggatgctatagcttgtgtttgtgctgatgggacactgtctttgtgggaggaggttgctgctgatgatcaacttccaacctggagaaattgtaaaatcttcgaggatggcaactctcatatactaaatgtacattttggattacatctgggaattctgaaaatggttactgcatactcagatggccaagtcaaggtctacgagctcttggattcattggaattagacaagtggcagcttcaggcagagttccaaaacattactgatccaatctctagatttggaaaacctgcatgcacttctgcatccatagcatggaatccaagaagaggtggaagccaacaagctagttttgcaattggctttaattcagattcgcctcatttcaactcttgtaagatttgggagtttgaagaagctcatcagcgctggcttccacttgttgagctaggttcacctgaggatacaggagataaagtgtgtgctgtagcatgggctcctaacattggcagaccatatgagattatcgcagttgcaacctgcaaaggaattgcaatctggcatataggtttgaacgctgatgctgatggcggaccttcgacgcagaacgttgctttacttaatggccacgatggcgaggtgtggcaactggaatgggacatgggcggtatgacactcgcatcaaccggaggagatggcatggttaagctatggcaggctaatttggatggagtttggcatgagcaggctgttcttgactgcagtggatcacatgtctagggtctacgtgtttcagaaaacattttttttttgttcccagcactagaagttgctgctcttgctgcagaattatcaagtacttctttcgcttatccgcccaactattgctgtctcctgtgtggctggttgggcgctatcaaaactgggccattaacggccgtgggaccgcattgaaaagtccagaaaacgaaggtacatttgcttgtaaccttgtaattggggaagctacacagacgttgagtctaagctagtggacggaggtcgagatcaaccacgtgatgtacacgtggactgtcttagtaacttctagcacattgttttgcatgatctgaatggattagcaagccgttgtcacggagtatcatggcaggaagcatctggaacacatgtattttctgctttcggatttgttcataagatcgctacctttgagaaagcatctggttatcaggctttgattcagttttctgatgctgaaactgcaacatctgcaaaagctgcactggatggtagatgcattcctagctatttgctaccagaactggatgtggcctgcactttgagaataacctattcagcacacagtgttctcaacgtcaagtatcagagccacaggagtaggtaaggtttactcagttgtcaagcgagattttttattctacatcctgtttgatggatggattctgcgagttttacccattgaattgtttcattttgcatggaaaagtatttttgtctgtcagatcattactttataaatctgggtggtttgtaatattcaaggaatcatatgactcttgattatcctttgctgttttctttagggacttcactaatccttaccttccttttctggactctgctaaagatggctctggaccggatggaaaaaaacaggaagcagagagcaatatactgcttgcttctattgagaacatgcaatatgttgttacaatagatgtgcttcatgaggtcttttcagcttttggatttgtacagaagattgctatttttgagaagaatggctttcaagcattgatccagtatccagacattcaaactgcgtatgcagcaaaagaagcactagaagggcacagcatctatgaaggtggctactgcaaactgcacctcacattttcacgccatactgagcttaatgttaaggttaacaatgagcgaggtagagattataccaaggggaatgccactccaagcagtgatcaaccttccattcttggtcctcagccaataccaagcgttggtgctgctattccaccagcacagggtagtgttccttctgcagccaccaattcagtaatgccaccaggggatccatcagttgctctaccttctaatccttccagtgagccactcctgcaagcacctgttgtttcctctggagggcctccgcattaccctaatcaggccatcctacaaggcccacttggtgttgttgcacggttcccaggctatggtgccctgcagtttgctcagggctcagctcaagctcaaatggtgcagccttcaggccaaggaagtcaacatatgtcaggtcatgtaaattatcagctacctccaggttcagcccaattcatgcagtatctcagcaacggaagccatccacttccaaacgcacctgggccacagacaatgccttaccctgccctcagtgggcagcagctacctccgggtcttcagatgatgcaagctcaaggttttggaggcctgccgttttcacagggtcctggacaaccaatgccacagttcccaatgtatggcacccagcagtttcctccgggtatggagcccaagatgatgcgcttctctgagcagggaggccagcagtttacatttgcgccgcggggtccaaatagtcgttagcaaatttgaacttagcaacgttagatcgttgatggtgatgaatggatgtcaagccttctatgttgctgttttctaaggtgaataccgatgctgttccattactaggatctatacttggtttatctctcgtactgtggccaaaacaaatgtctaatctgaggtttcgtagccttgtatttgtatcgatttcctcacgcccgcagcttctgcctgcactgtgttacattacggttatactgcagtagtggaagcaaatgtaaaagaaacctagagacctgatgtgccaggttgaaagcccgtagctgcaaactgtaggctcacatcgcgtccagttataaatttgtttgtgctatgttaagagtacaattgtacaaaccaag

SEQ ID NO: 203710 - DNA, 4000 bp, Zea Mays
ctcgaagcccattattataacctatcaacgggcctattcagatttcagaggtcgatacggaaccctaggcgtctatccattagaaaattggactgattgaccgcaccgattccgcgatacgttcccgaatccaacccatcttcgtccgctccggccactcgtttcgccgccgtcggtcgccacccgcaaggtttggaggataagattcgggagggatggcttccggtgggcagccgcagttccggtacacgcagccgccgtcgaaggtgctccacctgcggaatctgccgtgggactgcactccagaggagctggtcgagctggggacccccttcggcaaggtcgtcaacaccaagtgcggcgtcggcgccaaccgcaatcaggcattcatcgaattcggcgaccaaaatcaagctattgccatgatatcatattacgcatcgtcaacagagccagcacaggtaagagggaaaaatgtgtaccttcagtactcaaatagacaggagattgtcaacaacaaggcaactggggaaggttcaggcaacgttttgcttgtgggaatggagggtgttgcaccagattctgtcagcattgatgttctacacgtggaatactttgatgtgccaggactgtcttagtaacttctagcacattgttttgcatgatctgaatggattagcaagccgttgtcacggagtatcatggcaggaagcatctggaacacatgtctgtgtttgtttcctctcccttactcatcgctgccctactcctcccctaccctccctcccctgcacctcttctccctacctttcccctcccataccctttcatccaagtaccctcttagggttggtcacatctaccttcgtcgatgtccgttttagttgttattataagttgtatctagttagtgcctaaggttggtggatgcatttttctcaatggaggtcgtttctgattggttacattggtagctggcatatttgtatgattattatcaagtgctcttctctggatttagtaagggaaaagaaagagaaaaggaacataaaatgtaatgcatcaataatagtaaataaatattcttgttttcactaacgccccgtttggatcctcggaattgaattccattctaataatagtaatttaggcaaatatcaattaagctagtatagttttatgcaaaatatatttgtatactattattactttattagcaatatgtgggagatatttatgtgctgcatttttactacagaggagtgagtagaagagtgtcttataagttgcagagtagaaacatattccactgatacacaaaatcattttctatcctccacccccatgaatttgagatagtcttatatctgaactgtggaaagtggcggaatatcaaattccaagccaaatagactactctattaagtaaatttcaattccttcaaaatgaatagatccaaatggcccataaggtaaatataatgaacttgattggcacaaatttgtcatttggttgcactgatttgtgtaacggtttaataccatctttcaagcaggattttagctccttattacagatctgcaagctaccaactcgagttatttgcatctgtatgttgattaaaagaattactttacaatcttctacatgatgattagattataattcttttgcaatcttttatgtgttaattacaagaactatcttgtgtttatcctccatagtgtcatttggttgacgcacctttaatacgctgttaaggcgagcttcaaaattggaacatgtggattatcagttcataaagaaacatctgtctgaacagtttaatgagtttcactcactttccactgtgaatattgtagatttgatcactttgttactggcgcatgaatgaatgcttgttagctgtgctcgtttctgatctctttctctagacaatccttacaaagcctagaaatgcattgattgatttgattctaatactttaataacagcttgatgtcacaattttacccaggagtgatgataaattcatctgcattatctgtactagcaggttgaaaggttttgaacatgtacagttgtgtgctagtctgctagtacccttgattcattgttattggttattgccgacaaaaactttattgtagttgtaagcttttctgtatgtttgtataaatattaattttgtttggcgtagagatcagacaacctttggctgccactttcaatttaagatcatttcactttccagatatattggtgcatgcatttggttttactataatgtttcacatgtggtattaacagttgacgtatgtgtgcacaggtattttctgctttcggatttgttcataagatcgctacctttgagaaagcatctggttatcaggctttgattcagttttctgatgctgaaactgcaacatctgcaaaagctgcactggatggtagatgcattcctagctatttgctaccagaactggatgtggcctgcactttgagaataacctattcagcacacagtgttctcaacgtcaagtatcagagccacaggagtagggacttcactaatccttaccttccttttctggactctgctaaagatggctctggaccggatggaaaaaaacaggaagcagagagcaatatactgcttgcttctattgagaacatgcaatatgttgttacaatagatgtgcttcatgaggtcttttcagcttttggatttgtacagaagattgctatttttgagaagaatggctttcaagcattgatccagtatccagacattcaaactgcgtatgcagcaaaagaagcactagaagggcacagcatctatgaaggtggctactgcaaactgcacctcacattttcacgccatactgagcttaatgttaaggttaacaatgagcgaggtagagattataccaaggggaatgccactccaagcagtgatcaaccttccattcttggtcctcagccaataccaagcgttggtgctgctattccaccagcacagggtagtgttccttctgcagccaccaattcagtaatgccaccaggggatccatcagttgctctaccttctaatccttccagtgagccactcctgcaagcacctgttgtttcctctggagggcctccgcattaccctaatcaggccatcctacaaggcccacttggtgttgttgcacggttcccaggctatggtgccctgcagtttgctcagggctcagctcaagctcaaatggtgcagccttcaggccaaggaagtcaacatatgtcaggtcatgtaaattatcagctacctccaggttcagcccaattcatgcagtatctcagcaacggaagccatccacttccaaacgcacctgggccacagacaatgccttaccctgccctcagtgggcagcagctacctccgggtcttcagatgatgcaagctcaaggttttggaggcctgccgttttcacagggtcctggacaaccaatgccacagttcccaatgtatggcacccagcagtttcctccgggtatggagcccaagatgatgcgcttctctgagcagggaggccagcagtttacatttgcgccgcggggtccaaatagtcgttagcaaatttgaacttagcaacgttagatcgttgatggtgatgaatggatgtcaagccttctatgttgctgttttctaaggtgaataccgatgctgttccattactaggatctatacttggtttatctctcgtactgtggccaaaacaaatgtctaatctgaggtttcgtagccttgtatttgtatcgatttcctcacgcccgcagcttctgcctgcactgtgttacattacggttatactgcagtagtggaagcaaatgtaaaagaaacctagagacctgatgtgccaggttgaaagcccgtagctgcaaactgtaggctcacatcgcgtccagttataaatttgtttgtgctatgttaagagtacaattgtacaaaccaag

SEQ ID NO: 203711 - DNA, 2106 bp, Zea Mays
caacgggcctattcagatttcagaggtcgatacggaaccctaggcgtctatccattagaaaattggactgattgaccgcaccgattccgcgatacgttcccgaatccaacccatcttcgtccgctccggccactcgtttcgccgccgtcggtcgccacccgcaaggtttggaggataagattcgggagggatggcttccggtgggcagccgcagttccggtacacgcagccgccgtcgaaggtgctccacctgcggaatctgccgtgggactgcactccagaggagctggtcgagctggggacccccttcggcaaggtcgtcaacaccaagtgcggcgtcggcgccaaccgcaatcaggcattcatcgaattcggcgaccaaaatcaagctattgccatgatatcatattacgcatcgtcaacagagccagcacaggtattttctgctttcggatttgttcataagatcgctacctttgagaaagcatctggttatcaggctttgattcagttttctgatgctgaaactgcaacatctgcaaaagctgcactggatggtagatgcattcctagctatttgctaccagaactggatgtggcctgcactttgagaataacctattcagcacacagtgttctcaacgtcaagtatcagagccacaggagtagggacttcactaatccttaccttccttttctggactctgctaaagatggctctggaccggatggaaaaaaacaggaagcagagagcaatatactgcttgcttctattgagaacatgcaatatgttgttacaatagatgtgcttcatgaggtcttttcagcttttggatttgtacagaagattgctatttttgagaagaatggctttcaagcattgatccagtatccagacattcaaactgcgtatgcagcaaaagaagcactagaagggcacagcatctatgaaggtggctactgcaaactgcacctcacattttcacgccatactgagcttaatgttaaggttaacaatgagcgaggtagagattataccaaggggaatgccactccaagcagtgatcaaccttccattcttggtcctcagccaataccaagcgttggtgctgctattccaccagcacagggtagtgttccttctgcagccaccaattcagtaatgccaccaggggatccatcagttgctctaccttctaatccttccagtgagccactcctgcaagcacctgttgtttcctctggagggcctccgcattaccctaatcaggccatcctacaaggcccacttggtgttgttgcacggttcccaggctatggtgccctgcagtttgctcagggctcagctcaagctcaaatggtgcagccttcaggccaaggaagtcaacatatgtcaggtcatgtaaattatcagctacctccaggttcagcccaattcatgcagtatctcagcaacggaagccatccacttccaaacgcacctgggccacagacaatgccttaccctgccctcagtgggcagcagctacctccgggtcttcagatgatgcaagctcaaggttttggaggcctgccgttttcacagggtcctggacaaccaatgccacagttcccaatgtatggcacccagcagtttcctccgggtatggagcccaagatgatgcgcttctctgagcagggaggccagcagtttacatttgcgccgcggggtccaaatagtcgttagcaaatttgaacttagcaacgttagatcgttgatggtgatgaatggatgtcaagccttctatgttgctgttttctaaggtgaataccgatgctgttccattactaggatctatacttggtttatctctcgtactgtggccaaaacaaatgtctaatctgaggtttcgtagccttgtatttgtatcgatttcctcacgcccgcagcttctgcctgcactgtgttacattacggttatactgcagtagtggaagcaaatgtaaaagaaacctagagacctgatgtgccaggttgaaagcccgtagctgcaaactgtaggctcacatcgcgtccagttataaatttgtttgtgctatgttaagagtacaattgtacaaaccaag

SEQ ID NO: 203712 - DNA, 2295 bp, Zea Mays
ggcctattcagatttcagaggtcgatacggaaccctaggcgtctatccattagaaaattggactgattgaccgcaccgattccgcgatacgttcccgaatccaacccatcttcgtccgctccggccactcgtttcgccgccgtcggtcgccacccgcaaggtttggaggataagattcgggagggatggcttccggtgggcagccgcagttccggtacacgcagccgccgtcgaaggtgctccacctgcggaatctgccgtgggactgcactccagaggagctggtcgagctggggacccccttcggcaaggtcgtcaacaccaagtgcggcgtcggcgccaaccgcaatcaggcattcatcgaattcggcgaccaaaatcaagctattgccatgatatcatattacgcatcgtcaacagagccagcacaggtaagagggaaaaatgtgtaccttcagtactcaaatagacaggagattgtcaacaacaaggcaactggggaaggttcaggcaacgttttgcttgtgggaatggagggtgttgcaccagattctgtcagcattgatgttctacacgtgcaagccgttgtcacggagtatcatggcaggaagcatctggaacacatgtattttctgctttcggatttgttcataagatcgctacctttgagaaagcatctggttatcaggctttgattcagttttctgatgctgaaactgcaacatctgcaaaagctgcactggatggtagatgcattcctagctatttgctaccagaactggatgtggcctgcactttgagaataacctattcagcacacagtgttctcaacgtcaagtatcagagccacaggagtagggacttcactaatccttaccttccttttctggactctgctaaagatggctctggaccggatggaaaaaaacaggaagcagagagcaatatactgcttgcttctattgagaacatgcaatatgttgttacaatagatgtgcttcatgaggtcttttcagcttttggatttgtacagaagattgctatttttgagaagaatggctttcaagcattgatccagtatccagacattcaaactgcgtatgcagcaaaagaagcactagaagggcacagcatctatgaaggtggctactgcaaactgcacctcacattttcacgccatactgagcttaatgttaaggttaacaatgagcgaggtagagattataccaaggggaatgccactccaagcagtgatcaaccttccattcttggtcctcagccaataccaagcgttggtgctgctattccaccagcacagggtagtgttccttctgcagccaccaattcagtaatgccaccaggggatccatcagttgctctaccttctaatccttccagtgagccactcctgcaagcacctgttgtttcctctggagggcctccgcattaccctaatcaggccatcctacaaggcccacttggtgttgttgcacggttcccaggctatggtgccctgcagtttgctcagggctcagctcaagctcaaatggtgcagccttcaggccaaggaagtcaacatatgtcaggtcatgtaaattatcagctacctccaggttcagcccaattcatgcagtatctcagcaacggaagccatccacttccaaacgcacctgggccacagacaatgccttaccctgccctcagtgggcagcagctacctccgggtcttcagatgatgcaagctcaaggttttggaggcctgccgttttcacagggtcctggacaaccaatgccacagttcccaatgtatggcacccagcagtttcctccgggtatggagcccaagatgatgcgcttctctgagcagggaggccagcagtttacatttgcgccgcggggtccaaatagtcgttagcaaatttgaacttagcaacgttagatcgttgatggtgatgaatggatgtcaagccttctatgttgctgttttctaaggtgaataccgatgctgttccattactaggatctatacttggtttatctctcgtactgtggccaaaacaaatgtctaatctgaggtttcgtagccttgtatttgtatcgatttcctcacgcccgcagcttctgcctgcactgtgttacattacggttatactgcagtagtggaagcaaatgtaaaagaaacctagagacctgatgtgccaggttgaaagcccgtagctgcaaactgtaggctcacatcgcgtccagttataaatttgtttgtgctatgttaagagtacaattgtacaaaccaag

SEQ ID NO: 203713 - DNA, 3154 bp, Zea Mays
acggaaccctaggcgtctatccattagaaaattggactgattgaccgcaccgattccgcgatacgttcccgaatccaacccatcttcgtccgctccggccactcgtttcgccgccgtcggtcgccacccgcaaggtttggaggataagattcgggagggatggcttccggtgggcagccgcagttccggtacacgcagccgccgtcgaaggtgctccacctgcggaatctgccgtgggactgcactccagaggagctggtcgagctggggacccccttcggcaaggtcgtcaacaccaagtgcggcgtcggcgccaaccgcaatcaggcattcatcgaattcggcgaccaaaatcaagctattgccatgatatcatattacgcatcgtcaacagagccagcacaggtaagagggaaaaatgtgtaccttcagtactcaaatagacaggagattgtcaacaacaaggcaactggggaaggttcaggcaacgttttgcttgtgggaatggagggtgttgcaccagattctgtcagcattgatgttctacacgtgcaagccgttgtcacggagtatcatggcaggaagcatctggaacacatgtctgtgtttgtttcctctcccttactcatcgctgccctactcctcccctaccctccctcccctgcacctcttctccctacctttcccctcccataccctttcatccaagtaccctcttagggttggtcacatctaccttcgtcgatgtccgttttagttgttattataagttgtatctagttagtgcctaaggttggtggatgcatttttctcaatggaggtcgtttctgattggttacattggtagctggcatatttgtatgattattatcaagtgctcttctctggatttagtaagggaaaagaaagagaaaaggaacataaaatgtaatgcatcaataatagtaaataaatattcttgttttcactaacgccccgtttggatcctcggaattgaattccattctaataatagtaatttaggcaaatatcaattaagctagtatagttttatgcaaaatatatttgtatactattattactttattagcaatatgtgggagatatttatgtgctgcatttttactacagaggagtgagtagaagagtgtcttataagttgcagagtagaaacatattccactgatacacaaaatcattttctatcctccacccccatgaatttgagatagtcttatatctgaactgtggaaagtggcggaatatcaaattccaagccaaatagactactctattaagtaaatttcaattccttcaaaatgaatagatccaaatggcccataaggtaaatataatgaacttgattggcacaaatttgtcatttggttgcactgatttgtgtaacggtttaataccatctttcaagcaggattttagctccttattacagatctgcaagctaccaactcgagttatttgcatctgtattttctgctttcggatttgttcataagatcgctacctttgagaaagcatctggttatcaggctttgattcagttttctgatgctgaaactgcaacatctgcaaaagctgcactggatggtagatgcattcctagctatttgctaccagaactggatgtggcctgcactttgagaataacctattcagcacacagtgttctcaacgtcaagtatcagagccacaggagtagggacttcactaatccttaccttccttttctggactctgctaaagatggctctggaccggatggaaaaaaacaggaagcagagagcaatatactgcttgcttctattgagaacatgcaatatgttgttacaatagatgtgcttcatgaggtcttttcagcttttggatttgtacagaagattgctatttttgagaagaatggctttcaagcattgatccagtatccagacattcaaactgcgtatgcagcaaaagaagcactagaagggcacagcatctatgaaggtggctactgcaaactgcacctcacattttcacgccatactgagcttaatgttaaggttaacaatgagcgaggtagagattataccaaggggaatgccactccaagcagtgatcaaccttccattcttggtcctcagccaataccaagcgttggtgctgctattccaccagcacagggtagtgttccttctgcagccaccaattcagtaatgccaccaggggatccatcagttgctctaccttctaatccttccagtgagccactcctgcaagcacctgttgtttcctctggagggcctccgcattaccctaatcaggccatcctacaaggcccacttggtgttgttgcacggttcccaggctatggtgccctgcagtttgctcagggctcagctcaagctcaaatggtgcagccttcaggccaaggaagtcaacatatgtcaggtcatgtaaattatcagctacctccaggttcagcccaattcatgcagtatctcagcaacggaagccatccacttccaaacgcacctgggccacagacaatgccttaccctgccctcagtgggcagcagctacctccgggtcttcagatgatgcaagctcaaggttttggaggcctgccgttttcacagggtcctggacaaccaatgccacagttcccaatgtatggcacccagcagtttcctccgggtatggagcccaagatgatgcgcttctctgagcagggaggccagcagtttacatttgcgccgcggggtccaaatagtcgttagcaaatttgaacttagcaacgttagatcgttgatggtgatgaatggatgtcaagccttctatgttgctgttttctaaggtgaataccgatgctgttccattactaggatctatacttggtttatctctcgtactgtggccaaaacaaatgtctaatctgaggtttcgtagccttgtatttgtatcgatttcctcacgcccgcagcttctgcctgcactgtgttacattacggttatactgcagtagtggaagcaaatgtaaaagaaacctagagacctgatgtgccaggttgaaagcccgtagctgcaaactgtaggctcacatcgcgtccagttataaatttgtttgtgctatgttaagagtacaattgtacaaaccaag

SEQ ID NO: 203714 - DNA, 3197 bp, Zea Mays
aaattggactgattgaccgcaccgattccgcgatacgttcccgaatccaacccatcttcgtccgctccggccactcgtttcgccgccgtcggtcgccacccgcaaggtttggaggataagattcgggagggatggcttccggtgggcagccgcagttccggtacacgcagccgccgtcgaaggtgctccacctgcggaatctgccgtgggactgcactccagaggagctggtcgagctggggacccccttcggcaaggtcgtcaacaccaagtgcggcgtcggcgccaaccgcaatcaggcattcatcgaattcggcgaccaaaatcaagctattgccatgatatcatattacgcatcgtcaacagagccagcacaggtaagagggaaaaatgtgtaccttcagtactcaaatagacaggagattgtcaacaacaaggcaactggggaaggttcaggcaacgttttgcttgtgggaatggagggtgttgcaccagattctgtcagcattgatgttctacacgtggaatactttgatgtgccaggactgtcttagtaacttctagcacattgttttgcatgatctgaatggattagcaagccgttgtcacggagtatcatggcaggaagcatctggaacacatgtctgtgtttgtttcctctcccttactcatcgctgccctactcctcccctaccctccctcccctgcacctcttctccctacctttcccctcccataccctttcatccaagtaccctcttagggttggtcacatctaccttcgtcgatgtccgttttagttgttattataagttgtatctagttagtgcctaaggttggtggatgcatttttctcaatggaggtcgtttctgattggttacattggtagctggcatatttgtatgattattatcaagtgctcttctctggatttagtaagggaaaagaaagagaaaaggaacataaaatgtaatgcatcaataatagtaaataaatattcttgttttcactaacgccccgtttggatcctcggaattgaattccattctaataatagtaatttaggcaaatatcaattaagctagtatagttttatgcaaaatatatttgtatactattattactttattagcaatatgtgggagatatttatgtgctgcatttttactacagaggagtgagtagaagagtgtcttataagttgcagagtagaaacatattccactgatacacaaaatcattttctatcctccacccccatgaatttgagatagtcttatatctgaactgtggaaagtggcggaatatcaaattccaagccaaatagactactctattaagtaaatttcaattccttcaaaatgaatagatccaaatggcccataaggtaaatataatgaacttgattggcacaaatttgtcatttggttgcactgatttgtgtaacggtttaataccatctttcaagcaggattttagctccttattacagatctgcaagctaccaactcgagttatttgcatctgtattttctgctttcggatttgttcataagatcgctacctttgagaaagcatctggttatcaggctttgattcagttttctgatgctgaaactgcaacatctgcaaaagctgcactggatggtagatgcattcctagctatttgctaccagaactggatgtggcctgcactttgagaataacctattcagcacacagtgttctcaacgtcaagtatcagagccacaggagtagggacttcactaatccttaccttccttttctggactctgctaaagatggctctggaccggatggaaaaaaacaggaagcagagagcaatatactgcttgcttctattgagaacatgcaatatgttgttacaatagatgtgcttcatgaggtcttttcagcttttggatttgtacagaagattgctatttttgagaagaatggctttcaagcattgatccagtatccagacattcaaactgcgtatgcagcaaaagaagcactagaagggcacagcatctatgaaggtggctactgcaaactgcacctcacattttcacgccatactgagcttaatgttaaggttaacaatgagcgaggtagagattataccaaggggaatgccactccaagcagtgatcaaccttccattcttggtcctcagccaataccaagcgttggtgctgctattccaccagcacagggtagtgttccttctgcagccaccaattcagtaatgccaccaggggatccatcagttgctctaccttctaatccttccagtgagccactcctgcaagcacctgttgtttcctctggagggcctccgcattaccctaatcaggccatcctacaaggcccacttggtgttgttgcacggttcccaggctatggtgccctgcagtttgctcagggctcagctcaagctcaaatggtgcagccttcaggccaaggaagtcaacatatgtcaggtcatgtaaattatcagctacctccaggttcagcccaattcatgcagtatctcagcaacggaagccatccacttccaaacgcacctgggccacagacaatgccttaccctgccctcagtgggcagcagctacctccgggtcttcagatgatgcaagctcaaggttttggaggcctgccgttttcacagggtcctggacaaccaatgccacagttcccaatgtatggcacccagcagtttcctccgggtatggagcccaagatgatgcgcttctctgagcagggaggccagcagtttacatttgcgccgcggggtccaaatagtcgttagcaaatttgaacttagcaacgttagatcgttgatggtgatgaatggatgtcaagccttctatgttgctgttttctaaggtgaataccgatgctgttccattactaggatctatacttggtttatctctcgtactgtggccaaaacaaatgtctaatctgaggtttcgtagccttgtatttgtatcgatttcctcacgcccgcagcttctgcctgcactgtgttacattacggttatactgcagtagtggaagcaaatgtaaaagaaacctagagacctgatgtgccaggttgaaagcccgtagctgcaaactgtaggctcacatcgcgtccagttataaatttgtttgtgctatgttaagagtacaattgtacaaaccaag

SEQ ID NO: 203715 - DNA, 679 bp, Zea Mays
atttgtaagggtttagtttagattaaaaacatcggcaaaggatagccgggactctcaactctgaccaggcgagggacttcgacctccccttgaaggagcggttctacctgcagccgctgccgccggcggaggcggcggcgagggtgaagacgtcggcgcaggacatcatcaacctcaagccgctcatcgacaagaaggcgtggccgtacgtccagaacgacctccgcctccgggcctcctacctgcgctacgacctcaagaccgtcatcgcttccaagcccaaggaggagaagaagagcctcaaggagctcaccggcaagctcttcagcaccatcgacgatcttgaccatgccgcgaagatcaagagcaccccagaggccgagaaatacttcgcagcaaccaaagatgctcttggcgatgttctcgccaagctaggctagacgcaagggctaataatggccatgtaatttcggacttgtgtttgttcatatggacccggcaaggcaatgtaccattttctgttgatattgtatcaggaagcacttaactacaatgctatcttgagtccttgacaagtaccgttgcgagcttatgcaaacatcagaaaaaggtactaacagacttaattcgtgatccactacattaaaaaggtgcaaaattgaaagttcggcattttaaa

SEQ ID NO: 203716 - DNA, 1192 bp, Zea Mays
ccaccacatgcaacaaagccaccaaatcttttccctagcaccacatttgctggcattgaaacaaaagaaaaaacataagtgccagaatcagcaacctttgctgggatttaggtcccattagacttggacagtccctaatgaccctaattttatttttttaatactatatataacccattggtgtgtaacaagaacaaaagaacggatcgattcacgtggttttctgatcttttttcagaatgtctgccgtcgagaataaaaggtacaacggaatcaggtgccgtgttgccaaataagttgcttgccttatcttggcagctgcagctactactctgcagactgcaggagttataagaagagtctccggccacactccgcgtcagagattcagagctgatgaactgcttctggtgtcctgtacatctcaagatgaaaaaaagcaccaccgtcctcgccatctccatcttggtcctctcccttgcctcccagttctcatggtgtgcagaagcagctgagggaagcgccggaatttccacagagcctgatctccaggtgcaagaacaagtgcacgggtcgcaaccggaagcttggccatgaggtgaccacagtggagttgaagcatcacaggaggattaccagtgggcacaagggtggcagcgcgggtggaggcgccggcgccggtgccgcgggcgcaggcacgggtgggcataacgtgggcggcgggggcgccgtgacgaggccgcacagctccaagaacggcgcggcggcgctcccagtgccggtgtcgtccgtcctgacgctggccttggcctgcggagttgttctgtcagtcatgagctactgatgagatgaaactctcgtcttcccggagccgatcggtatctccgagccgattttacgggtattggtgcgatagtttctcgatttgttcgttgtaacttgtatatcatatcatcatgcagtggtgaaaaccggacggatgctgacggatgtagctgtcattatatatctatcgtaatgtatttctcgcgaatacagaatcaatacagttatttaaaattggaacacatgataagaccggttaataattcaagcggatatataaagaatatttgtcggataatccatactaaccatccaacaaacaagtaaaataataatcatatacatgatagtttaaacatagaaaaat

SEQ ID NO: 203717 - DNA, 2052 bp, Zea Mays
tcccctccaatccggcaccctcctctctcctcaccccacctcacgcaggcggcattaatggattccgcagccgcggccacctccctccgccccgcgtcctcccggccgcggcgagagccctgacgtgacgcgcttccccccgcacggatcctcctccctccacgccgtcgtttgctcggggtgttcgttgggggaggttgcggtgaggagaaatggatgtagagaaacctgcttccaaggcgcatggtttctttgcgctcttcgattggggaaagaagtctaagaagcgcctgttcgtcgggagcaccagcagtgatccaaatctgaaggatgctgcagatgggaaggatattgatgatagtacaccaacaacaagtacacggtcaaattctatccttgaagatgccccaagtttgaaggaaagcagtgagcacagctgctcatcttcagtaattgatgaagaagctcagtcaagaagaagtccgactgttgtggctaggcttatgggtttggattctatgcccgcggcaagctcacccgaatccaatcccgttccattaactgtgcaaccccctttccaacccaacagccacgaggatttgatcggcagaagttatgttggtagtccccttaagatgccgggtagtcctattgatcggtttaaaatggaagcactgcctccaagacttgccaagaggacactatctgtcgcacagtataagttgctgtctcccatgaaaaaccctaaccatatatccagcaggaatgcagctgatataatggaagcagcatcaaggatcatcagacctggagtagaaaatatcagttcttacagagttcacgatgttgggaacacaaatgctgcacgtgcctacaacccaggagagctcataggagtccaacaaaggtcacagaagcttaatgaagcactgaggaaacgtgatggctctgcgtcttttaggccgccaagtggaaaaccttcagatggaaggttgagaggttcggagggcacctcgtcttccaggatctcacaggcaaatggatgtgctccagttgctccaaaggtcaaacccggcaatagattagatactgctcgagctatgcatgcccaggaaaaaggggggatgagaaaatttggtaaaaagcttgaaacccacaagaaccctgaaaatagcaatgctgaaagaagtgggctgaacagacaaaaggatagtaaccaactgggcacaagttcgtctagtgtgcttgtgccaaacagcagaaaacagaatgctacagtcaccaaacataaagtgcactcaaacccagcaacccccagtaggcaacggagcaatattcaccaaataaatgcccatccaagaaaagcgagggctgccaacacatttgctggaagcagtagtcaaggtagcagaaaggtggacttgcagccagatgctcgtgcaaatgtaagaaataattctgtatccaaagcaatcccgaagccaagaagattacaagacagaagagtgtactctgatacaagccagtcaagtgatagtattaattctgacaggagccagaggcggattcggcacaatattgtgattgatgagcagtcatctttttcaacaaacaaaaagaaagtcagcactgagattgtttcattcacatttacctcgccagttcataagtcactacatggcacccacttccccaatcattcagtggaaaaacaaatattagggaatcagaacactgtgtcaacttcaagcaatacatcaaacactaaacttgatgtcatagatggaaaatttttgggactcctgttggagcagaaattgagagagttgacatctggtgtgagatcaccctacactaaaccagccgaaggtgctcaagtgtaccacacttcaacagctttggaagatatggcatcagcatgtgaaacatctagcattgcttctactgattatgatagggagtcattacagtctttcagtgatggaaaagctactctgccctatacaaatcttgctactagaagtgtccagagtgaattctactgaggatgca

SEQ ID NO: 203718 - DNA, 808 bp, Zea Mays
aatgcatttcttgtttaatgtgtggcctcatttagatatttgttggtgggcttgaccccaatgtcactgaagatgtcctaaaacaagcattttctccttatggcgaagtcatccatgttaagatccctgttgggaagagatgtggttttgttcagtttgttaccaggcgctgctaatgttgcaaggggccttgattggtgcacagaatgttcggctttcgtggggtagaagcctgtcgaacaagcagactcagcctcagcaggaatccatgcaatggggtgcgggtgcgcctgctggtgttggtgattactatggtggctatggacaaggttatgaggcttatggcagtgggtatgcacaaccccaggaccctaacatgtatggttatggcgcttatgttggttatcccaattaccaacagcaaccagctgcacagcagccacagcaacaacagtgaggcctctttgctcgggtaggtcattgggttgtctgagatgggatcaattagtattatttctaggcattcatatattgatttcttgaaaatagaggtggtttcgaaaatctcctgattttgatggccccatggcatgttttcttcgagttatatcatatatatatgcactatgttatgtctatgaacaagtggtgctcaactgtgattgctatgttgaggcatgcttcgtagtttccttccagacttgtcttatatattgttctctcttttactctgtattgttatctctattagtgtgtattgcatatctactgcgatgctatatatgcgctgtgccgcctttcgttcgtt

SEQ ID NO: 203719 - DNA, 988 bp, Zea Mays
gctcaaccggttgtttaatgggacagaagccaattgtattagatagggcaagaaggctcatttctaagcctatcaagtttttcaatgaaatgcaagagttgtttattaacagcagtgctgatggctctctagccatggaagctacaacttgtatgaatgaaactcatcctggagatgacagtgacttcaatgatgatgtgtgcagtgacttctccaactatcctcagcctgtgcatgatctaggtgatgattctgacactttaccatctcccaatcatcatccatctcaaaacgttgatcatagctcgtcaagttctggactgaagcgcccacaaggagagggagtaccagcgaaaaggaatgtgaaaccaaagagtcgcacaacaaaggtagtagatgaactcagtgctactttggtagaacttcgaaatgatcttaagaagccaccacctccagtgcctatgccttttggtaaccctgatgcaatattgtggcaaaggcttgagaatatgacaattactactgatcaaaagttaatggtaggaacgtatctagcacacaaagatcaaaagggtatgcgtggtttcttatctgctgcatcagacataacatttgagtcatgggtactaaagcatctgagtgatttggacctatgaatcgactaggatgatccatgtaggagatgaatggtgtgatagttgggttttttgcatttcttctaggttgatggatgtcaattgatggagatatttggtggttgtgactgctgttacattgctctttttgttgatttttaactttgagggtaccaatgagcatagtgcatagcaccagtaccttttacaattatggaatctctgcaaagcaaggaaggcattggactgtaataaattttgctccaatttcgcattgcaaatgttctagtagtgtcagatttttctctaatgcttctagtgaaaaatgagaccttttggagacagtttctaaa

SEQ ID NO: 203720 - DNA, 1063 bp, Zea Mays
tgcgccgtgttctgccgcgcctacgctcccaccgcgtgtccgcagctctgccccacctcacatctgcgcccgcaatccacgcctccgtcgccgcagcccttcctccacgcagcgtccgtccatccatggctctccctacacgcagcgtcgtgccgctttccgcaatccgtgccttaatccccttccttcgcgcagcacccttccatccatggctcgcttccagaaatccccctacctacggcgcagcgtcgcagtccggaatccacccccaaaatcactacccactctgcggcgatggaagggaatcgaaacgcgtgcttcccccttccatcctcggcgttgcgcggattgcatggccatcgtttcgcgcccccaatccgtcgatgcaaggaacacgtgcttcccccttccatcctcgacgctgcgcgaattgcagattgcgaattgcatggtcatcgtttcgccccagttcattgcccgcatcagatggaagggcgccccgatctgcctcacctccatcaatgaggtgtctgcctttcttgcatggagacgccaaagagaaggaaccagtcactaagtcggcctctgtacggtccatgaacacacatcaacggagcgtgatgtccgctccggttcagacttcacctccttgaatgtttccgacatgagcgccgagtcgataaggaggacacagtaccccagcttcactgaccgcccatctaacctgagggtgttctcctttgctgaattgaagagtgccacccgcaacttccgccggtctctcatggttggctagggtggctttggctgtgtgtacaggggtgtcatcaagacctccgacgatctgaacgaacgaatcgagatcgctgttaagcagttgaatcgtaaaggacttcagggaagagacgacgacatggatgtagattccattctttgtgtgagcactaccgccatatagttgacaacgatgaccgacactgtagattccattctttgtgtgtacaccaaggtatcggtgtctacgttgatctggcgatgcgcttttcacgaatatttgcgtctt

SEQ ID NO: 203721 - DNA, 2408 bp, Zea Mays
tgcgccgtgttctgccgcgcctacgctcccaccgcgtgtccgcagctctgccccacctcacatctgcgcccgcaatccacgcctccgtcgccgcagcccttcctccacgcagcgtccgtccatccatggctctccctacacgcagcgtcgtgccgctttccgcaatccgtgccttaatccccttccttcgcgcagcacccttccatccatggctcgcttccagaaatccccctacctacggcgcagcgtcgcagtccggaatccacccccaaaatcactacccactctgcggcgatggaagggaatcgaaacgcgtgcttcccccttccatcctcggcgttgcgcggattgcatggccatcgtttcgcgcccccaatccgtcgatgcaaggaacacgtgcttcccccttccatcctcgacgctgcgcgaattgcagattgcgaattgcatggtcatcgtttcgccccagttcattgcccgcatcagatggaagggcgccccgatctgcctcacctccatcaatgaggtgtctgcctttcttgcatggagacgccaaagagaaggaaccagtcactaagtcggcctctgtacggtccatgaacacacatcaacggagcgtgatgtccgctccggttcagacttcacctccttgaatgtttccgacatgagcgccgagtcgataaggaggacacagtaccccagcttcactgaccgcccatctaacctgagggtgttctcctttgctgaattgaagagtgccacccgcaacttccgccggtctctcatggttggctagggtggctttggctgtgtgtacaggggtgtcatcaagacctccgacgatctgaacgaacgaatcgagatcgctgttaagcagttgaatcgtaaaggacttcagggaagagacgacgacatggatgtagattccattctttgtgtgagcactaccgccatatagttgacaacgatgaccgacactgtagattccattctttgtgtgtacaccaaggtatcggtgtctacgttgatctggcgatgcgcttttcacggttactgcgaccgtgatgggcatctaggtgctcaaaccattagttggactgaggaacacggagcagcagcaacaatatcgtaaggagagtgcagaagttggacaaatggtatgccatatcttcagttctcttatgatgcttcagcgctacatcttcagttttctcggctaaaaagagatcatagtcaatagtatacctatgtgtgaaagcgctatgctatttgcttgtttgctgggagaaagaaaagatagatgaaggagttaaagtgcacatacctaatcaagtctgtgggtctccaattctgaaatagaaagataatttatgttctcatctttctgaaatgaacaagatgactggcttctgggttaaggttttttatagagcaccatgacttatcaggtaaagttatagttgtgcacaaaatgtcattttttaatccttaatgcgtgtgctattcacacatgtcttcttttgcagttttgtgaacaaccctaacttatgtggtcctgacaccacaaaaccttgtcctgatgctcctcccttttctccacctcctccatacaaccctacaaccccgatgcaatcaccaggtgatttatttagattgtccagtgaaatccttgagttcaataggacctttccttccttactctttcatctaaatgacatcctaattgggaaaatgtatacctccaaaacaagcataatgttgtcaaggctggagagcggtaaggaataactgcacgttttcctgaaaattaagttgaaaataatttgtaatcaggagctagagcgttacatggtactatgactatgtgctgctattagtctgtggctcagcggtatgtgtgttgtactgctattaatttgctatactagaatactggaatacaataggaagctactaacctgtacctcgtgggatgcaggaatgcagaataagtcaataactaccttgtccttttggttttccctaccctacattagtacgggagtgattaagggtatggaacatatggctttgttgttgacatcttttattttgtgcaggaagtagctcttccactactggagcaattgctggtggagtggttgctggcgcagccttgctatttgctgttcctgctatcagttttgcctattggcggcacaggaaaccacaagagcattttttcaatgtatatggcttcaaagttagtctttgattattatctttcttgcaacataagggcaaacaacgtttatatgtagcaaacaaatacagtttgcaaacgttttaggaacatgtttttacaataaagatatacttatagtttcaccaatggatggccaaaaaatacaaccttttacatttgtcaa

SEQ ID NO: 203722 - DNA, 1466 bp, Zea Mays
tgcgccgtgttctgccgcgcctacgctcccaccgcgtgtccgcagctctgccccacctcacatctgcgcccgcaatccacgcctccgtcgccgcagcccttcctccacgcagcgtccgtccatccatggctctccctacacgcagcgtcgtgccgctttccgcaatccgtgccttaatccccttccttcgcgcagcacccttccatccatggctcgcttccagaaatccccctacctacggcgcagcgtcgcagtccggaatccacccccaaaatcactacccactctgcggcgatggaagggaatcgaaacgcgtgcttcccccttccatcctcggcgttgcgcggattgcatggccatcgtttcgcgcccccaatccgtcgatgcaaggaacacgtgcttcccccttccatcctcgacgctgcgcgaattgcagattgcgaattgcatggtcatcgtttcgccccagttcattgcccgcatcagatggaagggcgccccgatctgcctcacctccatcaatgaggtgtctgcctttcttgcatggagacgccaaagagaaggaaccagtcactaagtcggcctctgtacggtccatgaacacacatcaacggagcgtgatgtccgctccggttcagacttcacctccttgaatgtttccgacatgagcgccgagtcgataaggaggacacagtaccccagcttcactgaccgcccatctaacctgagggtgttctcctttgctgaattgaagagtgccacccgcaacttccgccggtctctcatggttggctagggtggctttggctgtgtgtacaggggtgtcatcaagacctccgacgatctgaacgaacgaatcgagatcgctgttaagcagttgaatcgtaaaggacttcagggaagagacgacgacatggatgtagattccattctttgtgtgagcactaccgccatatagttgacaacgatgaccgacactgtagattccattctttgtgtgtacaccaaggtatcggtgtctacgttgatctggcgatgcgcttttcacggttactgcgaccgtgatgggcatctaggtgctcaaaccattagttggactgaggaacacggagcagcagcaacaatatcgtaaggagagtgcagaagttggacaaatggaagtagctcttccactactggagcaattgctggtggagtggttgctggcgcagccttgctatttgctgttcctgctatcagttttgcctattggcggcacaggaaaccacaagagcattttttcaatgtatatggcttcaaagttagtctttgattattatctttcttgcaacataagggcaaacaacgtttatatgtagcaaacaaatacagtttgcaaacgttttaggaacatgtttttacaataaagatatacttatagtttcaccaatggatggccaaaaaatacaaccttttacatttgtcaa

SEQ ID NO: 203723 - DNA, 1721 bp, Zea Mays
tgcgccgtgttctgccgcgcctacgctcccaccgcgtgtccgcagctctgccccacctcacatctgcgcccgcaatccacgcctccgtcgccgcagcccttcctccacgcagcgtccgtccatccatggctctccctacacgcagcgtcgtgccgctttccgcaatccgtgccttaatccccttccttcgcgcagcacccttccatccatggctcgcttccagaaatccccctacctacggcgcagcgtcgcagtccggaatccacccccaaaatcactacccactctgcggcgatggaagggaatcgaaacgcgtgcttcccccttccatcctcggcgttgcgcggattgcatggccatcgtttcgcgcccccaatccgtcgatgcaaggaacacgtgcttcccccttccatcctcgacgctgcgcgaattgcagattgcgaattgcatggtcatcgtttcgccccagttcattgcccgcatcagatggaagggcgccccgatctgcctcacctccatcaatgaggtgtctgcctttcttgcatggagacgccaaagagaaggaaccagtcactaagtcggcctctgtacggtccatgaacacacatcaacggagcgtgatgtccgctccggttcagacttcacctccttgaatgtttccgacatgagcgccgagtcgataaggaggacacagtaccccagcttcactgaccgcccatctaacctgagggtgttctcctttgctgaattgaagagtgccacccgcaacttccgccggtctctcatggttggctagggtggctttggctgtgtgtacaggggtgtcatcaagacctccgacgatctgaacgaacgaatcgagatcgctgttaagcagttgaatcgtaaaggacttcagggaagagacgacgacatggatgtagattccattctttgtgtgagcactaccgccatatagttgacaacgatgaccgacactgtagattccattctttgtgtgtacaccaaggtatcggtgtctacgttgatctggcgatgcgcttttcacggttactgcgaccgtgatgggcatctaggtgctcaaaccattagttggactgaggaacacggagcagcagcaacaatatcgtaaggagagtgcagaagttggacaaatggagttaaagtgcacatacctaatcaagtctgtgggtctccaattctgaaatagaaagataatttatgttctcatctttctgaaatgaacaagatgactggcttctgggttaaggttttttatagagcaccatgacttatcagttttgtgaacaaccctaacttatgtggtcctgacaccacaaaaccttgtcctgatgctcctcccttttctccacctcctccatacaaccctacaaccccgatgcaatcaccaggaagtagctcttccactactggagcaattgctggtggagtggttgctggcgcagccttgctatttgctgttcctgctatcagttttgcctattggcggcacaggaaaccacaagagcattttttcaatgtatatggcttcaaagttagtctttgattattatctttcttgcaacataagggcaaacaacgtttatatgtagcaaacaaatacagtttgcaaacgttttaggaacatgtttttacaataaagatatacttatagtttcaccaatggatggccaaaaaatacaaccttttacatttgtcaa

SEQ ID NO: 203724 - DNA, 2219 bp, Zea Mays
tgcgccgtgttctgccgcgcctacgctcccaccgcgtgtccgcagctctgccccacctcacatctgcgcccgcaatccacgcctccgtcgccgcagcccttcctccacgcagcgtccgtccatccatggctctccctacacgcagcgtcgtgccgctttccgcaatccgtgccttaatccccttccttcgcgcagcacccttccatccatggctcgcttccagaaatccccctacctacggcgcagcgtcgcagtccggaatccacccccaaaatcactacccactctgcggcgatggaagggaatcgaaacgcgtgcttcccccttccatcctcggcgttgcgcggattgcatggccatcgtttcgcgcccccaatccgtcgatgcaaggaacacgtgcttcccccttccatcctcgacgctgcgcgaattgcagattgcgaattgcatggtcatcgtttcgccccagttcattgcccgcatcagatggaagggcgccccgatctgcctcacctccatcaatgaggtgtctgcctttcttgcatggagacgccaaagagaaggaaccagtcactaagtcggcctctgtacggtccatgaacacacatcaacggagcgtgatgtccgctccggttcagacttcacctccttgaatgtttccgacatgagcgccgagtcgataaggaggacacagtaccccagcttcactgaccgcccatctaacctgagggtgttctcctttgctgaattgaagagtgccacccgcaacttccgccggtctctcatggttggctagggtggctttggctgtgtgtacaggggtgtcatcaagacctccgacgatctgaacgaacgaatcgagatcgctgttaagcagttgaatcgtaaaggacttcagggaagagacgacgacatggatgtagattccattctttgtgtgagcactaccgccatatagttgacaacgatgaccgacactgtagattccattctttgtgtgtacaccaaggtatcggtgtctacgttgatctggcgatgcgcttttcacggttactgcgaccgtgatgggcatctaggtgctcaaaccattagttggactgaggaacacggagcagcagcaacaatatcgtaaggagagtgcagaagttggacaaatggtatgccatatcttcagttctcttatgatgcttcagcgctacatcttcagttttctcggctaaaaagagatcatagtcaatagtatacctatgtgtgaaagcgctatgctatttgcttgtttgctgggagaaagaaaagatagatgaaggtaattatacaatttctaatacattgttcagcttttgttatttctgccatatgatacacactggtcatgaggacatgtcgattgtagttcactggtattgtttttttaaaggaagcggcaaaagacttgcctcttcattgtattagattaggaaaaataagataatccacaggaccgaaacacacaccggaagagaaaaaaaaacaaaatcaaaatacaaaaaaagttcactggtattgtaagctttgcagataagagcacaactttttccctcttttctaaaagggaagctcatgttcatttcagcaattcagcttcaaccatttggcattcatgtaatatttcacaggagttaaagtgcacatacctaatcaagtctgtgggtctccaattctgaaatagaaagataatttatgttctcatctttctgaaatgaacaagatgactggcttctgggttaaggttttttatagagcaccatgacttatcagttttgtgaacaaccctaacttatgtggtcctgacaccacaaaaccttgtcctgatgctcctcccttttctccacctcctccatacaaccctacaaccccgatgcaatcaccaggaagtagctcttccactactggagcaattgctggtggagtggttgctggcgcagccttgctatttgctgttcctgctatcagttttgcctattggcggcacaggaaaccacaagagcattttttcaatgtatatggcttcaaagttagtctttgattattatctttcttgcaacataagggcaaacaacgtttatatgtagcaaacaaatacagtttgcaaacgttttaggaacatgtttttacaataaagatatacttatagtttcaccaatggatggccaaaaaatacaaccttttacatttgtcaa

SEQ ID NO: 203725 - DNA, 2086 bp, Zea Mays
tgcgccgtgttctgccgcgcctacgctcccaccgcgtgtccgcagctctgccccacctcacatctgcgcccgcaatccacgcctccgtcgccgcagcccttcctccacgcagcgtccgtccatccatggctctccctacacgcagcgtcgtgccgctttccgcaatccgtgccttaatccccttccttcgcgcagcacccttccatccatggctcgcttccagaaatccccctacctacggcgcagcgtcgcagtccggaatccacccccaaaatcactacccactctgcggcgatggaagggaatcgaaacgcgtgcttcccccttccatcctcggcgttgcgcggattgcatggccatcgtttcgcgcccccaatccgtcgatgcaaggaacacgtgcttcccccttccatcctcgacgctgcgcgaattgcagattgcgaattgcatggtcatcgtttcgccccagttcattgcccgcatcagatggaagggcgccccgatctgcctcacctccatcaatgaggtgtctgcctttcttgcatggagacgccaaagagaaggaaccagtcactaagtcggcctctgtacggtccatgaacacacatcaacggagcgtgatgtccgctccggttcagacttcacctccttgaatgtttccgacatgagcgccgagtcgataaggaggacacagtaccccagcttcactgaccgcccatctaacctgagggtgttctcctttgctgaattgaagagtgccacccgcaacttccgccggtctctcatggttggctagggtggctttggctgtgtgtacaggggtgtcatcaagacctccgacgatctgaacgaacgaatcgagatcgctgttaagcagttgaatcgtaaaggacttcagggaagagacgacgacatggatgtagattccattctttgtgtgagcactaccgccatatagttgacaacgatgaccgacactgtagattccattctttgtgtgtacaccaaggtatcggtgtctacgttgatctggcgatgcgcttttcacggttactgcgaccgtgatgggcatctaggtgctcaaaccattagttggactgaggaacacggagcagcagcaacaatatcgtaaggagagtgcagaagttggacaaatggagttaaagtgcacatacctaatcaagtctgtgggtctccaattctgaaatagaaagataatttatgttctcatctttctgaaatgaacaagatgactggcttctgggttaaggttttttatagagcaccatgacttatcagttttgtgaacaaccctaacttatgtggtcctgacaccacaaaaccttgtcctgatgctcctcccttttctccacctcctccatacaaccctacaaccccgatgcaatcaccaggtgatttatttagattgtccagtgaaatccttgagttcaataggacctttccttccttactctttcatctaaatgacatcctaattgggaaaatgtatacctccaaaacaagcataatgttgtcaaggctggagagcggtaaggaataactgcacgttttcctgaaaattaagttgaaaataatttgtaatcaggagctagagcgttacatggtactatgactatgtgctgctattagtctgtggctcagcggtatgtgtgttgtactgctattaatttgctatactagaatactggaatacaataggaagctactaacctgtacctcgtgggatgcaggaatgcagaataagtcaataactaccttgtccttttggttttccctaccctacattagtacgggagtgattaagggtatggaacatatggctttgttgttgacatcttttattttgtgcaggaagtagctcttccactactggagcaattgctggtggagtggttgctggcgcagccttgctatttgctgttcctgctatcagttttgcctattggcggcacaggaaaccacaagagcattttttcaatgtatatggcttcaaatattacaatggtgccaaaatggattgttcgaaggagaaaaatgaagtacaaattgacaaccaattggacaa

SEQ ID NO: 203726 - DNA, 1603 bp, Zea Mays
aaaggaaataacaacgttctttttgctaaatgttctttagcaatttgattagtcaaagaggttgcttgtttttttgtgggaacgagattcgggactcaggagctcacttgctcccactatgacattgtatatgtaccagacacttgcatatactaattgttttcttttaaatgcactttacttaattatactgacatatgtcattggagctgtgatgcctcatccatccctaaagatgtatagaattcatcgcttggatcaataagtgttgtttaacaggcagaaatgggtgcttaggatcttaccactgtttatttaaaatttagatagataaagagcactgaagattgttagttaattaggaccgacgctttgaatcattagaccaaggaatatgaatgcgcaaattcaaacgtactacaccttttttgtgctttctttttaggacaggagtaattgtccatcgtaacgggggtagaaagtgcagaacgctcattgttctctttttcgttgtctaaaacgttgagtttctgatctgtataagactacaagttgctcagagggccttttctggaaccatttccctcgaactgattttaattgtttccttcttttccttatccacaataccaaactatgttacataaaaactaaatgatacgctgactgctcagaataaaaaaagtggtgctacgatcctccgtctgacttatgatcgcttctcttttcttcagccacttttcttttttgttgtctagaaaacaaaaatatattgttagtgaccagattgtaatagaaaatattgtctgctttattttctcgtcattagataaattatatacccttaaattgcttttgccattgattctagcatatgtcattaactaatgtttttaccacctttttctagaacgcttgtttgtctttgtcactttctgcaaccttggttctgatgttgcttgtcattcatttctcagcgtcgggcttgtaacttgtgtttcgtttgcttggtccatttattttggttgtctgtagggaagagacgacgacatggatgtagattccattctttgtgtgagcactaccgccatatagttgacaacgatgaccgacactgtagattccattctttgtgtgtacaccaaggtatcggtgtctacgttgatctggcgatgcgcttttcacggttactgcgaccgtgatgggcatctaggtgctcaaaccattagttggactgaggaacacggagcagcagcaacaatatcgtaaggagagtgcagaagttggacaaatggaagtagctcttccactactggagcaattgctggtggagtggttgctggcgcagccttgctatttgctgttcctgctatcagttttgcctattggcggcacaggaaaccacaagagcattttttcaatgtatatggcttcaaagttagtctttgattattatctttcttgcaacataagggcaaacaacgtttatatgtagcaaacaaatacagtttgcaaacgttttaggaacatgtttttacaataaagatatacttatagtttcaccaatggatggccaaaaaatacaaccttttacatttgtcaa

SEQ ID NO: 203727 - DNA, 1858 bp, Zea Mays
aaaggaaataacaacgttctttttgctaaatgttctttagcaatttgattagtcaaagaggttgcttgtttttttgtgggaacgagattcgggactcaggagctcacttgctcccactatgacattgtatatgtaccagacacttgcatatactaattgttttcttttaaatgcactttacttaattatactgacatatgtcattggagctgtgatgcctcatccatccctaaagatgtatagaattcatcgcttggatcaataagtgttgtttaacaggcagaaatgggtgcttaggatcttaccactgtttatttaaaatttagatagataaagagcactgaagattgttagttaattaggaccgacgctttgaatcattagaccaaggaatatgaatgcgcaaattcaaacgtactacaccttttttgtgctttctttttaggacaggagtaattgtccatcgtaacgggggtagaaagtgcagaacgctcattgttctctttttcgttgtctaaaacgttgagtttctgatctgtataagactacaagttgctcagagggccttttctggaaccatttccctcgaactgattttaattgtttccttcttttccttatccacaataccaaactatgttacataaaaactaaatgatacgctgactgctcagaataaaaaaagtggtgctacgatcctccgtctgacttatgatcgcttctcttttcttcagccacttttcttttttgttgtctagaaaacaaaaatatattgttagtgaccagattgtaatagaaaatattgtctgctttattttctcgtcattagataaattatatacccttaaattgcttttgccattgattctagcatatgtcattaactaatgtttttaccacctttttctagaacgcttgtttgtctttgtcactttctgcaaccttggttctgatgttgcttgtcattcatttctcagcgtcgggcttgtaacttgtgtttcgtttgcttggtccatttattttggttgtctgtagggaagagacgacgacatggatgtagattccattctttgtgtgagcactaccgccatatagttgacaacgatgaccgacactgtagattccattctttgtgtgtacaccaaggtatcggtgtctacgttgatctggcgatgcgcttttcacggttactgcgaccgtgatgggcatctaggtgctcaaaccattagttggactgaggaacacggagcagcagcaacaatatcgtaaggagagtgcagaagttggacaaatggagttaaagtgcacatacctaatcaagtctgtgggtctccaattctgaaatagaaagataatttatgttctcatctttctgaaatgaacaagatgactggcttctgggttaaggttttttatagagcaccatgacttatcagttttgtgaacaaccctaacttatgtggtcctgacaccacaaaaccttgtcctgatgctcctcccttttctccacctcctccatacaaccctacaaccccgatgcaatcaccaggaagtagctcttccactactggagcaattgctggtggagtggttgctggcgcagccttgctatttgctgttcctgctatcagttttgcctattggcggcacaggaaaccacaagagcattttttcaatgtatatggcttcaaagttagtctttgattattatctttcttgcaacataagggcaaacaacgtttatatgtagcaaacaaatacagtttgcaaacgttttaggaacatgtttttacaataaagatatacttatagtttcaccaatggatggccaaaaaatacaaccttttacatttgtcaa

SEQ ID NO: 203728 - DNA, 2007 bp, Zea Mays
aaaggaaataacaacgttctttttgctaaatgttctttagcaatttgattagtcaaagaggttgcttgtttttttgtgggaacgagattcgggactcaggagctcacttgctcccactatgacattgtatatgtaccagacacttgcatatactaattgttttcttttaaatgcactttacttaattatactgacatatgtcattggagctgtgatgcctcatccatccctaaagatgtatagaattcatcgcttggatcaataagtgttgtttaacaggcagaaatgggtgcttaggatcttaccactgtttatttaaaatttagatagataaagagcactgaagattgttagttaattaggaccgacgctttgaatcattagaccaaggaatatgaatgcgcaaattcaaacgtactacaccttttttgtgctttctttttaggacaggagtaattgtccatcgtaacgggggtagaaagtgcagaacgctcattgttctctttttcgttgtctaaaacgttgagtttctgatctgtataagactacaagttgctcagagggccttttctggaaccatttccctcgaactgattttaattgtttccttcttttccttatccacaataccaaactatgttacataaaaactaaatgatacgctgactgctcagaataaaaaaagtggtgctacgatcctccgtctgacttatgatcgcttctcttttcttcagccacttttcttttttgttgtctagaaaacaaaaatatattgttagtgaccagattgtaatagaaaatattgtctgctttattttctcgtcattagataaattatatacccttaaattgcttttgccattgattctagcatatgtcattaactaatgtttttaccacctttttctagaacgcttgtttgtctttgtcactttctgcaaccttggttctgatgttgcttgtcattcatttctcagcgtcgggcttgtaacttgtgtttcgtttgcttggtccatttattttggttgtctgtagggaagagacgacgacatggatgtagattccattctttgtgtgagcactaccgccatatagttgacaacgatgaccgacactgtagattccattctttgtgtgtacaccaaggtatcggtgtctacgttgatctggcgatgcgcttttcacggttactgcgaccgtgatgggcatctaggtgctcaaaccattagttggactgaggaacacggagcagcagcaacaatatcgtaaggagagtgcagaagttggacaaatggtatgccatatcttcagttctcttatgatgcttcagcgctacatcttcagttttctcggctaaaaagagatcatagtcaatagtatacctatgtgtgaaagcgctatgctatttgcttgtttgctgggagaaagaaaagatagatgaaggagttaaagtgcacatacctaatcaagtctgtgggtctccaattctgaaatagaaagataatttatgttctcatctttctgaaatgaacaagatgactggcttctgggttaaggttttttatagagcaccatgacttatcagttttgtgaacaaccctaacttatgtggtcctgacaccacaaaaccttgtcctgatgctcctcccttttctccacctcctccatacaaccctacaaccccgatgcaatcaccaggaagtagctcttccactactggagcaattgctggtggagtggttgctggcgcagccttgctatttgctgttcctgctatcagttttgcctattggcggcacaggaaaccacaagagcattttttcaatgtatatggcttcaaagttagtctttgattattatctttcttgcaacataagggcaaacaacgtttatatgtagcaaacaaatacagtttgcaaacgttttaggaacatgtttttacaataaagatatacttatagtttcaccaatggatggccaaaaaatacaaccttttacatttgtcaa

SEQ ID NO: 203729 - DNA, 2815 bp, Zea Mays
aaggaaataacaacgttctttttgctaaatgttctttagcaatttgattagtcaaagaggttgcttgtttttttgtgggaacgagattcgggactcaggagctcacttgctcccactatgacattgtatatgtaccagacacttgcatatactaattgttttcttttaaatgcactttacttaattatactgacatatgtcattggagctgtgatgcctcatccatccctaaagatgtatagaattcatcgcttggatcaataagtgttgtttaacaggcagaaatgggtgcttaggatcttaccactgtttatttaaaatttagatagataaagagcactgaagattgttagttaattaggaccgacgctttgaatcattagaccaaggaatatgaatgcgcaaattcaaacgtactacaccttttttgtgctttctttttaggacaggagtaattgtccatcgtaacgggggtagaaagtgcagaacgctcattgttctctttttcgttgtctaaaacgttgagtttctgatctgtataagactacaagttgctcagagggccttttctggaaccatttccctcgaactgattttaattgtttccttcttttccttatccacaataccaaactatgttacataaaaactaaatgatacgctgactgctcagaataaaaaaagtggtgctacgatcctccgtctgacttatgatcgcttctcttttcttcagccacttttcttttttgttgtctagaaaacaaaaatatattgttagtgaccagattgtaatagaaaatattgtctgctttattttctcgtcattagataaattatatacccttaaattgcttttgccattgattctagcatatgtcattaactaatgtttttaccacctttttctagaacgcttgtttgtctttgtcactttctgcaaccttggttctgatgttgcttgtcattcatttctcagcgtcgggcttgtaacttgtgtttcgtttgcttggtccatttattttggttgtctgtagggaagagacgacgacatggatgtagattccattctttgtgtgagcactaccgccatatagttgacaacgatgaccgacactgtagattccattctttgtgtgtacaccaaggtatcggtgtctacgttgatctggcgatgcgcttttcacggttactgcgaccgtgatgggcatctaggtgctcaaaccattagttggactgaggaacacggagcagcagcaacaatatcgtaaggagagtgcagaagttggacaaatggtatgccatatcttcagttctcttatgatgcttcagcgctacatcttcagttttctcggctaaaaagagatcatagtcaatagtatacctatgtgtgaaagcgctatgctatttgcttgtttgctgggagaaagaaaagatagatgaaggtaattatacaatttctaatacattgttcagcttttgttatttctgccatatgatacacactggtcatgaggacatgtcgattgtagttcactggtattgtttttttaaaggaagcggcaaaagacttgcctcttcattgtattagattaggaaaaataagataatccacaggaccgaaacacacaccggaagagaaaaaaaaacaaaatcaaaatacaaaaaaagttcactggtattgtaagctttgcagataagagcacaactttttccctcttttctaaaagggaagctcatgttcatttcagcaattcagcttcaaccatttggcattcatgtaatatttcacaggagttaaagtgcacatacctaatcaagtctgtgggtctccaattctgaaatagaaagataatttatgttctcatctttctgaaatgaacaagatgactggcttctgggttaaggttttttatagagcaccatgacttatcagttttgtgaacaaccctaacttatgtggtcctgacaccacaaaaccttgtcctgatgctcctcccttttctccacctcctccatacaaccctacaaccccgatgcaatcaccaggtgatttatttagattgtccagtgaaatccttgagttcaataggacctttccttccttactctttcatctaaatgacatcctaattgggaaaatgtatacctccaaaacaagcataatgttgtcaaggctggagagcggtaaggaataactgcacgttttcctgaaaattaagttgaaaataatttgtaatcaggagctagagcgttacatggtactatgactatgtgctgctattagtctgtggctcagcggtatgtgtgttgtactgctattaatttgctatactagaatactggaatacaataggaagctactaacctgtacctcgtgggatgcaggaatgcagaataagtcaataactaccttgtccttttggttttccctaccctacattagtacgggagtgattaagggtatggaacatatggctttgttgttgacatcttttattttgtgcaggaagtagctcttccactactggagcaattgctggtggagtggttgctggcgcagccttgctatttgctgttcctgctatcagttttgcctattggcggcacaggaaaccacaagagcattttttcaatgtatatggcttcaaagttagtctttgattattatctttcttgcaacataagggcaaacaacgtttatatgtagcaaacaaatacagtttgcaaacgttttaggaacatgtttttacaataaagatatacttatagtttcaccaatggatggccaaaaaatacaaccttttacatttgtcaa

SEQ ID NO: 203730 - DNA, 2322 bp, Zea Mays
aaggaaataacaacgttctttttgctaaatgttctttagcaatttgattagtcaaagaggttgcttgtttttttgtgggaacgagattcgggactcaggagctcacttgctcccactatgacattgtatatgtaccagacacttgcatatactaattgttttcttttaaatgcactttacttaattatactgacatatgtcattggagctgtgatgcctcatccatccctaaagatgtatagaattcatcgcttggatcaataagtgttgtttaacaggcagaaatgggtgcttaggatcttaccactgtttatttaaaatttagatagataaagagcactgaagattgttagttaattaggaccgacgctttgaatcattagaccaaggaatatgaatgcgcaaattcaaacgtactacaccttttttgtgctttctttttaggacaggagtaattgtccatcgtaacgggggtagaaagtgcagaacgctcattgttctctttttcgttgtctaaaacgttgagtttctgatctgtataagactacaagttgctcagagggccttttctggaaccatttccctcgaactgattttaattgtttccttcttttccttatccacaataccaaactatgttacataaaaactaaatgatacgctgactgctcagaataaaaaaagtggtgctacgatcctccgtctgacttatgatcgcttctcttttcttcagccacttttcttttttgttgtctagaaaacaaaaatatattgttagtgaccagattgtaatagaaaatattgtctgctttattttctcgtcattagataaattatatacccttaaattgcttttgccattgattctagcatatgtcattaactaatgtttttaccacctttttctagaacgcttgtttgtctttgtcactttctgcaaccttggttctgatgttgcttgtcattcatttctcagcgtcgggcttgtaacttgtgtttcgtttgcttggtccatttattttggttgtctgtagggaagagacgacgacatggatgtagattccattctttgtgtgagcactaccgccatatagttgacaacgatgaccgacactgtagattccattctttgtgtgtacaccaaggtatcggtgtctacgttgatctggcgatgcgcttttcacggttactgcgaccgtgatgggcatctaggtgctcaaaccattagttggactgaggaacacggagcagcagcaacaatatcgtaaggagagtgcagaagttggacaaatggtatgccatatcttcagttttctcggctaaaaagagatcatagtcaatagtatacctatgtgtgaaagcgctatgctatttgcttgtttgctgggagaaagaaaagatagatgaaggtaattatacaatttctaatacattgttcagcttttgttatttctgccatatgatacacactggtcatgaggacatgtcgattgtagttcactggtattgtttttttaaaggaagcggcaaaagacttgcctcttcattgtattagattaggaaaaataagataatccacaggaccgaaacacacaccggaagagaaaaaaaaacaaaatcaaaatacaaaaaaagttcactggtattgtaagctttgcagataagagcacaactttttccctcttttctaaaagggaagctcatgttcatttcagcaattcagcttcaaccatttggcattcatgtaatatttcacaggagttaaagtgcacatacctaatcaagtctgtgggtctccaattctgaaatagaaagataatttatgttctcatctttctgaaatgaacaagatgactggcttctgggttaaggttttttatagagcaccatgacttatcagttttgtgaacaaccctaacttatgtggtcctgacaccacaaaaccttgtcctgatgctcctcccttttctccacctcctccatacaaccctacaaccccgatgcaatcaccaggaagtagctcttccactactggagcaattgctggtggagtggttgctggcgcagccttgctatttgctgttcctgctatcagttttgcctattggcggcacaggaaaccacaagagcattttttcaatgtatatggcttcaaagttagtctttgattattatctttcttgcaacataagggcaaacaacgtttatatgtagcaaacaaatacagtttgcaaacgttttaggaacatgtttttacaataaagatatacttatagtttcaccaatggatggccaaaaaatacaaccttttacatttgtcaa

SEQ ID NO: 203731 - DNA, 1841 bp, Zea Mays
taacaacgttctttttgctaaatgttctttagcaatttgattagtcaaagaggttgcttgtttttttgtgggaacgagattcgggactcaggagctcacttgctcccactatgacattgtatatgtaccagacacttgcatatactaattgttttcttttaaatgcactttacttaattatactgacatatgtcattggagctgtgatgcctcatccatccctaaagatgtatagaattcatcgcttggatcaataagtgttgtttaacaggcagaaatgggtgcttaggatcttaccactgtttatttaaaatttagatagataaagagcactgaagattgttagttaattaggaccgacgctttgaatcattagaccaaggaatatgaatgcgcaaattcaaacgtactacaccttttttgtgctttctttttaggacaggagtaattgtccatcgtaacgggggtagaaagtgcagaacgctcattgttctctttttcgttgtctaaaacgttgagtttctgatctgtataagactacaagttgctcagagggccttttctggaaccatttccctcgaactgattttaattgtttccttcttttccttatccacaataccaaactatgttacataaaaactaaatgatacgctgactgctcagaataaaaaaagtggtgctacgatcctccgtctgacttatgatcgcttctcttttcttcagccacttttcttttttgttgtctagaaaacaaaaatatattgttagtgaccagattgtaatagaaaatattgtctgctttattttctcgtcattagataaattatatacccttaaattgcttttgccattgattctagcatatgtcattaactaatgtttttaccacctttttctagaacgcttgtttgtctttgtcactttctgcaaccttggttctgatgttgcttgtcattcatttctcagcgtcgggcttgtaacttgtgtttcgtttgcttggtccatttattttggttgtctgtagggaagagacgacgacatggatgtagattccattctttgtgtgagcactaccgccatatagttgacaacgatgaccgacactgtagattccattctttgtgtgtacaccaaggtatcggtgtctacgttgatctggcgatgcgcttttcacggttactgcgaccgtgatgggcatctaggtgctcaaaccattagttggactgaggaacacggagcagcagcaacaatatcgtaaggagagtgcagaagttggacaaatgtgcacatacctaatcaagtctgtgggtctccaattctgaaatagaaagataatttatgttctcatctttctgaaatgaacaagatgactggcttctgggttaaggttttttatagagcaccatgacttatcagttttgtgaacaaccctaacttatgtggtcctgacaccacaaaaccttgtcctgatgctcctcccttttctccacctcctccatacaaccctacaaccccgatgcaatcaccaggaagtagctcttccactactggagcaattgctggtggagtggttgctggcgcagccttgctatttgctgttcctgctatcagttttgcctattggcggcacaggaaaccacaagagcattttttcaatgtatatggcttcaaagttagtctttgattattatctttcttgcaacataagggcaaacaacgtttatatgtagcaaacaaatacagtttgcaaacgttttaggaacatgtttttacaataaagatatacttatagtttcaccaatggatggccaaaaaatacaaccttttacatttgtcaa

SEQ ID NO: 203732 - DNA, 2307 bp, Zea Mays
caacgttctttttgctaaatgttctttagcaatttgattagtcaaagaggttgcttgtttttttgtgggaacgagattcgggactcaggagctcacttgctcccactatgacattgtatatgtaccagacacttgcatatactaattgttttcttttaaatgcactttacttaattatactgacatatgtcattggagctgtgatgcctcatccatccctaaagatgtatagaattcatcgcttggatcaataagtgttgtttaacaggcagaaatgggtgcttaggatcttaccactgtttatttaaaatttagatagataaagagcactgaagattgttagttaattaggaccgacgctttgaatcattagaccaaggaatatgaatgcgcaaattcaaacgtactacaccttttttgtgctttctttttaggacaggagtaattgtccatcgtaacgggggtagaaagtgcagaacgctcattgttctctttttcgttgtctaaaacgttgagtttctgatctgtataagactacaagttgctcagagggccttttctggaaccatttccctcgaactgattttaattgtttccttcttttccttatccacaataccaaactatgttacataaaaactaaatgatacgctgactgctcagaataaaaaaagtggtgctacgatcctccgtctgacttatgatcgcttctcttttcttcagccacttttcttttttgttgtctagaaaacaaaaatatattgttagtgaccagattgtaatagaaaatattgtctgctttattttctcgtcattagataaattatatacccttaaattgcttttgccattgattctagcatatgtcattaactaatgtttttaccacctttttctagaacgcttgtttgtctttgtcactttctgcaaccttggttctgatgttgcttgtcattcatttctcagcgtcgggcttgtaacttgtgtttcgtttgcttggtccatttattttggttgtctgtagggaagagacgacgacatggatgtagattccattctttgtgtgagcactaccgccatatagttgacaacgatgaccgacactgtagattccattctttgtgtgtacaccaaggtatcggtgtctacgttgatctggcgatgcgcttttcacggttactgcgaccgtgatgggcatctaggtgctcaaaccattagttggactgaggaacacggagcagcagcaacaatatcgtaaggagagtgcagaagttggacaaatggagttaaagtgcacatacctaatcaagtctgtgggtctccaattctgaaatagaaagataatttatgttctcatctttctgaaatgaacaagatgactggcttctgggttaaggttttttatagagcaccatgacttatcagttttgtgaacaaccctaacttatgtggtcctgacaccacaaaaccttgtcctgatgctcctcccttttctccacctcctccatacaaccctacaaccccgatgcaatcaccaggtgatttatttagattgtccagtgaaatccttgagttcaataggacctttccttccttactctttcatctaaatgacatcctaattgggaaaatgtatacctccaaaacaagcataatgttgtcaaggctggagagcggtaaggaataactgcacgttttcctgaaaattaagttgaaaataatttgtaatcaggagctagagcgttacatggtactatgactatgtgctgctattagtctgtggctcagcggtatgtgtgttgtactgctattaatttgctatactagaatactggaatacaataggaagctactaacctgtacctcgtgggatgcaggaatgcagaataagtcaataactaccttgtccttttggttttccctaccctacattagtacgggagtgattaagggtatggaacatatggctttgttgttgacatcttttattttgtgcaggaagtagctcttccactactggagcaattgctggtggagtggttgctggcgcagccttgctatttgctgttcctgctatcagttttgcctattggcggcacaggaaaccacaagagcattttttcaatgtatatggcttcaaagttagtctttgattattatctttcttgcaacataagggcaaacaacgtttatatgtagcaaacaaatacagtttgcaaacgttttaggaacatgtttttacaataaagatatacttatagtttcaccaatggatggccaaaaaatacaaccttttacatttgtcaa

SEQ ID NO: 203733 - DNA, 1741 bp, Zea Mays
caacgttctttttgctaaatgttctttagcaatttgattagtcaaagaggttgcttgtttttttgtgggaacgagattcgggactcaggagctcacttgctcccactatgacattgtatatgtaccagacacttgcatatactaattgttttcttttaaatgcactttacttaattatactgacatatgtcattggagctgtgatgcctcatccatccctaaagatgtatagaattcatcgcttggatcaataagtgttgtttaacaggcagaaatgggtgcttaggatcttaccactgtttatttaaaatttagatagataaagagcactgaagattgttagttaattaggaccgacgctttgaatcattagaccaaggaatatgaatgcgcaaattcaaacgtactacaccttttttgtgctttctttttaggacaggagtaattgtccatcgtaacgggggtagaaagtgcagaacgctcattgttctctttttcgttgtctaaaacgttgagtttctgatctgtataagactacaagttgctcagagggccttttctggaaccatttccctcgaactgattttaattgtttccttcttttccttatccacaataccaaactatgttacataaaaactaaatgatacgctgactgctcagaataaaaaaagtggtgctacgatcctccgtctgacttatgatcgcttctcttttcttcagccacttttcttttttgttgtctagaaaacaaaaatatattgttagtgaccagattgtaatagaaaatattgtctgctttattttctcgtcattagataaattatatacccttaaattgcttttgccattgattctagcatatgtcattaactaatgtttttaccacctttttctagaacgcttgtttgtctttgtcactttctgcaaccttggttctgatgttgcttgtcattcatttctcagcgtcgggcttgtaacttgtgtttcgtttgcttggtccatttattttggttgtctgtagggaagagacgacgacatggatgtagattccattctttgtgtgagcactaccgccatatagttgacaacgatgaccgacactgtagattccattctttgtgtgtacaccaaggtatcggtgtctacgttgatctggcgatgcgcttttcacggttactgcgaccgtgatgggcatctaggtgctcaaaccattagttggactgaggaacacggagcagcagcaacaatatcgtaaggagagtgcagaagttggacaaatggtatgccatatcttcagttctcttatgatgcttcagcgctacatcttcagttttctcggctaaaaagagatcatagtcaatagtatacctatgtgtgaaagcgctatgctatttgcttgtttgctgggagaaagaaaagatagatgaaggaagtagctcttccactactggagcaattgctggtggagtggttgctggcgcagccttgctatttgctgttcctgctatcagttttgcctattggcggcacaggaaaccacaagagcattttttcaatgtatatggcttcaaagttagtctttgattattatctttcttgcaacataagggcaaacaacgtttatatgtagcaaacaaatacagtttgcaaacgttttaggaacatgtttttacaataaagatatacttatagtttcaccaatggatggccaaaaaatacaaccttttacatttgtcaa

SEQ ID NO: 203734 - DNA, 1799 bp, Zea Mays
cttaattatactgacatatgtcattggagctgtgatgcctcatccatccctaaagatgtatagaattcatcgcttggatcaataagtgttgtttaacaggcagaaatgggtgcttaggatcttaccactgtttatttaaaatttagatagataaagagcactgaagattgttagttaattaggaccgacgctttgaatcattagaccaaggaatatgaatgcgcaaattcaaacgtactacaccttttttgtgctttctttttaggacaggagtaattgtccatcgtaacgggggtagaaagtgcagaacgctcattgttctctttttcgttgtctaaaacgttgagtttctgatctgtataagactacaagttgctcagagggccttttctggaaccatttccctcgaactgattttaattgtttccttcttttccttatccacaataccaaactatgttacataaaaactaaatgatacgctgactgctcagaataaaaaaagtggtgctacgatcctccgtctgacttatgatcgcttctcttttcttcagccacttttcttttttgttgtctagaaaacaaaaatatattgttagtgaccagattgtaatagaaaatattgtctgctttattttctcgtcattagataaattatatacccttaaattgcttttgccattgattctagcatatgtcattaactaatgtttttaccacctttttctagaacgcttgtttgtctttgtcactttctgcaaccttggttctgatgttgcttgtcattcatttctcagcgtcgggcttgtaacttgtgtttcgtttgcttggtccatttattttggttgtctgtagggaagagacgacgacatggatgtagattccattctttgtgtgagcactaccgccatatagttgacaacgatgaccgacactgtagattccattctttgtgtgtacaccaaggtatcggtgtctacgttgatctggcgatgcgcttttcacggttactgcgaccgtgatgggcatctaggtgctcaaaccattagttggactgaggaacacggagcagcagcaacaatatcgtaaggagagtgcagaagttggacaaatgcaattcagcttcaaccatttggcattcatgtaatatttcacaggagttaaagtgcacatacctaatcaagtctgtgggtctccaattctgaaatagaaagataatttatgttctcatctttctgaaatgaacaagatgactggcttctgggttaaggttttttatagagcaccatgacttatcaggtaaagttatagttgtgcacaaaatgtcattttttaatccttaatgcgtgtgctattcacacatgtcttcttttgcagttttgtgaacaaccctaacttatgtggtcctgacaccacaaaaccttgtcctgatgctcctcccttttctccacctcctccatacaaccctacaaccccgatgcaatcaccaggaagtagctcttccactactggagcaattgctggtggagtggttgctggcgcagccttgctatttgctgttcctgctatcagttttgcctattggcggcacaggaaaccacaagagcattttttcaatgtatatggcttcaaagttagtctttgattattatctttcttgcaacataagggcaaacaacgtttatatgtagcaaacaaatacagtttgcaaacgttttaggaacatgtttttacaataaagatatacttatagtttcaccaatggatggccaaaaaatacaaccttttacatttgtcaa

SEQ ID NO: 203735 - DNA, 1577 bp, Zea Mays
gtgggctagaggatgtgaaaaaggttattctagatactattcagttgcctctgatgtacaagcacctgttttcttctaaattgcgcaagcgatcaggtgtcctgctatatggacctccaggaacagggaaggtccagaactgataaacatgtatgttggagaatcagagaaaaatggtcgggatatttttgagaaggctaggtctgcacgcccatgtgtcattttctttgatgagcttgattccctcgctcctgcacgaggatcctcagcagattctggcggtgtcatggacagggttgtttcccagttacttgtggagatcgatgggttgagtgacaacagccaggaccttttcattattggggctaccaataggcctgaccttcttgattctgcccttcttcgccttggtcggttcgacaagcttctttatgtcggtgtaaatactgaggcatcatacagggaaaggatccttaaagcacagacgcgcaagtataagctgcacaagaacgtttctctcttgtcagttgcacaagaatggtttcatgcagcaaagcgatcagtgagtatttctgccgacccgttacgccatatgttgggctcttcctagctttgctccgttgatcttgcgtgtggtattttttaggttgaaacattcgaaaccgatccttcaagaagtaatgacgccagtgccgaagaagtcatcgtcgagatcgacgattttatcacagtgttaggagatatcgcaccgtcgctctctctggacgagctacaaaactacgaacagttgaggcagaaggtcgaaggaccttctagatgaagttgggtttccactccctgctgacattcttaaactgctaacacaccaaaacattccctgtcttacattttcgtttgtacacaagttttcctccctgaaaacttgggcacttctatatccattcctgatttatacaatcacatccttgtagcagcatctgtattgacatcagaatgacattttctctgaagagaaacatcctgtcattctttgttagcagctctgcaactattctgaagcctttttttttttgcagatgatgcgaatcaactttgtatagttagtttcgtcgatgtacgcttgtaccatgttgtagtaaatgataaagagaataggagtccttggatcatctgctcgtttgaaccattcagttatcagccatcgaaaatagctgtctgctatattttttttcgtcagcgacgatctgtcaggatcagggacttttcattgcaacgagtgctaggtcattttttttgccaaactcaatttatgatatcccttgcttacgtgttatccaacttggtgattttagaaatgcttatcagtatggtagaaacacctcggctgcgcagattataggagtgagtatcaagttggctggacgagcgggagcgaaggggcgccgtgctgccgctcggctcacaggtgaggcagggaacaatcacttcttagattgatcaatgcttccaattgattacagacgcctggactttatagtccaactctaaacagactccttaatcttaggaactctaac

SEQ ID NO: 203736 - DNA, 1386 bp, Zea Mays
ttttgagaaggtctgcacgcccatgtgtcattttctttgatgagcttgattccctcgctcctgcacgaggatcctcagcagattctggcggtgtcatggacagggttgtttcccagttacttgtggagatcgatgggttgagtgacaacagccaggaccttttcattattggggctaccaataggcctgaccttcttgattctgcccttcttcgccttggtcggttcgacaagcttctttatgtcggtgtaaatactgaggcatcatacagggaaaggatccttaaagcacagacgcgcaagtataagctgcacaagaacgtttctctcttgtcagttgcacaagaatggtttcatgcagcaaagcgatcagtgagtatttctgccgacccgttacgccatatgttgggctcttcctagctttgctccgttgatcttgcgtgtggtattttttaggttgaaacattcgaaaccgatccttcaagaagtaatgacgccagtgccgaagaagtcatcgtcgagatcgacgattttatcacagtgttaggagatatcgcaccgtcgctctctctggacgagctacaaaactacgaacagttgaggcagaaggtcgaaggaccttctagatgaagttgggtttccactccctgctgacattcttaaactgctaacacaccaaaacattccctgtcttacattttcgtttgtacacaagttttcctccctgaaaacttgggcacttctatatccattcctgatttatacaatcacatccttgtagcagcatctgtattgacatcagaatgacattttctctgaagagaaacatcctgtcattctttgttagcagctctgcaactattctgaagcctttttttttttgcagatgatgcgaatcaactttgtatagttagtttcgtcgatgtacgcttgtaccatgttgtagtaaatgataaagagaataggagtccttggatcatctgctcgtttgaaccattcagttatcagccatcgaaaatagctgtctgctatattttttttcgtcagcgacgatctgtcaggatcagggacttttcattgcaacgagtgctaggtcattttttttgccaaactcaatttatgatatcccttgcttacgtgttatccaacttggtgattttagaaatgcttatcagtatggtagaaacacctcggctgcgcagattataggagtgagtatcaagttggctggacgagcgggagcgaaggggcgccgtgctgccgctcggctcacaggtgaggcagggaacaatcacttcttagattgatcaatgcttccaattgattacagacgcctggactttatagtccaactctaaacagactccttaatcttaggaactctaac

SEQ ID NO: 203737 - DNA, 2746 bp, Zea Mays
cttcgcctggccgtgggctgtggctcccctcgcccccccaccacctcgtctctctcctcctgtcgtgcccgcggtcgcgtccccttcaccaccaccccacccgcctccgcgtcgcttgtgctgctgccaccgccgtgagcctccaccacgggcgccacgcgttcccgggggcggatcgcgctgccgcaaaggcgatcggcgagtgacccaggggaggagatcgcccgtcggcgccgcagctgccgccgcagaccgagccgcgtttcctcccgtccggttccatcgcagctcctgtctgggccagtccgttgaggcagggcggggcggctcgatcgcccgcagatgaatcatggcttcaatgttaaacattgtcataggttctcatgtatgggtggaagataaagacttgtcctgggttgatggtgaggtattccgaattgatggtcaaaatgcccatgttcacacaaccaaggggaagacggtcattgcaaatatctcaaatattcatcctaaagacacagaagcaccacctgatggggtggatgacatgacaaggttatcatacttgcatgagcctggtgttttagataacctggctgtcagatatgcgaaaaatatcatttatacctacactggtaacattctgattgcaataaatccattccaaaggctacctagtctggttgatgcccttactatggaaaaatacaaaggtgcaaatcttggtgacctagatcctcatgtatttgcaatagctgacgccgcttacaggaaacaggcaaatgataaatgaaggaaagagtaactccgttttggtcagtggtgaaagtggtgctggtaagactgaaactacgaaattgttgatgagatatcttgcatttctgggtgggcgatccggaacaggagagaggacagttgaacaacaagttttagaatctaatccagtccttgaagcctttgggaatgcaaaaactgttcggaacaacaactcaagtcgatttggtaaatttgttgaaatccagtttgacaagagtggtaagatatctggtgctgccattagaacttacttgcttgagagatctcgggtttgccaaattaatagtccagagaggaactaccattgcttttacttcctatgtgcagctccatcggaggatcttaagaagtataagctcggggacccatcgtcctttcactatctcaaccagtcagcttgcattcaagttgatggaatcaatgacgctgaggagtaccttgcaacaagaaatgcaatggatactgttggaatcactgatcaagaacaggaagctatattccgtgttgttgctgctgtgcttcatcttggaaacataaattttgcaaaagggagagaggtagattcatccataataaaggatgacaaatctagattccatcttaagacagcaggagagctcttgatgtgtgattgtgagaagttagagaatgccttgataaaaagggaaattaatacacccgaaggagtgattaccacaacagttggtccaaattctgctactattagccgggatggtttagcaaagcagatatactctcgattatttgagtggcttgtaaacagaataaatgcatcaataggacaagacccagactctaacaaactgattggagtacttgatatatatggttttgaaagttttaaaaccaacagttttgaacaactgtgcatcaattttaccaatgaaaaactccagcaacattttaatcagaatgtcttcaaaatggaacaagaggaatacacaagggagcaaattaattggagttacatagagtttgttgacaatcaagatgtacttgacctgattgaaaagaaaccaggtggcattattgcacttcttgatgaagcctgcatgtttccaaagtccacacacgagacattgtctcagaagctgtatgaaaagttcaagacccacaaaagatttaccaaaccaaagctttctcgtactgcatttacaattcaacattatgctggggatgtaacatatcaatctgatcaattcctggacaagaacaaggactacgtggttgcagagcatcaagaattacttaatggttctaagtgctcttttgtatcaggattatttccaccagcaacagaagagaacacaaaatcatcaaaatcatcaattgcaactcgctttaagatgcaacttcacgagctcatggagactttaagctctacagagccacattatattagatgtataaaaccaaatagtgtccttaagcctggcatttttgagaataccaatgttctacagcagcttcgatgctctggtgttcttgaagccattagaatcagctgtgctggttatcccacaaggaaacaatttcatgattttctacatcgcttttgtgttcttgctcctgaaattttgaaagagaaaaatgatgaaaaagtctcatgtcaaaagattttggacaaaatgggactacagggttatcaggtgaaaaacacttcacttaccaatctcctcaacatgtattggaagagagtatttagatttcctaattggtggtaggctttacaatatatataagcctacctagggttcccccctaaccctaataggctatacatggactgggctctagatccataacactcacagccacacagtaatagcagccacacactaaaggtctaatgcacaatctaacaccctcccgttgttgaaactctagccacaacatatgttgagactgg

SEQ ID NO: 203738 - DNA, 1982 bp, Zea Mays
caaccaaacgctacctcgattgctagggagatatgctattcgagtgagcgggtatgaacacaggtttcagacgtgtcttggccctttggctcagctcaggtcacaagtcacaccccggtgcagaaaggagctccagatcacaagtcggtcaaacgatctccggggaatattttattccgtgggattccgatgcggccagtcctcctcccctctctcctgtttcttctagtagtacaaataaagaagaagaagctgagctgctcgaggcacggcgagggagacacaaggcgagtgtccctactccgagggcagtctcggtgtgcaagcgcatagcatagcaggagccacaagaaaaaaggcccatggcttccttctcaccgagtggccggatgacacggacggcggcatcttctctggcagcgcgcgtggtcctcgcgctcctcctcctcatcggggtatccggttccggagccacccaggcagcgtctccccacacccaccacagtcggcagctggatgtgaaccacaagaagccagtgcagacgtttcggcccatcaacattgcccaccgagggtcaaatggcgaactgcccgaagagacagcggccgcctacctggtagagctaaattcttcctgttttttttgttctgaacaaatcatacgcgtacgtacgtactgtatcgccttggagttgcacaaacaaaaggctaaaacaaatcgagagagagagaaaaaaaacatttaattttgcagagggcgatcgaagaaggcgcggacttcatcgagacggacgtactcgcgtccaaggacgggcatctcgtctgcttccacgatgtgacgctggacgcgaccaccgacgtcgcggaccacgcggagttcgctggcaggaagaggacctacgaggtccaaggagaagatgtcaccggatggttcatcgtggacttcactcttgaagagctcagatcactgagggtgaagcagcggttcagtttcagggaccagcggcaagtaccagatcattacgttcgaagagtacatcctgatcgcgctctacgctgacaggaccgtcgggatctacccggagatcaagaaccccgtgttcatcaaccagcacgtgaagtggtcggacggaaagcgattcgaggacaagttcgtggagacgctgctcaggtacggctacggaggcgagtacatgtccgatggctggctccggcagccgctgttcatccagtccttcgcgccgacctcgctcatctacgtctccaacatgacggactcccccaagctgctcctgatcgacgacacgacggtcccgacgcaggacaccaaccagtcgtaccacgagataacctcggacgcctacctcgcgttcatcgggagctacgtggtggggatcgggccgtggaaggacacgctggtgcctccggacccgacagacaaccgcctgggacgccccgccgacctcgtcgcgcgagcgcacgctctgcgtctccaggtgcacccgtacaccttcaggaacgagaaccagtacctgcacttcgacttccggcaggacccctacgccgagtacgcgtactggctcgacgaggtcgccgtcgacgggctgttcaccgatttcactggtagtctgcacaagtaccaggagtggactaggccgtaccggaaggagcaggagaagacgagcccggaggcactcttgcgcgagatcgcgggcatgctcaagaacgacggctatgactgatgacttaggttgccttcagttttccccgtctgtcactctctctgtaatggttaactaaataataaagcgacggtttcatggatgcatcatctggacgtgggtgtatcattaccagacactgaattttcagtaacgctctttaaaacatcagtggagtatctcgtttccttgggaacgggggatgttgccaattttttttcccaatattttttatctcttcacaaaagttatagaaaatat

SEQ ID NO: 203739 - DNA, 1795 bp, Zea Mays
aaacgatctccggggaatattttattccgtgggattccgatgcggccagtcctcctcccctctctcctgtttcttctagtagtacaaataaagaagaagaagctgagctgctcgaggcacggcgagggagacacaaggcgagtgtccctactccgagggcagtctcggtgtgcaagcgcatagcatagcaggagccacaagaaaaaaggcccatggcttccttctcgcgcgtggtcctcgcgctcctcctcctcatcggggtatccggttccggagccacccaggcagcgtctccccacacccaccacagtcggcagctggatgtgaaccacaagaagccagtgcagacgtttcggcccatcaacattgcccaccgagggtcaaatggcgaactgcccgaagagacagcggccgcctacctggtagagctaaattcttcctgttttttttgttctgaacaaatcatacgcgtacgtacgtactgtatcgccttggagttgcacaaacaaaaggctaaaacaaatcgagagagagagaaaaaaaacatttaattttgcagagggcgatcgaagaaggcgcggacttcatcgagacggacgtactcgcgtccaaggacgggcatctcgtctgcttccacgatgtgacgctggacgcgaccaccgacgtcgcggaccacgcggagttcgctggcaggaagaggacctacgaggtccaaggagaagatgtcaccggatggttcatcgtggacttcactcttgaagagctcagatcactgagggtgaagcagcggttcagtttcagggaccagcggtacaacggcaagtaccagatcattacgttcgaagagtacatcctgatcgcgctctacgctgacaggaccgtcgggatctacccggagatcaagaaccccgtgttcatcaaccagcacgtgaagtggtcggacggaaagcgattcgaggacaagttcgtggagacgctgctcaggtacggctacggaggcgagtacatgtccgatggctggctccggcagccgctgttcatccagtccttcgcgccgacctcgctcatctacgtctccaacatgacggactcccccaagctgctcctgatcgacgacacgacggtcccgacgcaggacaccaaccagtcgtaccacgagataacctcggacgcctacctcgcgttcatcgggagctacgtggtggggatcgggccgtggaaggacacgctggtgcctccggacccgacagacaaccgcctgggacgccccgccgacctcgtcgcgcgagcgcacgctctgcgtctccaggtgcacccgtacaccttcaggaacgagaaccagtacctgcacttcgacttccggcaggacccctacgccgagtacgcgtactggctcgacgaggtcgccgtcgacgggctgttcaccgatttcactggtagtctgcacaagtaccaggagtggactaggccgtaccggaaggagcaggagaagacgagcccggaggcactcttgcgcgagatcgcgggcatgctcaagaacgacggctatgactgatgacttaggttgccttcagttttccccgtctgtcactctctctgtaatggttaactaaataataaagcgacggtttcatggatgcatcatctggacgtgggtgtatcattaccagacactgaattttcagtaacgctctttaaaacatcagtggagtatctcgtttccttgggaacgggggatgttgccaattttttttcccaatattttttatctcttcacaaaagttatagaaaatat

SEQ ID NO: 203740 - DNA, 1748 bp, Zea Mays
aaacgatctccggggaatattttattccgtgggattccgatgcggccagtcctcctcccctctctcctgtttcttctagtagtacaaataaagaagaagaagctgagctgctcgaggcacggcgagggagacacaaggcgagtgtccctactccgagggcagtctcggtgtgcaagcgcatagcatagcaggagccacaagaaaaaaggcccatggcttccttctcaccgagtggccggatgacacggacggcggcatcttctctggcagcgcgcgtggtcctcgcgctcctcctcctcatcggggtatccggttccggagccacccaggcagcgtctccccacacccaccacagtcggcagctggatgtgaaccacaagaagccagtgcagacgtttcggcccatcaacattgcccaccgagggtcaaatggcgaactgcccgaagagacagcggccgcctacctggtagagctaaattcttcctgttttttttgttctgaacaaatcatacgcgtacgtacgtactgtatcgccttggagttgcacaaacaaaaggctaaaacaaatcgagagagagagaaaaaaaacatttaattttgcagagggcgatcgaagaaggcgcggacttcatcgagacggacgtactcgcgtccaaggacgggcatctcgtctgcttccacgatgtgacgctggacgcgaccaccgacgtcgcggaccacgcggagttcgctggcaggaagaggacctacgagtggacttcactcttgaagagctcagatcactgagggtgaagcagcggttcagtttcagggaccagcggtacaacggaccgtcgggatctacccggagatcaagaaccccgtgttcatcaaccagcacgtgaagtggtcggacggaaagcgattcgaggacaagttcgtggagacgctgctcaggtacggctacggaggcgagtacatgtccgatggctggctccggcagccgctgttcatccagtccttcgcgccgacctcgctcatctacgtctccaacatgacggactcccccaagctgctcctgatcgacgacacgacggtcccgacgcaggacaccaaccagtcgtaccacgagataacctcggacgcctacctcgcgttcatcgggagctacgtggtggggatcgggccgtggaaggacacgctggtgcctccggacccgacagacaaccgcctgggacgccccgccgacctcgtcgcgcgagcgcacgctctgcgtctccaggtgcacccgtacaccttcaggaacgagaaccagtacctgcacttcgacttccggcaggacccctacgccgagtacgcgtactggctcgacgaggtcgccgtcgacgggctgttcaccgatttcactggtagtctgcacaagtaccaggagtggactaggccgtaccggaaggagcaggagaagacgagcccggaggcactcttgcgcgagatcgcgggcatgctcaagaacgacggctatgactgatgacttaggttgccttcagttttccccgtctgtcactctctctgtaatggttaactaaataataaagcgacggtttcatggatgcatcatctggacgtgggtgtatcattaccagacactgaattttcagtaacgctctttaaaacatcagtggagtatctcgtttccttgggaacgggggatgttgccaattttttttcccaatattttttatctcttcacaaaagttatagaaaatat

SEQ ID NO: 203741 - DNA, 733 bp, Zea Mays
caaaaaaaagaaagagaaagaaaaggatccaagacctgaccagactcgacgacggcctggctaggtgtgtgcaccatactttacagtaatggccgataaggttacttctggcccagcccacaccagccctgcagcccatcttagatgtgcgctgtggctccaactgcgagcccttttatcccttatccaacctgatccaccacaccaccattcccgagcacactagtctctcttccctgcgcttgctcgctccttcttgcccccatggcgctgctcgccgtccagggcatggccatgtccaccgccgccgcggccctcccatctcacaaccacggcgccgtctcatcctacgtctccacctcctcctacgcgctcgcagcctccgccgccttcccccgcgcccgggctgcgttcgccgtcggcgccgtcttgtcggccaccgtcactccagttcttgacgtctactgcgggagaggggacaagaaaacgaaaaggggcaaaaggttcaaccattcatatggcaatgcgaggccgcgcaacaagaagaagggaactgggcctgcgcggctctttgcccctcctgctcctccaaggaaggatcagttcgatgatggggagatcatttcaatcgagattgacgaggacatcctggaatagctgctgagttctttactctcttcaaaatgaaactgtgtcgaaataagttttttttagaagatattaaatgattcat

SEQ ID NO: 203742 - DNA, 1229 bp, Zea Mays
gcaatccgcagtccatccagtcttggccgcgcgcctgggggataaaaagggaacatcccgataaaaagccgccagcctcccggcctcggctgcaccgctctgtatactctccggtgaatcgctcccagtcccaagtccggatcgcaccgcgaagcgttcagccatgagctccgctgcagccgccgccaatgtcgccgtcatcggaggcggaatatccggctccgtgtgcgcgtcgctcctcgccgcgcggggcgtggccgtgacgctcttcgactccggccgcggcgccggcggccgcatggcgcagcggagggaggtgatggaggatggctcggagctgcggttcgaccacggtgcgccctacttcaccgtcaccaacggcgaggttgcccgggtcgttggtgggtgggaggcgcgggggatcgtcgccgagtggaaggcaacgttcgcgtgcttcgatctggccaccggaaaatttacggacttcgagaagatttgtcgtcatttccacgcctgcctacagcacttcaagatatcccagttcgtccatgttttgctcttatggtagcattctcggagccattggctacggtacctgttcatggtttctctttcaacaattccaattctctgagctgggccttctgtaacagcagtaagccagggcgtgcttgcgtacctccaaacagacaatcttgggtgctgcattcgacaactgagtacgcttccaaggtaataaataatattggtccacgcaaaccttcggcggaggcgcttgctaaggtggcagaggaattgttcagagaattccaggcgactggattaagcattccacgaccaatttttttgaaagctcacagatggggtgctgccttcccagccattgcaattagtggagatgataagtgcgtttgggacaagagcacgaacttggcaatttgtggagatttctgtacaagcccaagtgtcgaaggagcagtccttagtgctacgagaggagtttccgaaatccttgaatgtttaaggtgcccgtcaagtatctaacgttattgttaccatccccagggcccctctctgtgattggttgtatttatgcctgcattctcttacacaaataaacaattcaagccttatttggaggcacatattgttcgtttatgctaaataagaaataaagtaacagcagaagttgcaaccttttttttttgttaaagacgggatcatttgcc

SEQ ID NO: 203743 - DNA, 1333 bp, Zea Mays
ggaacatcccgataaaaagccgccagcctcccggcctcggctgcaccgctctgtatactctccggtgaatcgctcccagtcccaagtccggatcgcaccgcgaagcgttcagccatgagctccgctgcagccgccgccaatgtcgccgtcatcggaggcggaaggaggtgatggaggatggctcggagctgcggttcgaccacggtgcgccctacttcaccgtcaccaacggcgaggttgcccgggtcgttggtgggtgggaggcgcgggggatcgtcgccgagtggaaggcaacgttcgcgtgcttcgatctggccaccggaaaatttacggacttcgagaaggagggaacagctaaaaagtatgtgggagtgccagccatgaactcgatatgcaaatcactctgtctagaggatggtgtggtggccaaatttggtgtcactgtgggcaagatggattggcttcaagatcggagttcgtggtcactagctagcctggatgggaaagatctaggctattttgattatgttgtggcgacagataagaacatagcgtcaccagcattttctgggttgactggaagaccgccacctcttgatttgtcgtcatttccacgcctgcctacagcacttcaagatatcccagttcgtccatgttttgctcttatggtagcattctcggagccattggctacggtacctgttcatggtttctctttcaacaattccaattctctgagctgggccttctgtaacagcagtaagccagggcgtgcttgcgtacctccaaacagacaatcttgggtgctgcattcgacaactgagtacgcttccaaggtaataaataatattggtccacgcaaaccttcggcggaggcgcttgctaaggtggcagaggaattgttcagagaattccaggcgactggattaagcattccacgaccaatttttttgaaagctcacagatggggtgctgccttcccagccattgcaattagtggagatgataagtgcgtttgggacaagagcacgaacttggcaatttgtggagatttctgtacaagcccaagtgtcgaaggagcagtccttagtgctacgagaggagtttccgaaatccttgaatgtttaaggtgcccgtcaagtatctaacgttattgttaccatccccagggcccctctctgtgattggttgtatttatgcctgcattctcttacacaaataaacaattcaagccttatttggaggcacatattgttcgtttatgctaaataagaaataaagtaacagcagaagttgcaaccttttttttttgttaaagacgggatcatttgcc

SEQ ID NO: 203744 - DNA, 1847 bp, Zea Mays
ctcccggcctcggctgcaccgctctgtatactctccggtgaatcgctcccagtcccaagtccggatcgcaccgcgaagcgttcagccatgagctccgctgcagccgccgccaatgtcgccgtcatcggaggcggaatatccggctccgtgtgcgcgtcgctcctcgccgcgcggggcgtggccgtgacgctcttcgactccggccgcggcgccggcggccgcatggcgcagcggagggaggtgatggaggatggctcggagctgcggttcgaccacggtgcgccctacttcaccgtcaccaacggcgaggttgcccgggtcgttggtgggtgggaggcgcgggggatcgtcgccgagtggaaggcaacgttcgcgtgcttcgatctggccaccggaaaatttacggacttcgagaaggagggaacagctaaaaagtatgtgggagtgccagccatgaactcgatatgcaaatcactctgtctagaggatggtgtggtggccaaatttggtgtcactgtgggcaagatggattggcttcaagatcggagttcgtggtcactagctagcctggatgggaaagatctaggctattttgattatgttgtggcgacagataagaacatagcgtcaccagcattttctgggttgactggaagaccgccacctcttgatttgtcgtcatttccacgcctgcctacagcacttcaagatatcccagttcgtccatgttttgctcttatggtagcattctcggagccattggctacggtatgtgcaatcttcaataatatccgttcacacagttcctcgctttcccaattgctttagactaaagacttcgttgctgtagtcagttcatacttatttactacgcacatgggcccaccatttttcattgtgcgtagaactagaacctcagcgcacaccaaaatgcatgcacatggagtaatggaccataagctagaacctcagagactctgtagtcaccaaaccaaagtgctactacaatgcagcattgtaggaaatatttgtttcccagaatcctcaagttagcaagctgtatattagctaccattatgataattatgagcatgaggctgctccttagcctaatgatattataagcaactttcatttaccggtttctgaatttattcgtctgcctcctgcaaaaatgtctatttgtcttcctaatggcgttataaccaggtacctgttcatggtttctctttcaacaattccaattctctgagctgggccttctgtaacagcagtaagccagggcgtgcttgcgtacctccaaacagacaatcttgggtgctgcattcgacaactgagtacgcttccaaggtaataaataatattggtccacgcaaaccttcggcggaggcgcttgctaaggtggcagaggaattgttcagagaattccaggcgactggattaagcattccacgaccaatttttttgaaagctcacagatggggtgctgccttcccagccattgcaattagtggagatgataagtgcgtttgggacaagagcacgaacttggcaatttgtggagatttctgtacaagcccaagtgtcgaaggagcagtccttagtgctacgagaggagtttccgaaatccttgaatgtttaaggtgcccgtcaagtatctaacgttattgttaccatccccagggcccctctctgtgattggttgtatttatgcctgcattctcttacacaaataaacaattcaagccttatttggaggcacatattgttcgtttatgctaaataagaaataaagtaacagcagaagttgcaaccttttttttttgttaaagacgggatcatttgcc

SEQ ID NO: 203745 - DNA, 2210 bp, Zea Mays
atttagcccatgaaaccgctacagccggcccagcccacggtatgtgcaggtatttgattctcagtagcagcggcatctccatccagaccccggtcggctagccccaacgccgccgccgccgccgccgcccgccgctcggggattgcctgctttcctctgccgaccacatctacaccgcacaactggtccttccaagtgagcttcaatcccctgcgtgtagatggagagggttctcaaggatgacgccgtcgaggagaagggcgaccgcgccagaatggcatcgtttgttggggccatggcaatctcggatttggcgaagaccacattgggtccaaaaggaatggacaagatcctgcaatcaactggtagagggcgtaatgttactgttacaaatgatggggctaccattttgaagtcacttcacattgacaatcctgctgcaaaggtccttgttgacatctcaaaagttcaagatgatgaagttggtgatgggacaacttctgttgttgttctagctggagaacttttgaaggaggctgagaagttaattaacatgaaaattcatccgatgactattattgcaggtcttgcttgcatcaatctcatagtaacaaatcaaatagatcaagcatacaatacaaggttacagaatggctctcgagtgtgccagaaatgctttgctacaaaataccatggacaacaaagaaaatacagataagttcagagctgatctcatgaatattgctatgactactcttagttcaaaaatactttcccaagacaaggagtactttgctgaacttgcggttgatgctgtcttgaggcttaagggtagcaccaacttggaatctattcaaattctgaagaaacctggaggatctctcaaggattcatttttggacgaaggattcattcttgacaagaaaattggcatcgggcagccaaagcggattgagaatgccaaaattttggttgcaaacactgctatggacacagataaagttaagatatatggagcacaggtccgggtggattcaatgtctaaggttgcagacattgaagctgctgagaagcagaaaatgagagagaaagtccaaaagatcatagctcacggaatcaactgtttcatcaacaggcagttaatctataacttccctgaggaactctttgctgacgctggcatacttgcaattgagcatgctgactttgagggcattgaacgtctggctcttgttactggtggtgagatcgcatcaacttttgataatccagattctgttaagcttggtcactgcaaggtaattgaagagatcatgattggggaggacaggttaattcatttctctggggtcgcgatggggcaggcttgcaccattgtcttaaggggggctagtgagcatgtgcttgatgaggcagagaggtccttgcatgatgccttgtgtgtgctgtcccagacagtaaatgatacccgtgtcttgtttggaggcggttggcctgagatgctgatggctaaagaagtggatgaacttgcaaggaagacccctgggaagagatctcatgctatcgatgctttctcccacgctctgcaagccatcccaacaatcatagctgacaatgctggtttggacagcgctgagttgatctctcagctccgagctgagcaccacaaagagaactgcactgctggaatcgatgtcatcactggcaccgttggggacatgcaaaggctggggattcaagagtcgttcaaggtgaagcaggccatactcctgtctgcgacggaggccgcggagatgatcctcagggtcgatgagatcataagctgtgccccacgcagaagagaggataggatgtgattagacacgctgtttctcggtgtagtggggatgcttgttaccctagttttgatggtggttctggggcgttcaagttggtcacatttcaagtgtttttggctcctaagaacctagtaattgttatttcgttgaaacaaccaaccgtaggcttttttttttctagattctcatgatgtaccatttggtagcgaagttcttcctctgttcttttttatgtgtcgagttttagtttaaaactagacaacaaatattcgataatggaggtagtacattgtttacgatatgcttgtgccatgtgcctctacatgttctcctattccttttgacgtaggaatgactagcttgtctttgttt

SEQ ID NO: 203746 - DNA, 1521 bp, Zea Mays
ggacggactgtgcctgcggaaaggagtaagggggaaaacatcataggtcctctttgcgcgacggccgccgcctcctctttgtagtttcattccgccgccgccgctccccgctctctcctctgcttgcggactgcgtggagcaccagcggcggccagcgggcaggaggagctccctccccaaacagagaggggtggggtatcagtgcgtgcgctcctggaggagggcgtggaagagcagagcaggcggcaagcaggggtttgggaggatggtttcgctctcgacttggttccgctatgccgcacacaagtttgattactgcatctccctctcgttgaagaaatataatgtgggccagatcagcagcacgcagctaactgatgtgatattcaaaaatttcttccatggcaagctcacctacgtgtgtcagaccaaaggggaagaagccatggctcccatcgtatctccaactggaggagccgtccttgtcagaaagctcgcaaatttgagccccacatccagtatcgctgggcaggtcaacctactcaacgctgtttcctgcagccatggatgccacgtccagcagttcccgtgcatgcgctcaagtgtcgactccgtgccctgcagggaagtgtttgtcggggacgttgtcttgttaaaagacccagagaaatctggcaattttgttattcgacgactggctgccctggaaggctatgagatggtctctaatgatgagaaggatgagccgtttgtgctcgagaaagaccaatgctgggtcctggcagacaacctagtccttaagccaaaggaagctagagatagccgcttgtttggacctgtcccaatgactgacatccttggcagagtgatatactctttaagaaccgctgttgatcacggtctagtcgagaacagcggcatggccacgaaactggatggtccagtactggcagtggagcttgatgtggaagagttggcgaagaacaataaggcgtagacacttgatgttttcgacatgctgcgctataactcaccttaacaatggatgttttttttttgtttatgatctgctgctgcttcaagtagaagtgcattggaatgttttttcacggtttgcctgtggagcagtcaataatggtcttgacagataacccagaggccgctggaccgtgttcactcagaattctcagcaggatacatcgtgtgactgtaatggttgtttttagggtttcttattcatgaagttgccgtgaatcttgtatctgcttgtgttcatggagccacggtccacgggtaagctgctgctgctgcgtcttgtagcagataaaccgtcaagattgtttaggcctgaaagggatcaaaacgttatgctgatatattgatctgaagtggacataggtaaaaaatgtctgcataaattttcgtccaatctgggtactgggagaaaagagcagaaaatatatggttacgggttcttgtctgtacattctaatatattttattacatctctttaaaatat

SEQ ID NO: 203747 - DNA, 575 bp, Zea Mays
acggactgtgcctgcggaaaggagtaagggggaaaacatcataggtcctctttgcgcgacggccgccgcctcctctttgtagtttcattccgccgccgccgctccccgctctctcctctgcttgcggactgcgtggagcaccagcggcggccagcgggcaggaggagctccctccccaaacagagaggggtggggtatcagtgcgtgcgctcctggaggagggcgtggaagagcagagcaggcggcaagcaggggtttgggaggatggtttcgctctcgacttggttccgctatgccgcacacaagtttgattactgcatctccctctcgttgaagaaatataatgtgggccagatcagcagcacgcagctaactgatgtgatattcaaaaatttcttccatggcaagctcacctacgtgtgtcagaccaaaggggaagaagccatggctcccatcgtatctccaactggaggagccgtccttgtcagaaagctcgcaaatttgagccccacgaccgtggatatcattgatccatgtaaactggcgaattgatggctcaaacaggctacatctgt

SEQ ID NO: 203748 - DNA, 1457 bp, Zea Mays
gaaaggagtaagggggaaaacatcataggtcctctttgcgcgacggccgccgcctcctctttgtagtttcattccgccgccgccgctccccgctctctcctctgcttgcggactgcgtggagcaccagcggcggccagcgggcaggaggagctccctccccaaacagagaggggtggggtatcagtgcgtgcgctcctggaggagggcgtggaagagcagagcaggcggcaagcaggggtttgggaggatggtttcgctctcgacttggttccgctatgccgcacacaagtttgattactgcatctccctctcgttgaagcagcaacaactatggaataatagcacaacgtggactgattttttattgtctgctcaggaatagagaaatataatgtgggccagatcagcagcacgcagctaactgatgtgatattcaaaaatttcttccatggcaagctcacctacgtgtgtcagaccaaaggggaagaagccatggctcccatcgtatctccaactggaggagccgtccttgtcagaaagctcgcaaatttgagccccacggaagtgtttgtcggggacgttgtcttgttaaaagacccagagaaatctggcaattttgttattcgacgactggctgccctggaaggctatgagatggtctctaatgatgagaaggatgagccgtttgtgctcgagaaagaccaatgctgggtcctggcagacaacctagtccttaagccaaaggaagctagagatagccgcttgtttggacctgtcccaatgactgacatccttggcagagtgatatactctttaagaaccgctgttgatcacggtctagtcgagaacagcggcatggccacgaaactggatggtccagtactggcagtggagcttgatgtggaagagttggcgaagaacaataaggcgtagacacttgatgttttcgacatgctgcgctataactcaccttaacaatggatgttttttttttgtttatgatctgctgctgcttcaagtagaagtgcattggaatgttttttcacggtttgcctgtggagcagtcaataatggtcttgacagataacccagaggccgctggaccgtgttcactcagaattctcagcaggatacatcgtgtgactgtaatggttgtttttagggtttcttattcatgaagttgccgtgaatcttgtatctgcttgtgttcatggagccacggtccacgggtaagctgctgctgctgcgtcttgtagcagataaaccgtcaagattgtttaggcctgaaagggatcaaaacgttatgctgatatattgatctgaagtggacataggtaaaaaatgtctgcataaattttcgtccaatctgggtactgggagaaaagagcagaaaatatatggttacgggttcttgtctgtacattctaatatattttattacatctctttaaaatat

SEQ ID NO: 203749 - DNA, 1568 bp, Zea Mays
gaaaggagtaagggggaaaacatcataggtcctctttgcgcgacggccgccgcctcctctttgtagtttcattccgccgccgccgctccccgctctctcctctgcttgcggactgcgtggagcaccagcggcggccagcgggcaggaggagctccctccccaaacagagaggggtggggtatcagtgcgtgcgctcctggaggagggcgtggaagagcagagcaggcggcaagcaggggtttgggaggatggtttcgctctcgacttggttccgctatgccgcacacaagtttgattactgcatctccctctcgttgaagcagcaacaactatggaataatagcacaacgtggactgattttttattgtctgctcaggaatagagaaatataatgtgggccagatcagcagcacgcagctaactgatgtgatattcaaaaatttcttccatggcaagctcacctacgtgtgtcagaccaaaggggaagaagccatggctcccatcgtatctccaactggaggagccgtccttgtcagaaagctcgcaaatttgagccccacatccagtatcgctgggcaggtcaacctactcaacgctgtttcctgcagccatggatgccacgtccagcagttcccgtgcatgcgctcaagtgtcgactccgtgccctgcagggaagtgtttgtcggggacgttgtcttgttaaaagacccagagaaatctggcaattttgttattcgacgactggctgccctggaaggctatgagatggtctctaatgatgagaaggatgagccgtttgtgctcgagaaagaccaatgctgggtcctggcagacaacctagtccttaagccaaaggaagctagagatagccgcttgtttggacctgtcccaatgactgacatccttggcagagtgatatactctttaagaaccgctgttgatcacggtctagtcgagaacagcggcatggccacgaaactggatggtccagtactggcagtggagcttgatgtggaagagttggcgaagaacaataaggcgtagacacttgatgttttcgacatgctgcgctataactcaccttaacaatggatgttttttttttgtttatgatctgctgctgcttcaagtagaagtgcattggaatgttttttcacggtttgcctgtggagcagtcaataatggtcttgacagataacccagaggccgctggaccgtgttcactcagaattctcagcaggatacatcgtgtgactgtaatggttgtttttagggtttcttattcatgaagttgccgtgaatcttgtatctgcttgtgttcatggagccacggtccacgggtaagctgctgctgctgcgtcttgtagcagataaaccgtcaagattgtttaggcctgaaagggatcaaaacgttatgctgatatattgatctgaagtggacataggtaaaaaatgtctgcataaattttcgtccaatctgggtactgggagaaaagagcagaaaatatatggttacgggttcttgtctgtacattctaatatattttattacatctctttaaaatat

SEQ ID NO: 203750 - DNA, 3234 bp, Zea Mays
ccaaagttcttcaggacgcagtccccgcgaatcacaatggcaacaacctgctgtgctacatatgccagctcgggatggtatcgatatccaaaatcatcagctcaccctgcacatgcgcattcctgggcgactatacggaaagataggtttttgcatcgctggagaagcgctgcaaagtcgcattccagatctcccctgcctccgctgtataaatagaccctcaagctccctgcaagcagacttcaaagcagcagcagaagaggctgggcatcctgagtgggatttgcctgatgatgctgggacgtacaatgacactcctgagaagacccagttcttcgcggataacggaacataccagaccgacaaggggaagttcttcctcacatggtactcaaacaaactgatcaagcacggtgataagatcttggacgaagcaaacaaggtcttcctgggatgcaaggtgcagctggcaatcaaagtctctggcatacactggtggtacaacgttccaaaccatgcagctgagctcactgccggatactacaacttagatgacagagatggctacagaaccatagcacacatgctcacaaggcatcgtgctagcatgaacttcacttgtgctgagatgagggacagtgaacagagttcagaggcgaaaagtgcacctgaggaactggttcaacaggtgctgagtgctggatggagagagggcctaaatttggcatgtgaaaatgcactcaaccgatatgatgcaacagcttacaacaccatcctcaggaatgcaagacctcaaggcatcaacaagaatggccctccagaacacaagttgcacggattcacctacctccgagtatctgatgaactgttccaggaacagaactacaccactttcaaaacttttgtcaggagaatgcatgctaacctggattataatccaaatgtcgatccagttgcaccattggaaagatcaaaggcagagataccaattgaagaaatcctagaagtagcacagccaaaattggagccatttcccttcgacaaggacaccgacctaccagtttaaacactccaatgatgcaaactacaggaagaatcacgagacacttaaaaaatcaagacaaatagtaagcctattgtcgagcagtagtctattaactaaataaaatgctgtgtggagcatattataatcgcatattgccctaataatattgtgttgttaaacctgaggcttgatggttatctgatgagttgtaataatagccttggtcttcctgttgtatgtatgtatttgagctaaggaataaaaattgtggctttgtgggttatttattgtgccctttagagagtatgtgtggtttacaagtgcttgaaataatagttctacctgcacattctggtgatgataaaaacaaatcattacacaacatcaagagaaaaataataatcaaatcaaaatggtgtgatgataaaagaataaaatgtgttgtgaagctaagagagcaccatggttgtatatgatttggatcacctattttctgtgtcagttttatgcatactgttatggctctggaccggatttatgtccgacgccgtctaggttcagggttagcaaatcaataaccttatctttctatctttagagtttctacattttcctttggaaggttgagtcagcctctgtctaggttcaggttagcagattaataaccttatctttctatatttaagtctttctacctttagagtttctatattttcctttggaaggttgagtcatttatggactataaataaagggttcaaggaagagcaaggcatgcttgattgccaacgattctattagcaggcactgccaatgacaactggtcggtgacgccgtacagccattatcgtgacgataggttgtcatcgatttcctgcggctgcctctaccaattctataattcaaaagaatacaaacctttcatgtaactaaaaaaatgtttgcttcacctcaacccaaagccaaagatgtcacaaattggcataaacatgtactatgtagtgtggatcatcatgcaacccgtgctcgaacttgaactaaaaaaggatcaaacctgaggatcgacagatcggccacttggttagtggaggtgggatttaacatcctgccaatctagtggtccaactcaggcaaaagtccttgaataaaagccagatgacctaacattctctgttttaaaaaataccaggacaaatctcctagaaaatgctacaagatttttttttcgtgaccgtgtcattgcacgtttttcattaagagggagtagagtgaacaaagtacaaaccccctgtcggtaattagagttaccgaataggagggttcccaaaggaccactaaagcgatactacagaacgcattttgcaacacaacataagccggtaatagaaggtaatcgtagaagaataggaagcgactgcaagtgtctgaaacccgctgaagaccattcacttgtttcgtccaagatcaagcacagcagctcccgtggctggcccaacgaaggtcttcgtgttcctcttttttcaatttctaaaatgctacaagatttgtctgtggattcgtcaacagaagcacaggaattgtctttagagtaaggagaaaatcaaagtaacagagcaaaagtaacaatatgtttttcttccagctcagggagctcactagggccatacatgctaattgattactgatagagcaaccgaattaagggtacatatgcatgaatccttgtaggtttttaacgaaacggaaggaagagtgccagagaggaacaccactatttcagtttcagtcagttaattagcggactggtgtagctagagcagaaaatgaatctatcagaacatgttatagggctgatcccaccaagtttagcaaatcacaaaagtactacatggagaaaataaaaacccctacatattatggctcacacatatccgtgacagatatcctattgcttttgatcctgaaaatatcatatagcaacttgggcgttacaaacaatacggaatacggtgtgtggtatgctgtgaatgaaggttaacgctactgcttcagttaagcgctagcaggcgcgcgggccttgacttcgattgaattgattgattgatggaactactcgcaaatcatgattcggggtcgactgcgtgatctcaacgagggtgtggtactgtggtcttgagcctggaacaggc

SEQ ID NO: 203751 - DNA, 4340 bp, Zea Mays
ccaaagttcttcaggacgcagtccccgcgaatcacaatggcaacaacctgctgtgctacatatgccagctcgggatggtatcgatatccaaaatcatcagctcaccctgcacatgcgcattcctgggcgactatacggaaagataggtttttgcatcgctggagaagcgctgcaaagtcgcattccagatctcccctgcctccgctgtataaatagaccctcaagctccctgcaacatccatcaaggcccaagctcagcgaccaccaagcagagcaagccagtgaggtctctcagagcgtagccagccagctacaatggcggggaacgcgctagccaactatgtccaggtctacgtcatgctcccgctggatgtcatcactgtcgacaacacgttcgagaaggaggacgagacgagggcgcagctgaagaagctgacggaggcgggcgccgacggggtcatgatcgacgtctggtgggggctggtggaagggaaggagccgggagtctacgactggagcgcctacaggcaggtgttcaagctggtgcaggaggccgggctgaagctgcaggccatcatgtcgtgccaccagtgcggcggcaacgtcggcgacgtcgtcaacatcccgatcccgcagtgggtgcgggacgtcggcaaaagcaaccccgacatcttctacaccaaccggagtgggctgacgaacatcgagtatctcacgcttggagtggacgaccagcctctcttccatgggagaactgccattcagctgtatgctgattacatgaagagcttcagggagaacatggcagacttcttggatgctggtgtcgttgtggacattgaggtgggacttggccctgctggcgagatgaggtacccatcgtatccccagagtcagggatgggtgttcccaggcgttggagaattcataagacagactagtcttggtccgtgcgttggtttctgctggaagcagtcacaaaagaaatgagagaaaaaaagtataaaagtggctaaatcaaaagttctcttggatgaagtaacaatttgactgatcaggccagcaatgccttaaaattcgtgctgtgcttttcagaagaatgtcagaaacaaagcctagaccacatcaattgagaaaaataccagatgaatcaaatgcttgataaactaatgacaaggaataaataaagcaagcttccttcaaatcaaagaaaatggaacaaaacaagtaccaactaatattaatgtgtcattaccagcaaacagaggactagaccttaaatgctacaattgttactaaagcgataaaataaaactgcagtgctatgataagtacctgcaagcagacttcaaagcagcagcagaagaggctgggcatcctgagtgggatttgcctgatgatgctgggacgtacaatgacactcctgagaagacccagttcttcgcggataacggaacataccagaccgacaaggggaagttcttcctcacatggtactcaaacaaactgatcaagcacggtgataagatcttggacgaagcaaacaaggtcttcctgggatgcaaggtgcagctggcaatcaaagtctctggcatacactggtggtacaacgttccaaaccatgcagctgagctcactgccggatactacaacttagatgacagagatggctacagaaccatagcacacatgctcacaaggcatcgtgctagcatgaacttcacttgtgctgagatgagggacagtgaacagagttcagaggcgaaaagtgcacctgaggaactggttcaacaggtgctgagtgctggatggagagagggcctaaatttggcatgtgaaaatgcactcaaccgatatgatgcaacagcttacaacaccatcctcaggaatgcaagacctcaaggcatcaacaagaatggccctccagaacacaagttgcacggattcacctacctccgagtatctgatgaactgttccaggaacagaactacaccactttcaaaacttttgtcaggagaatgcatgctaacctggattataatccaaatgtcgatccagttgcaccattggaaagatcaaaggcagagataccaattgaagaaatcctagaagtagcacagccaaaattggagccatttcccttcgacaaggacaccgacctaccagtttaaacactccaatgatgcaaactacaggaagaatcacgagacacttaaaaaatcaagacaaatagtaagcctattgtcgagcagtagtctattaactaaataaaatgctgtgtggagcatattataatcgcatattgccctaataatattgtgttgttaaacctgaggcttgatggttatctgatgagttgtaataatagccttggtcttcctgttgtatgtatgtatttgagctaaggaataaaaattgtggctttgtgggttatttattgtgccctttagagagtatgtgtggtttacaagtgcttgaaataatagttctacctgcacattctggtgatgataaaaacaaatcattacacaacatcaagagaaaaataataatcaaatcaaaatggtgtgatgataaaagaataaaatgtgttgtgaagctaagagagcaccatggttgtatatgatttggatcacctattttctgtgtcagttttatgcatactgttatggctctggaccggatttatgtccgacgccgtctaggttcagggttagcaaatcaataaccttatctttctatctttagagtttctacattttcctttggaaggttgagtcagcctctgtctaggttcaggttagcagattaataaccttatctttctatatttaagtctttctacctttagagtttctatattttcctttggaaggttgagtcatttatggactataaataaagggttcaaggaagagcaaggcatgcttgattgccaacgattctattagcaggcactgccaatgacaactggtcggtgacgccgtacagccattatcgtgacgataggttgtcatcgatttcctgcggctgcctctaccaattctataattcaaaagaatacaaacctttcatgtaactaaaaaaatgtttgcttcacctcaacccaaagccaaagatgtcacaaattggcataaacatgtactatgtagtgtggatcatcatgcaacccgtgctcgaacttgaactaaaaaaggatcaaacctgaggatcgacagatcggccacttggttagtggaggtgggatttaacatcctgccaatctagtggtccaactcaggcaaaagtccttgaataaaagccagatgacctaacattctctgttttaaaaaataccaggacaaatctcctagaaaatgctacaagatttttttttcgtgaccgtgtcattgcacgtttttcattaagagggagtagagtgaacaaagtacaaaccccctgtcggtaattagagttaccgaataggagggttcccaaaggaccactaaagcgatactacagaacgcattttgcaacacaacataagccggtaatagaaggtaatcgtagaagaataggaagcgactgcaagtgtctgaaacccgctgaagaccattcacttgtttcgtccaagatcaagcacagcagctcccgtggctggcccaacgaaggtcttcgtgttcctcttttttcaatttctaaaatgctacaagatttgtctgtggattcgtcaacagaagcacaggaattgtctttagagtaaggagaaaatcaaagtaacagagcaaaagtaacaatatgtttttcttccagctcagggagctcactagggccatacatgctaattgattactgatagagcaaccgaattaagggtacatatgcatgaatccttgtaggtttttaacgaaacggaaggaagagtgccagagaggaacaccactatttcagtttcagtcagttaattagcggactggtgtagctagagcagaaaatgaatctatcagaacatgttatagggctgatcccaccaagtttagcaaatcacaaaagtactacatggagaaaataaaaacccctacatattatggctcacacatatccgtgacagatatcctattgcttttgatcctgaaaatatcatatagcaacttgggcgttacaaacaatacggaatacggtgtgtggtatgctgtgaatgaaggttaacgctactgcttcagttaagcgctagcaggcgcgcgggccttgacttcgattgaattgattgattgatggaactactcgcaaatcatgattcggggtcgactgcgtgatctcaacgagggtgtggtactgtggtcttgagcctggaacaggc

SEQ ID NO: 203752 - DNA, 1475 bp, Zea Mays
gaagaagtcatttttgaagtataccgttctgaaagtgtgggtgattgctggtttaaaaccagccaaaaacccatagaagaataagaagtgctctgcatctcccctggtcttaaattccatcccaacttgagcatcaaagttttcacgagcacttgatgtttcaactgcccttccatctacatttggtgcacaatcagatcatttggagttttcgagatggatgatttcgtacctcggcgtatgcacttgaacatccatccacttcaaaattcttaccttgtttatggacatatagctagacgaaatgcagctgttgtgctctagtcatcaaataagaaggcataggttgagaagatcatggagaccaagcaagtttggaggcggaggcgtaggggcaagttcatgtaataggtttgttttttgtgtggcagatcatcattggatggctaatggatagtgtcaggtttctctccaattgcagaggttatttttacgtgggtagcactgattgaatgagagaaacaacagtaaaatgagggcgtggggctcagatctggtggcgaggattgttgtatcgaacctgcacaagaacacgaagaagtcattctcggagacgtttaaggacatgtacatgcaaacaagagatccaggctgatgcccctctagtcactgaagatgtttatgaaatcatcatgaagaatgctgctcgcttggacagtgagataatttatgatagggatttcgactacgactattttggcttcaaaactctagagaggtcttacctgttgaagcttgatggtaaggtcgttgaaaggctacaacagatgttaatgaaggtttcactggggatacacaaggaagacatcgagtctgccatcaggacgtaccatctgatgtcccagcgctggtttactcatgcttcaccgatgcttttttcaatgctggcacgtcgaggccccaactgttttcttatatgcatgaaagatgacatcattgagggaatctatgaaaccctcaaagagtgtgctgtaataagcaaatctgctggaggaattggtgtctcagttcataatatccgtgctactgagagttatattcgaggaacaaatggaacatcaaatggaattgttcttatgttacgtgtctttaatgatactgctcgctatgttgatcagggtggtggcaaaagaaaggtgcattttgctgtatacttggagccttggcatgctgatatttttgagttctttgatctgagaaagaaccccaggaagtttgtttttctaggttcttaaggaatcaagtgacgaggaaagggagcaagctgaagagatgatgaagtactagtttgtttttctaggttcttaagtgtcacacccgggtttcggggcaccaagacccggacgcgaacataatcaccaggtgtgctgggaccaagtctcacacatatgatgaatcatggcacaggatcgaat

SEQ ID NO: 203753 - DNA, 2206 bp, Zea Mays
gggcgcttcaaccatgccatccaaggagcagcaatgctaactgtcatggagcatggtgaaaagctctctggaatggcacaccttagggagttacaaaacacacttattcagcatggctcaagcacccatttttcacctcagtcgaaaacccaaggtactggtgccctttggaaccttattcagttggttggtgagaaagctcgaagaaacatggttcttttaatggatcgtgataatgctgaagtgttctacagtagggtttctgatatagaggatctattttattgtttatctcatgaacttcaatacatcattagtagagaagaacacccttctgttcagatgcaacgtgcacttgagttagcaaatgcttgtatcaccatagttcaggcagcatcacactacaagaaggatcacaaggaatggtatccatctcctgaaggactgataacatggaacagccaacctgttctacggtctggaatctggaatttggcatccttgattatggagcttttgggagaatcaggagctgcagacatgtcaatgaaatccagtctatggtctcagctggaaggacttacagatattctactggaggcatatatgtgccttttaactgcccaatttgaacgtgggcaggaacatggtgtgctagtgcaagaatattgtgaacgaagagatgaacttctcagatccctctacaaccttgctaaacaaatagtggaggccaaataccaggagtcaagaaatggtgcggacaagccagatctgaaggaatctatacttagagaggttatttctcctattttagcgacagccaaacgacatgaagggtaccaaacactgtggcagatttgctatgatctagatgattcagcatgatagcgtagggcctcatgggggattcagtttctttgtctttaaggagttagtcaacagaggagactactctaatctgttaaggctaggtgaagaattccaggaagagcttgcaagctttctgaaagagcggagtgatctgctgtgggttcatgagatatgcttaaaccagttctcatctgcttccgacacccttcatacctatgctctgcgtcgtagtcctgatggagatgccagcttcacaaccagcagaaagccactatcctttgctgaaagaagacgtcttctttatctctctaaaattgctgcaacagcaggtaaggacattgattatgaagtgaaggttgcacggatagaagcggacattcggattctaaaactgcaggaagaaattgttcagcatgatccagaatatgcacaagtcaaatctacaaacacattgcttggtccatcagaactgattgagatgtgcttgaggagagaccgagagctctcccttaaagcctttgaagtatttgctttgacaagctcatcgttccgaagttccaacagaggccttctagaggcatgctggatgaatgcaactgaccaagatgattgggtaaagctttcagaggcatccatgtcagaaggttggagtgacgaggtcatcgaagaatctcttcaagcaactgtcctcttcaaagcttccaggttgtgttacagcccggatgctgtggtgtatgacggcacctttgaggatgttctgcctgtgaagaaagaggatgtacatctgagaggtttggagagtaaatgtttgtcagttgaagaagtgttgatgcagcacgaggattttccagatgctggtaaattgatgatgactgcagtgattaggggcaaggaaccaatttttacagccacagaacccgtggagatggactcatgaatacccgttttagatttctatatgatagactgccaccatatcgcagtcatttcattgtaattcatccatcgggtagtttcatcatcgtaaaaatcttgtcttagcgacaaggggtctgtactctgtagttttggttgtttctgttctgcgcagtcacagaaacttgattccgtagcacaagaatcagttcacgccgggttttagcatgagctatatcttctaatggttagtttggaaattagcaggaaatttgctcatttttctcgcagggaatcctggggatttaaatttccaaactagcttttgagtttttttaaggaaaatgccttctgtgttaatcagcttagagtaaagtacatttctggttctggtagaggtgtcaattctgcctataaattt

SEQ ID NO: 203754 - DNA, 573 bp, Zea Mays
aaggcttcttcccctttctcgtgcactctagtaatgctgcccacctagggcgactgggcgagtcagtacttcagacttgagtccacccagccagccaagacacgcagcgcaggcgcatcccagccagattcaacccgagttcgcgacgagagcacgagatggcgatgcggacagcgctgacctccctccccgcgcgcctgcgcgcccctgcgccccccgcggcgacgggcggccggcgcctcctcagcgacgggaaggggcgtgtgctcagcgaggaggagcgcgccaaggagagcatctacatccagaagatggagagggagcggcaggagaagctgaagaagaggctcgagcaggagaaggccgactccgacaaggccaagcccgccgacgccgacaaggtattttcggattcagaattatggatatggagcacgaccaggacgaaggctgagccagacgaaggtcgggggcagccgaagctgtacgcagggaagcttcggcgcgatggcacaagggggaaccgaccttaagatgaaaagacttcggggtcctcaatagatttccataaac

SEQ ID NO: 203755 - DNA, 2845 bp, Zea Mays
cctagggcgactgggcgagtcagtacttcagacttgagtccacccagccagccaagacacgcagcgcaggcgcatcccagccagattcaacccgagttcgcgacgagagcacgagatggcgatgcggacagcgctgacctccctccccgcgcgcctgcgcgcccctgcgccccccgcggcgacgggcggccggcgcctcctcagcgacgggaaggggcgtgtgctcagcgaggaggagcgcgccaaggagagcatctacatccagaagatggagagggagcggcaggagaagctgaagaagaggctcgagcaggagaaggccgactccgacaaggccaagcccgccgacgccgacaaggtaccgtagcatcgttgtccgcttgacatcgagcggcacagagctatctgatctgcatgtggaaattacattgttgtgtggactctacactctagctttcaagtcgctgcaaacctgtcgggcaagtcccagacgaaactttagatgccgaactggtcctgatgcaatgggggttgggatggggtcctctgtctactgaacaaaatggatggggatttgtggaacactcaagtacgttttgcagggtttagttctcaagaacatggaatgtccagatcatgagttaatctggactgtgggtttactttgactgaacgttttttttttacaccagaggggatttagaatggggggatttgggtctaattctgtagccgtgtgtgaatggcataatgctgtggaccctaattgagccaaggagcttggtccttggagttaactatgcataaatttccaacacaaacatgtacagtaccctattctacttatagggtctgatttctatatccgtgagttatcattcctctgcttgccccatggcctataaacccaataagcccttgtttggatgcactccgatccattaatcatccatcctaaattcccaatccctctcaacccatgtggattggagtgcaccgaaacaatccctaatcagacatgagtctgtaattttttttcagaagtcaaaagatacatagccaagtacggaagtaaagtcttctacgattattacaagattacaaaccgtcatgctgaactctacttccatttgttttggttcacaaaacagcgtcaagagggtggggtcaagagggtgggatcaagcgtgcgttcacaaaacagcatcaatctgctcactgtccgaaacaaattgttctgcgtccttagtcaatgaaaccactctgctgagacgaaagctaggggagcaaatggggttagagaccccagtagtcctaggcataaacaatggatactaggtgttgtgcgactcgacccgtgcagtgttgtacctaatgcgttaagtatcccgcctggggagtacgttcgtaagaatgaaactcaaagaaattgacgggggaccgtacaagcggtggagcatgtggtttaattcgatgcaaagcgaagaaccttaccaagtcttgacatgccgcgaatcctcttaaaagagagaggtgccctcgggaacgcggacataggtggtgcatggctgtcgtcagctcgtgtcgtaaggtgttggattaagtctcgcaacgagcacaacccttgtgtttagttgccactatgagtttggtttggaaccctgaatagactgtcggtgttaagccggaggtctgagaggatgaggccaagtcatcatgccccttatgccctaggcgacacacatgctacagtgggcgggacaaagggttgcgatcttgtgagggtgagctaactccaaaaccccgtcctcagttcggattgcaagctgcaactcgcctgcatgatcgctagtaatcgccggtcagtcataagtgttatggtctggtgtctatgttttaggttccaaataacattttcgagttcctttcctccacgcatttaggaaaaaagagtgtcagtcaggtacatgtaccatcatcccttttcaactcatccggttacagtacactgcagttaccgtctcacagattgggattgtttggcataggctttaatatgtttgtcgcgttacaaacttggatacaatgatttcaagtcgtccgactaatcgcgattaatcgcgattagtcgggctagtcggttttagtggagcgaccagggtatccgacccgattaggtcgactaatcgtccagtcgtccgattagtcgtcgaccaagtgcgattagtcgtccagttaatgtgtggacgattagttaggtttggttggctggtggctgacctgtttttgctttgggctagacgtctagtaagtctgcaactctacatcatatgttataatatgttatgtagtgagtagtgagtgatattcagttcatgttctgaaatctgaattcttaattctgaaatgtgatctgagtgcctgacaattatagtattcataatttctatgatgttctgaaatctgaatgttcaatggtgttctgaaatctgaattgtccactctccactgtccagttctagtattcatatttgttttgtttggtaatttggttaccttgatattgcctcctatatgctatattgctatatgctactgttgggggccttcgtcctccgaaggtcctcaaaaacatgatttgacaatgttttccaagtgaattatatgaacaggtattttcggattcagaattatggatatggagcacgaccaggacgaaggctgagccagacgaaggtcgggggcagccgaagctgtacgcagggaagcttcggcgcgatggcacaagggggaaccgaccttaagatgaaaagacttcggggtcctcaatagatttccataaacc

SEQ ID NO: 203756 - DNA, 577 bp, Zea Mays
ctgaaggcttcttcccctttctcgtgcactctagtaatgctgcccacctagggcgactgggcgagtcagtacttcagacttgagtccacccagccagccaagacacgcagcgcaggcgcatcccagccagattcaacccgagttcgcgacgagagcacgagatggcgatgcggacagcgctgacctccctccccgcgcgcctgcgcgcccctgcgccccccgcggcgacgggcggccggcgcctcctcagcgacgggaaggggcgtgtgctcagcgaggaggagcgcgccaaggagagcatctacatccagaagatggagagggagcggcaggagaagctgaagaagaggctcgagcaggagaaggccgactccgacaaggccaagcccgccgacgccgacaaggtattttcggattcagaattatggatatggagcacgaccaggacgaaggctgagccagacgaaggtcgggggcagccgaagctgtacgcagggaagcttcggcgcgatggcacaagggggaaccgaccttaagatgaaaagacttcggggtcctcaatagatttccataaacc

SEQ ID NO: 203757 - DNA, 3233 bp, Zea Mays
tctccaccggaggcgggaggcgtagggtttaggcgcggaatggcgggaggaggaggggggcgcggcgaatcctcgccggcgatcaagccaattagtaaggcggtagtgcaccgcatctgctctggccaggtcatcttcgacctttcctccgccgtcaaggagctcgtcgagaacagcctcgacgctggcgctacctccgtcgaggtcagcctcaaggcctacggcgaggagtggttcaaggtcgccgacaacggatgcggctcttgctcttaagcaccacacgtccaagatatcagatttctctgaccttggatccctggttaccttcgggttccggggcgaagctctgagctcgctctgcgcgcttgggaaactgacggttgagacgaggagcaaggatgagctagttgggacgcatttggagtttgagcactctggcgtggtggttagtgaaaggaagaccgcacggcaggttggaaccacggtgacagtagaaaagttgttctccaccttgccggtccggagcaaggaatttagcaggaacattcggaaggaatacgggaaagtgatctcgctgctgaacgcttatgcattgattgccaaaggggtcagattactctgcactaatactgttggaaaaaattctaaaatggttgtgcttagaactcaaggaagcagttcgatgaaagacactatcattactgtatttggtccaaacacttttaaatgtcttgagcccttcagtgttaccacctcggatggctgccagatagagggctttctttcaaaacctggacctggtactggtcgcagttcaggagatagacaatttttctatgtgaatggcagacctattgatatgccaaaggtcacaaaacttgtcaacgagctatacagaagctcaaatgccaaacaatatcctgtggtaattctagattttcatattccaactacatcctatgatgtgaatattgcacctgataagagaaaagttttcttctcatctgaaagcatgattctgcaatctttgcgggaaactgttgaaaacctgtactcccctcaacaatgcagtttctcagtcaatcacatcaaagatcctgaaaaggaaggggatgctgttactgataggcataatgaagacacaaatgcaatcgtaatggtgaatgttccatcttactacaacaatgatgacaatgaagaaacagacaatgaggatcaggtttctccagagaaccagaaattgccttcagtggctagagatgcgagccccctgtcaggaggcacaaccactcaggctgatagatctgcttggcttccatcctttgcatatgaccagccaaaaagatcgcctaaagaaggaagaagtttggtattgggtagaaattgttttagaactgggcttgctgcaaagccaactcattcaagtactgttcagtcttctctcctgaactttgtatcactaaacaagcggaaacacgaagatgattgcactcttatttctgaagctgcagtgctgagaagagagacatgctctgaacatatgaggagatcaagtttagaagcaaactttgttacaccaaacaagcagaaccatgaggatgattgcattatttctgagtctccagtgctgagaagtgggacatgctcagaactatacaagaggacaagtttagaagtcaattttccatcaccaaataagcagaagcatgatgacaattgcactcttatttctgaaatccctgtgttgagaagaaggacaaattcagaacaagcgagaggaacaagtttagaagcaaattcagcacctgagttcaatttacctctggaaacaaactctttaaaacagcactcctcacaatattttggatctgtgaggacagatgtttcaccacagcattctaaacaacctaatattgtgaccattggggcaggggtaacaggtccatgtgatgttgacactacagaatctgatatggatcaacagtgtggtcgatgccattcagcttctggtgctcccaacaaatattcagaatcacgacatcagaatgcattggctgatagtcctttgcctgatgctcaggattatggtgatggtgctgcagtatgttatgcatctgtacaatatcccattattcaatttacggttgccgagcttaggagaagaagaaagaattgttttatgatatctcatataaataaatcatattgtctcgagaaaacaacaaggtgctataaagctgcaacactggacatcactgtacccttagctgacgaggcaaaatcaaactcattagctgcagccaccaatgagttggacaggcttttcagtaaacatgattttcgagaaatggaggttgttggacaatttaatcttggttttatcattggaaagcttggccaggatctgtttattgtagatcagcatgcttctgatgagaagtacaactttgagtgcctttcgcagtctacaattttaaacgtacagcctcttctcgagccactgagacttgatctatcaccagaggaagaagtaattgtttctatgaacatgagcaccatcagaaaaaatggtttcgttttggcagaagatttgcatgcttctcccggtaaccattatcttctgaaagctgtacctttcagcaaaaatattacatttggtgttcaagatgtaaaggagttgatctccatgcttgccgatagtcaaggagactgttcaataatcagtagctacaagctggatacagccgactctgtttgcccttcgagggttcgtgctatgttggcttctagggcttgccgaatgtctactatgataggcgatccactaacaaaagctgagatgaagaagatacttaaaaacatggctggattgaggtccccttggaactgcccacacgggaggccaacaatgcggcacctagctgacctgcgtactatgaaggcgaaagatatcgcgtttaaacgctaggccctgttggctgccggcctgccgcgcgtggggggcctacgctcaacggaaggatgtttctatgctcttccgctttatgttgaagaatacaagaagtgcatatgtgccccgcccccgcttgtaaattacggcgtacgcacgtcgcgccgcccccgcatgcaaggtccatttgtttgtttgttttttgtcagaaggaatacctgtggtgatatttatgtccagtctccagggatgtatggtgttctgttttggcaaatagaagctt

SEQ ID NO: 203758 - DNA, 3256 bp, Zea Mays
tctccaccggaggcgggaggcgtagggtttaggcgcggaatggcgggaggaggaggggggcgcggcgaatcctcgccggcgatcaagccaattagtaaggcggtagtgcaccgcatctgctctggccaggtcatcttcgacctttcctccgccgtcaaggagctcgtcgagaacagcctcgacgctggcgctacctccgtcgaggtcagcctcaaggcctacggcgaggagtggttcaaggtcgccgacaacggatgcggtatatctccctccaacttccgggctcttgctcttaagcaccacacgtccaagatatcagatttctctgaccttggatccctggttaccttcgggttccggggcgaagctctgagctcgctctgcgcgcttgggaaactgacggttgagacgaggagcaaggatgagctagttgggacgcatttggagtttgagcactctggcgtggtggttagtgaaaggaagaccgcacggcaggttggaaccacggtgacagtagaaaagttgttctccaccttgccggtccggagcaaggaatttagcaggaacattcggaaggaatacgggaaagtgatctcgctgctgaacgcttatgcattgattgccaaaggggtcagattactctgcactaatactgttggaaaaaattctaaaatggttgtgcttagaactcaaggaagcagttcgatgaaagacactatcattactgtatttggtccaaacacttttaaatgtcttgagcccttcagtgttaccacctcggatggctgccagatagagggctttctttcaaaacctggacctggtactggtcgcagttcaggagatagacaatttttctatgtgaatggcagacctattgatatgccaaaggtcacaaaacttgtcaacgagctatacagaagctcaaatgccaaacaatatcctgtggtaattctagattttcatattccaactacatcctatgatgtgaatattgcacctgataagagaaaagttttcttctcatctgaaagcatgattctgcaatctttgcgggaaactgttgaaaacctgtactcccctcaacaatgcagtttctcagtcaatcacatcaaagatcctgaaaaggaaggggatgctgttactgataggcataatgaagacacaaatgcaatcgtaatggtgaatgttccatcttactacaacaatgatgacaatgaagaaacagacaatgaggatcaggtttctccagagaaccagaaattgccttcagtggctagagatgcgagccccctgtcaggaggcacaaccactcaggctgatagatctgcttggcttccatcctttgcatatgaccagccaaaaagatcgcctaaagaaggaagaagtttggtattgggtagaaattgttttagaactgggcttgctgcaaagccaactcattcaagtactgttcagtcttctctcctgaactttgtatcactaaacaagcggaaacacgaagatgattgcactcttatttctgaagctgcagtgctgagaagagagacatgctctgaacatatgaggagatcaagtttagaagcaaactttgttacaccaaacaagcagaaccatgaggatgattgcattatttctgagtctccagtgctgagaagtgggacatgctcagaactatacaagaggacaagtttagaagtcaattttccatcaccaaataagcagaagcatgatgacaattgcactcttatttctgaaatccctgtgttgagaagaaggacaaattcagaacaagcgagaggaacaagtttagaagcaaattcagcacctgagttcaatttacctctggaaacaaactctttaaaacagcactcctcacaatattttggatctgtgaggacagatgtttcaccacagcattctaaacaacctaatattgtgaccattggggcaggggtaacaggtccatgtgatgttgacactacagaatctgatatggatcaacagtgtggtcgatgccattcagcttctggtgctcccaacaaatattcagaatcacgacatcagaatgcattggctgatagtcctttgcctgatgctcaggattatggtgatggtgctgcagtatgttatgcatctgtacaatatcccattattcaatttacggttgccgagcttaggagaagaagaaagaattgttttatgatatctcatataaataaatcatattgtctcgagaaaacaacaaggtgctataaagctgcaacactggacatcactgtacccttagctgacgaggcaaaatcaaactcattagctgcagccaccaatgagttggacaggcttttcagtaaacatgattttcgagaaatggaggttgttggacaatttaatcttggttttatcattggaaagcttggccaggatctgtttattgtagatcagcatgcttctgatgagaagtacaactttgagtgcctttcgcagtctacaattttaaacgtacagcctcttctcgagccactgagacttgatctatcaccagaggaagaagtaattgtttctatgaacatgagcaccatcagaaaaaatggtttcgttttggcagaagatttgcatgcttctcccggtaaccattatcttctgaaagctgtacctttcagcaaaaatattacatttggtgttcaagatgtaaaggagttgatctccatgcttgccgatagtcaaggagactgttcaataatcagtagctacaagctggatacagccgactctgtttgcccttcgagggttcgtgctatgttggcttctagggcttgccgaatgtctactatgataggcgatccactaacaaaagctgagatgaagaagatacttaaaaacatggctggattgaggtccccttggaactgcccacacgggaggccaacaatgcggcacctagctgacctgcgtactatgaaggcgaaagatatcgcgtttaaacgctaggccctgttggctgccggcctgccgcgcgtggggggcctacgctcaacggaaggatgtttctatgctcttccgctttatgttgaagaatacaagaagtgcatatgtgccccgcccccgcttgtaaattacggcgtacgcacgtcgcgccgcccccgcatgcaaggtccatttgtttgtttgttttttgtcagaaggaatacctgtggtgatatttatgtccagtctccagggatgtatggtgttctgttttggcaaatagaagctt

SEQ ID NO: 203759 - DNA, 1137 bp, Zea Mays
taatctatagaaaaaggtggtcaaatatacgtattgaagactactccaagtcaaaggtggtcaaatattcttgactgaagatagtagtttgcagaatctgttagaaacatacaatcctcattctgcaatcaacttgtggctgctctattgttgggcctttataaggctagttactacccttgttcacagagaagaatagataaattccttttgggtcagtatattctttatgtattgatctcttggttcatccaatagtctgcagaaacaggttgcacacaagttgttgtaattgaatccttcatgattggtgtggtgtgaagaggattaccatattgtgctggggttctgacagctccattgctctttagtacatacaagctcatctttgatgttaagttggagaagttttgaggtgtttggttggctgctttaaacagttgtattgtgtgctgtctgtgtatggaaatcagtagctctgtggactgtggtcaggaaaaagaacagccaacaaataaacgtccaaggtcagaaagtactacagaatcaagcacaaaagcatccagggagaaaattagaagggacaagctgaacgagaggccgagaagaatgagctgcgagacgagaagcaaaggctgaaggccgagaaggagagcctggagcagcagatcaagttcctgaatgcccggccaagcctcgtaccacaccacccagtgatcccagcctctgcgttccctgctccccaggggccagcagccgccgccaggcacaagctgatgatgcctgtgattggctaccctggattcccgatgtggcagttcatgccgccttcagatgttgacacctctgatgaccctaggtcttgtcctcctgtggcgtagaagccgtgcgaaatcctgttggaaagaggcgatgctgccttccattgattcaaatcttgatcggtccgcagtgttgttggtgtagttgattccagaactgaaggggatgttacatgtgtcggacggtgacatggggtgatctgatgacccctttgtatattatatatggtatggtataaataaattccgcgaccagaagctaatgtggatcggtggattagcttatgtctattcttgcctgtttggttatgttcct

SEQ ID NO: 203760 - DNA, 3961 bp, Zea Mays
gagacccattcagcccaccggctacacggcccatattccgtactcgtgaacctcgtgctgacgtgctcacacagtcactccgtttagctcaaatccttatcggcgactcggcgtcggagctcacgaccacgaccgcttccacgccctcgaccccgaacccccaatcccggacgcgaccgctgaaccctagcatactccggccatctgctgccggccccggcgatcccccgccatggcctcccccgagggcacaacgtgggtcttcgactgtccccttatggacgacctcgcggtcgccgccgacttcgcggcagcccccgcgggaggatttttctgggcagcgccgccgtcgctgcagccgcaggcgccagtgcagtctgtcgttgccgcgtcggctcccaacccatggtaattgccggattacggtctcgatttgggctcggccgtggcggtggttggttggacttcgtggggttgggttgcatttggtcggggttcgttgccagcatatctgtagattctgtacgtatagtagttcgttatatggatcaatgacttgattggaattcggtgaagcggctgaactgtgggatttggaccgtgtccttggaatcgtgtttgcccaacattaatagtagaactgattatggttctttatgtttccaatttactataccagcgtcgtcctgtggaaggtgtgggctgtggactctgttggttctgccagtggagttgtgtgagaggactgaggaaatggttcacaggatgggtcagtggacctttactataagttctaagtagtatggcgtgaaaggactgttcccatcttatggtgtgcaagctggtaggtaggtgcatataggtagtctcatcaagcctagatgctttcctttgggcacacctttgtgtcatctatactcttgtcacaaaaacatattgtttattaaaacatttaataaagcattagaaactacaaacatcaataaccatcacattatttatttggaaatatgtaagttatatatgtgtagatttgtattcaaaatctgttaaacttgaaggattttaagaatttattctgtgtggccctgtggaatgtgtggatgagtcggtgtacctttactgtaataattctcggtagaacggtggaaaggattgttcacatcttatggtgctccgctggtgggtaggcaactaggcatatataaggcctgtttagtttagcttttttctgactattttttctaagaatctggatgtggagaaaatctgactgtgggaagaatctgaatatcgtggggattacacgcggaggaagatgaagtggtccaaagggtcaatgatctagaaagcgatgtatttctaatatcgtgacgactcgaccgattatgcgttcatgttgattttggacggtttttaccaaaacaattcttatagaagcggactgaaaagctggggcgtttggcagtccgcaacagattttggtggccggaagttgaaaaaagcccaaacaaacagggccacaggtagtgttatggctcctcatctagcctagattgcttttgtgcacactttgtgtcatctatactccctccagtcaccattgaaaatatttagctaaaccttggaaactacaataataactgtttagggttacattatttatttgggaacttaaagttttatgtgtagatttgtatcaaaatacttgcaaaatctcgtaaattcgaagaatttaatctatagaaaaaggtggtcaaatatacgtattgaagactactccaagtcaaaggtggtcaaatattcttgactgaagatagtagtttgcagaatctgttagaaacatacaatcctcattctgcaatcaacttgtggctgctctattgttgggcctttataaggctagttactacccttgttcacagagaagaatagataaattccttttgggtcagtatattctttatgtattgatctcttggttcatccaatagtctgcagaaacaggttgcacacaagttgttgtaattgaatccttcatgattggtgtggtgtgaagaggattaccatattgtgctggggttctgacagctccattgctctttagtacatacaagctcatctttgatgttaagttggagaagttttgaggtgtttggttggctgctttaaacagttgtattgtgtgctgtctgtggtaaattcttcttctatttttccacatatatttcgttagatgtagtttgtagggttatgacttgctatttgctaagttgaaaagcaccaagtagtgattttttatatttactaattattgtcttcgatttgcttgcatagatattttgtttaccatgctatgttatttgtctttttttgcttcttattatggcgcattatcttgatatttggcatcctaagggcgtacccagtgctgtaggcttcccgcactgtgcggggtctggggaagagtatctttaaatatttggcatcctaacattggcttttattttagcagtatggaaatcagtagctctgtggactgtggtcaggaaaaagaacagccaacaaataaacgtccaaggtcagaaagtactacagaatcaagcacaaaagcatccagggagaaaattagaagggacaagctgaacgagaggtatgttccctggtgagacaagacaatgattgcattttagtttgcagtttaatctttttttctcttcatattatcgtattcgtcaactaccactgtacttatgatattctttttgttagattcttggaattgggtgccattttggagccagggaaaactcctaaaatggacaaaacagctatattgagtgatgctattcgtgtagtaggtgaattgcgtagtgaagcaaaaaagctcaaggattcaaatgagaatctccaagagaagattaaagagctgaaggtctatactatttcatgtggccaagttataaatggtgctgttcagatgggaggtggcacgtgatgtgttgtttaggcacttcatactgttccattttcttgatttatgatcccctttttccatttggtcatttttttttcttatctagatttaattcatccagtcaaataacatgggaataattattagtacacctgtcattctccctccagtttgtggtttagtttattttgggttgcttgcattagcaactttatatccacataatgcgtttttttttcttaaatggttaaaccctgcagctgtataacagtatggacatttgtcaattcttttctctactgtatacacttctttgctacgtgttccataaaatatatagaggtttatgattcagcatctcatgtgctgcaaaaggctttggccttcgattttgctggttgttcatcagaaaaacaatctcaccctgaaatactttccttttgcaggccgagaagaatgagctgcgagacgagaagcaaaggctgaaggccgagaaggagagcctggagcagcagatcaagttcctgaatgcccggccaagcctcgtaccacaccacccagtgatcccagcctctgcgttccctgctccccaggggccagcagccgccgccaggcacaagctgatgatgcctgtgattggctaccctggattcccgatgtggcagttcatgccgccttcagatgttgacacctctgatgaccctaggtcttgtcctcctgtggcgtagaagccgtgcgaaatcctgttggaaagaggcgatgctgccttccattgattcaaatcttgatcggtccgcagtgttgttggtgtagttgattccagaactgaaggggatgttacatgtgtcggacggtgacatggggtgatctgatgacccctttgtatattatatatggtatggtataaataaattccgcgaccagaagctaatgtggatcggtggattagcttatgtctattcttgcctgtttggttatgttcct

SEQ ID NO: 203761 - DNA, 2244 bp, Zea Mays
cgtgattggcaaaacatcgtctggtgtgcctcactctcacgcccaactaccggatatattgcgcgaggacacgactaagagaagggcctccaagagcaagagtttcaaagacgccgagaacttcgaagtcctcgtccttgagaagagctgcggttgcaagttcaagtctttgaggatcttgctcatagccatcatctccgcgacagtccttacccttgtaaccccgaccttatacgagcgccagttgcagtcagcctcccggtacgtggatgtcgggtggatgtgggacagagcgagttccgatccgcggtacgcatcttctgccgatgttgggtgggaggatgtgtacaaagcactgggaaacctaagaagcggtaaccgccagagtcatctcagagttgggctcttgaatttcaacagcaccgagtatggctcctggacgcagttgctcccagctgacagccacgttatctccactgtaaggctcgagcacgccaaggacagcgtcacctggcagacgctgtaccctgagtggatcgacgaggaggaagagacggagataccctcttgcccgtcgctgccggagccaaacgtgccaagaggtgcgcgctttgacgtcgtcgccgtgaagctcccatgcacccgtgtggcgggctggtcgagagacgtcgcgcggctccatctgcagctctcggcagccaaactggctgtggcgtcctcgaagcgcaaccacgacgtccatgttctcttcgtcactgactgcttcccgatcccgaacctcttcccttgcaagaaccttgtcacacgtgaaggcagcgcctggttgtacagtcctgactccaaggcgttgagggaaaagctcaggcttccagtcgggtcctgtgagcttgccgttccactcaaagccaaatcgaggcttttctcggtagatcgacgaagagaagcgtacgcgacgatactgcattcagcgagcgaatacgtctgcggcgcaatctcggcagcgcaaagcatccgccaggcaggatccaccagggacctggtcatccttgtggacgagaccataagcgaccaccaccggagaggcttggaggcggcggggtggaaggtcagagtgatccagaggatcaggaaccccaaggcggagcgcgacgcgtacaacgagtggaactacagcaagttcaggctgtggcagctcaccgactacgacaaggtcatcttcatagacgccgacctcctcatcctgaggaacgtcgacttcctgttcgccatgccggagatcgccgcgacgggcaacaacgccacgctcttcaactccggcgtcatggtcgtcgagccctccaactgcacgttccgcctgctcatggaccacatcgacgagatcacctcgtacaacggcggggaccaggggtacctcaacgagatattcacgtggtggcaccgcgtccccaggcacatgaacttcctcaagcacttctgggagggcgacagcgaggccatgaaggcgaagaagacccagctgttcggtgcggacccgccggtcctctacgtcctccactaccttggcctcaagccgtggctgtgcttcagagactacgactgcaactggaacaacgccgggatgcgcgagttcgccagcgacgtcgcgcatgcccggtggtggaaggtgcacgacaggatgccccggaagctccagtcctactgcctgctgaggtcgcggcagaaggccaggctggagtgggaccggaggcaggccgagaaggccaactctcaagatggccactggcgcctcaacgtcacggacaccaggctcaagacgtgctttgagaagttctgcttctgggagagcatgctctggcattggggcgagaacagtaacaggaccaagagcgtccccatggcagccacgacggcaaggtcgtgatctgtagatatacgaacaccccatccccatatggcaaccatacatgcatagcaatagcttgtataggtagctatgctttagttcttcgctatatatacagaatacaccactcgatccctgttgttgtcaaggctgcagctctatgtcgctgccggcctgccaccatggctaacgattcttttgggttggctgctgtaataagtttcaggtacatgtaaatttccctgctgaaattacgtgaccgcgtgtgagaaatgaatttgtacagggcgccaaataataattggttggtgcatacaacatatgaccagtcttttgcagta

SEQ ID NO: 203762 - DNA, 2560 bp, Zea Mays
tttttttttccccctgccacttgttactcccagactttatttatttatttatgttttggcggatgctgttgggtctccaactccaacgctgggcgtctcccctcccttgcttttcctttccctcctcttctgtcgtactactacgctggcctggctgccagtgccacgcacgcacgaacgcgcgcttctctcagccctcgccccgcgtcctgcgctcacgtgtgcgaagcggcgcaacggcggaggcggctctagcatcaccggccgacggtcctcctccttctcacgaaaggcactagaggagcggcggcggcggcggcgcatcaagcaccgcaccgatgggcccactggagccgcgctaccgtccaggcggcgcccccgaggacacgactaagagaagggcctccaagagcaagagtttcaaagacgccgagaacttcgaagtcctcgtccttgagaagagctgcggttgcaagttcaagtctttgaggatcttgctcatagccatcatctccgcgacagtccttacccttgtaaccccgaccttatacgagcgccagttgcagtcagcctcccggtacgtggatgtcgggtggatgtgggacagagcgagttccgatccgcggtacgcatcttctgccgatgttgggtgggaggatgtgtacaaagcactgggaaacctaagaagcggtaaccgccagagtcatctcagagttgggctcttgaatttcaacagcaccgagtatggctcctggacgcagttgctcccagctgacagccacgttatctccactgtaaggctcgagcacgccaaggacagcgtcacctggcagacgctgtaccctgagtggatcgacgaggaggaagagacggagataccctcttgcccgtcgctgccggagccaaacgtgccaagaggtgcgcgctttgacgtcgtcgccgtgaagctcccatgcacccgtgtggcgggctggtcgagagacgtcgcgcggctccatctgcagctctcggcagccaaactggctgtggcgtcctcgaagcgcaaccacgacgtccatgttctcttcgtcactgactgcttcccgatcccgaacctcttcccttgcaagaaccttgtcacacgtgaaggcagcgcctggttgtacagtcctgactccaaggcgttgagggaaaagctcaggcttccagtcgggtcctgtgagcttgccgttccactcaaagccaaatcgaggcttttctcggtagatcgacgaagagaagcgtacgcgacgatactgcattcagcgagcgaatacgtctgcggcgcaatctcggcagcgcaaagcatccgccaggcaggatccaccagggacctggtcatccttgtggacgagaccataagcgaccaccaccggagaggcttggaggcggcggggtggaaggtcagagtgatccagaggatcaggaaccccaaggcggagcgcgacgcgtacaacgagtggaactacagcaagttcaggctgtggcagctcaccgactacgacaaggtcatcttcatagacgccgacctcctcatcctgaggaacgtcgacttcctgttcgccatgccggagatcgccgcgacgggcaacaacgccacgctcttcaactccggcgtcatggtcgtcgagccctccaactgcacgttccgcctgctcatggaccacatcgacgagatcacctcgtacaacggcggggaccaggggtacctcaacgagatattcacgtggtggcaccgcgtccccaggcacatgaacttcctcaagcacttctgggagggcgacagcgaggccatgaaggcgaagaagacccagctgttcggtgcggacccgccggtcctctacgtcctccactaccttggcctcaagccgtggctgtgcttcagagactacgactgcaactggaacaacgccgggatgcgcgagttcgccagcgacgtcgcgcatgcccggtggtggaaggtgcacgacaggatgccccggaagctccagtcctactgcctgctgaggtcgcggcagaaggccaggctggagtgggaccggaggcaggccgagaaggccaactctcaagatggccactggcgcctcaacgtcacggacaccaggctcaagacgtgctttgagaagttctgcttctgggagagcatgctctggcattggggcgagaacagtaacaggaccaagagcgtccccatggcagccacgacggcaaggtcgtgatctgtagatatacgaacaccccatccccatatggcaaccatacatgcatagcaatagcttgtataggtagctatgctttagttcttcgctatatatacagaatacaccactcgatccctgttgttgtcaaggctgcagctctatgtcgctgccggcctgccaccatggctaacgattcttttgggttggctgctgtaataagtttcaggtacatgtaaatttccctgctgaaattacgtgaccgcgtgtgagaaatgaatttgtacagggcgccaaataataattggttggtgcatacaacatatgaccagtcttttgcagta

SEQ ID NO: 203763 - DNA, 1504 bp, Zea Mays
actacgtcgtcttcgtctctccaacccggggacattttccaccctccaaatcgaaaccagattgaaatcctaggggctagggttaccctccatcccatcgtccgatccgatccgatcccgccgctcatccatgtcccaccacgacggaagcaagccataccagccgcgccgggggcccgagcggcacccgcagccagcggatgggatcgccgccccgcctcccgccgccgttgccccgtcggtggagagcacgttcccatggacgcggatgctgctgccgcggcggcggcggccgcagtctcgcagatggacccgcactcggcgttggtggctgggaccgtgccacccatggcgaccaaccagctcaccctctcgttccagggcgaggtctatgtgttcgactccgtctcccctgataaggtccaagccgtgcttttgctgcttggagggagggagctgagcagcctgggcggagcgtcgtcctctgcaccttatagtaagaggttgaattatccacatcgggtggcatctctgatgagatttagggaaaagcggaaggagcggaactttgataagaagatccgatactctgtccggaaggaagttgcacttaggatgcagcgtaatcgaggtcaatttacatcttcaaaaccaaagcctgatgaaatagcagcatcagaaatggcatccgcagatggctccccgaattgggcattagttgaaggccgacctccatctgctgccgactacaccaatgatgcgtcgcggacctgatggaccaagaacattatgcaatgcatgtggcctcatgtgggcaaataagggtctcctgagggacgtaacaaaatctcctgtacctctccaagctacgcaatcagctccgcatctagatggtggtaatggaagcgccatgtctgcgcctggctctgagctagagaatgctgcagcagccatgaccaatggccacgagtcatcgagtagtggtgtttaatccagcgatggggtaaaagccacgaggagcatcatcccggagtgatctctgcagtaggcggtcagctgctgtactataattgagttggaggctgcttagatatggaatccttccatttaccttggtgccctgtagttaagagctatgacagtgctttatcccgtgtcatgtttgcagccgctgcgtctataacgaagctatttcttgtcttgaggcgtgactgttaagaaccgttgaagtccactcagttttaaccgtgcagcaacgtcttcgatcaatatctcagagtacttagggagcgcttgccacacggagcagctaaaccaccgaaacgtttccattttcaactagaatcggactgtgccattttgaaatgcgtcaccgaaatgtaatcgatgtatatcgaattggcagaaggttggttccgtatatgaaccatctcagtttctttgcctgaattgcaaacttgcaatggtactttttttagtgcaaacttttaacttcgaaaatcag

SEQ ID NO: 203764 - DNA, 871 bp, Zea Mays
tcgtcgagcagcatcagaaatggcatccgcagatggctccccgaattgggcattagttgaaggccgacctccatctgctgccgaatgtcatcactgtggtactaatgcaacagctacaccaatgatgcgtcgcggacctgatggaccaagaacattatgcaatgcatgtggcctcatgtgggcaaataagggtctcctgagggacgtaacaaaatctcctgtacctctccaagctacgcaatcagctccgcatctagatggtggtaatggaagcgccatgtctgcgcctggctctgagctagagaatgctgcagcagccatgaccaatggccacgagtcatcgagtagtggtgtttaatccagcgatggggtaaaagccacgaggagcatcatcccggagtgatctctgcagtaggcggtcagctgctgtactataattgagttggaggctgcttagatatggaatccttccatttaccttggtgccctgtagttaagagctatgacagtgctttatcccgtgtcatgtttgcagccgctgcgtctataacgaagctatttcttgtcttgaggcgtgactgttaagaaccgttgaagtccactcagttttaaccgtgcagcaacgtcttcgatcaatatctcagagtacttagggagcgcttgccacacggagcagctaaaccaccgaaacgtttccattttcaactagaatcggactgtgccattttgaaatgcgtcaccgaaatgtaatcgatgtatatcgaattggcagaaggttggttccgtatatgaaccatctcagtttctttgcctgaattgcaaacttgcaatggtactttttttagtgcaaacttttaacttcgaaaatcag

SEQ ID NO: 203765 - DNA, 2562 bp, Zea Mays
ggtgttccttcgccatggctactctggcggccatctcctccgtgtcttatgacacagacaccgattccgactcctcgcggttactctctctctctaatttccccgtccaaccccaagttcaatctactccatgggagacgatcgatttggtgcagcgaggcaagcacatgggattctcaagtgttaagcaggcatgctgaatgtctggagctggaggagttgactgcaatatcagtcaatcccagtctgcttccagctttgaatcagttgcttctcgaggcgtatgccattctacgtcccaagccgcttgactatgaccagcgcaacaccttggttgatgtcttcaggaagatggtgaatcaaagatttggtagcaacagtgggtctccggttgtggaaccatttggatcattcacgatggatttatttactcctcacagtgacctggacctctctatcaattttagtgctaatactgatgagcaatatactcgcaagcaaatgatctctattatcaagaaattttccaaggttctattttcttatcagaggagtggaattttctgtggggttttacctattgtaagtgctagggtgcctatactgaaggttattgatcgtggcacaggggtcgaatgtgatatttcggttgaaaacaaagatggcatgacaaggtcaatgatcattaaatttgtttcctcacttgatgaaaggtttcagatactaagttacttggttaagttctgggctaaggtaccatgggttaattattattttggtttggttattaaattgcaagtaactgtcccattaccttttgttttaattaattgacctactaaccaatctgcatttgaagacacaaactttggattcatttgtatagaaaataagacgatacttattggggaaattatgaattatcttctttactatcgacaaattctggatatgctttatgccagttcagaaaacatgatagatacccttcttctacacttcctcagtctaaattcctacacttcatgctattgcattctatgtaccagaaaaaatggattttactccattttccttaatggtagtgtttgagtagcaactcattagatgcatggctaagaagataagcatcaatgtgcagtgcagacccggcatcctccaatattgcctgcgttctctgacttgttaaaagatgggttagattgcgaaagcattgagaggaatgctttacggtttagggattttgggagtagaaataaagaatctgtcgctgaactgtttgtatcattgataagtaaactattgtcagcagagagtttatgggagcatgggctgtgcgcaagcaattttgaagcgtcatggatctcaaagacctggaagaaaggagtaggcaatttaagtgttgaagatttcttggaccggtcgcaaaattttgcaaggtcagtgggaaaggtgcagatgcagaagatttgcaaatgccttagagaatgtgctttgaatttgttagatttcatgagagggaaaatggacacaacgaagctgaagacccttttatttgggcggcttagcccagacgaattagtcagcaaacctcgtctgaagcatgtcaagagaaaaaggaattgggaacggaccccgcaagggggaagatgtgtgctccagaagagtgcaaagcatgctggtagtgctactggcagtgattcattacccactcctaacaaggtcttgcatcatgcactccattatcgagttgctggccatcagtctagcattcatcagtttgtgcccattattcgatggccacgaatcattccttctggttttggctatggattatcgcttgggattccatcagttgctcctcaccttggcaagggaatactgggcaagccaccaatcattccttctggttttggctacggattgtcgcttgagattccatcagttgctcctcaccttggtaacggaatactgggcaagccaccaagtaatataacacccttagatcaacggagctcaactcaactagtgcacgtacggaatccacaccagcatacatgtcagcaatcatgtggcggagctatggagccgagcagctccggcgtggcttaatgataaggtccggtgatgagcagctctagtagcggttaggagtttgaggttagatttagggtgtgtttggtttgacttttggctttggcttttgccccctaaaagttaaaagccaaccaaagggctggatacaggaagcagcttttttctaaaagccgactttctcgtagtgtaaatctgaaagcacccctgaacctgcttttagtggcttttcggatggaactatgaaaacatatatcgaagaatttttaacgacttttagtggttttcactaaacggtttttagattttttaacagcttacaacctacaacagctttttacacagctcacagcctacaacaacttttttccatagccacagcccaaccaaacagacccttgatgtggagctccctcttgtgttgaggcacttttcattgctcttgttagttcaagttttagttttttt

SEQ ID NO: 203766 - DNA, 2593 bp, Zea Mays
aagagattaaagagggtgcgtcgggtgttccttcgccatggctactctggcggccatctcctccgtgtcttatgacacagacaccgattccgactcctcgcggtgcagcgaggcaagcacatgggattctcaagtgttaagcaggcatgctgaatgtctggagctggaggagttgactgcaatatcagtcaatcccagtctgcttccagctttgaatcagttgcttctcgaggcgtatgccattctacgtcccaagccgcttgactatgaccagcgcaacaccttggttgatgtcttcaggaagatggtgaatcaaagatttggtagcaacagtgggtctccggttgtggaaccatttggatcattcacgatggatttatttactcctcacagtgacctggacctctctatcaattttagtgctaatactgatgagcaatatactcgcaagcaaatgatctctattatcaagaaattttccaaggttctattttcttatcagaggagtggaattttctgtggggttttacctattgtaagtgctagggtgcctatactgaaggttattgatcgtggcacaggggtcgaatgtgatatttcggttgaaaacaaagatggcatgacaaggtcaatgatcattaaatttgtttcctcacttgatgaaaggtttcagatactaagttacttggttaagttctgggctaaggtacatgatctgaataccccaagacaactaactatgagctccatgtcaattatttcactagttgctttccatttgcaggtaccatgggttaattattattttggtttggttattaaattgcaagtaactgtcccattaccttttgttttaattaattgacctactaaccaatctgcatttgaagacacaaactttggattcatttgtatagaaaataagacgatacttattggggaaattatgaattatcttctttactatcgacaaattctggatatgctttatgccagttcagaaaacatgatagatacccttcttctacacttcctcagtctaaattcctacacttcatgctattgcattctatgtaccagaaaaaatggattttactccattttccttaatggtagtgtttgagtagcaactcattagatgcatggctaagaagataagcatcaatgtgcagtgcagacccggcatcctccaatattgcctgcgttctctgacttgttaaaagatgggttagattgcgaaagcattgagaggaatgctttacggtttagggattttgggagtagaaataaagaatctgtcgctgaactgtttgtatcattgataagtaaactattgtcagcagagagtttatgggagcatgggctgtgcgcaagcaattttgaagcgtcatggatctcaaagacctggaagaaaggagtaggcaatttaagtgttgaagatttcttggaccggtcgcaaaattttgcaaggtcagtgggaaaggtgcagatgcagaagatttgcaaatgccttagagaatgtgctttgaatttgttagatttcatgagagggaaaatggacacaacgaagctgaagacccttttatttgggcggcttagcccagacgaattagtcagcaaacctcgtctgaagcatgtcaagagaaaaaggaattgggaacggaccccgcaagggggaagatgtgtgctccagaagagtgcaaagcatgctggtagtgctactggcagtgattcattacccactcctaacaaggtcttgcatcatgcactccattatcgagttgctggccatcagtctagcattcatcagtttgtgcccattattcgatggccacgaatcattccttctggttttggctatggattatcgcttgggattccatcagttgctcctcaccttggcaagggaatactgggcaagccaccaatcattccttctggttttggctacggattgtcgcttgagattccatcagttgctcctcaccttggtaacggaatactgggcaagccaccaagtaatataacacccttagatcaacggagctcaactcaactagtgcacgtacggaatccacaccagcatacatgtcagcaatcatgtggcggagctatggagccgagcagctccggcgtggcttaatgataaggtccggtgatgagcagctctagtagcggttaggagtttgaggttagatttagggtgtgtttggtttgacttttggctttggcttttgccccctaaaagttaaaagccaaccaaagggctggatacaggaagcagcttttttctaaaagccgactttctcgtagtgtaaatctgaaagcacccctgaacctgcttttagtggcttttcggatggaactatgaaaacatatatcgaagaatttttaacgacttttagtggttttcactaaacggtttttagattttttaacagcttacaacctacaacagctttttacacagctcacagcctacaacaacttttttccatagccacagcccaaccaaacagacccttgatgtggagctccctcttgtgttgaggcacttttcattgctcttgttagttcaagttttagttttttt

SEQ ID NO: 203767 - DNA, 3346 bp, Zea Mays
ctcgccgcagcccgggaaagaaaaggaaatgccgtgcgtgtatcgattcgctacaccacacacacgtacgcaggccgcgtgccggcgcgccattgcactgcaccaccagcctgcctgtgcagagagacggaggaggagacacacagggcagcgaccagcgaaggaccgagaagctagcaacggcaacgagcagaggcccgagcccgacacttgcgctccgcttcccccgccccctccgcctctcccgtctctccaggccgccaccaacaccacaccaccacccgttgccacgctgccggccgcccacgcctcgcgccagccgatcctttcattccatcctccctccctccgcccccgcctcccaattttagccgcacggccgccgccgccgccggccggccggagagcaggagcagctaggccgccatggaggcgaagagcgtggtcatgtcggcgctcgggatcgggatcggcgtcggcgtcggcctgggcctcgcgtccgcgccctgggccgccggcgcctcggcctcctccagggccgcgggggtcaccgtcgaccgggtggagcaggacctccgccgcctcctcgtcgacggcgccgacaccaaggtcaccttcgacgagttcccgtactacctcagtgagcaaacacgtgttgtgctgacgagcgctgcgtacgtccacttgaagcaagcagatatttctaagtacaccaggaaccttgctccagccagccgtacaatcctgctgtcaggtcctgcagagctctaccagcagatgcttgccagggcgcttgcccactattttcaagcaaagttgctcttgctagatcctactgatttccttataaagatccatagcaaatatggcacaggtggcagcacagagaagacggttaaaagatcaatctccgagacgacgcttgaacgtgtgtcgggattgcttggatctctttctattcttccacaaaaggaacagcccaaaggaactatacgtagacaaagcagcatgatggatgtcaaattaaggagttctgagagtatgagcaacttaacaaagctcagaagaaatgcatctacttcctctgatatgagtagcatggcttcgcaaggaccttcaactagtacagctcctcttaggcggtcaagcagttggacttttgatgagaaaattttagtgcaagcattgtacaaggttctgctttcagtgtcaaagaagtacccagttgtactctatataagagatgttgagaagttccttcacaagtccccaaaaatgtatctcctgtttgagaaactactaaacaagcttgaaggtccagtgttaatcctcggatcaaggattgtagatatgaacagtgatgaggaatcggatgacagattgactgttctgttcccatataatatagaaatcaagccacctgaaaatgaaaaccaccttgtaagttggaactcccaattagaagaagacatgaagatgattcagtttcaagataaccgaaatcatattatggaagtgcttgcagaaaatgatcttgaatgtgatgatttaggttcgatttgcctatctgatactatgtgccttagcaagtatatagaggaaattgtggtgtctgcagtttcgtatcacttgatgaataacaaagatccagagtatcgaaatgggaaattagttctatccacaaagagcttgtcccatgcattggaaatttttcaaggcaacaagataagtgataaggacagcatgaaattggaagcgacagatgacgccttaaaggctgctgaaaaggcaactgctccaaccactgcaaaatcagaaacaaaatcagcaacatcactgccacctgctcgggctccggctgctgctgctgctgctcccgctagtgcccctgctcctagaattgagagcaaaacagaacttgaaaagaaggataatccacctccagttgcaaaagcaccggaagtaacacccgataatgagtttgaaaagcgtattagaccagaagtgatacctgctaatgaaattggagtttcatttgatgatattggtgccttggatgatatcaaagaatcccttcaagagcttgtcatgcttcctctaagacggcctgacctcttcaaaggcggtcttcttaaaccctgcagaggtatattactttttggtcctccaggaacaggcaagactatgcttgccaaggctatagcaaatgaagctcaagcaagttttataaatgtctctatgtcaactatcacatcgaagtggtttggtgaagacgaaaagaatgtccgagcattgttcacgttagcggctaaagtatcaccaaccatcattttcgtcgatgaagttgatagcatgcttgggcagcggaacagagctggagagcatgaggcaatgaggaagatcaagaatgaatttatgacacactgggatggcctcttgtcaagaccggatcagagaattcttgttcttgctgcaaccaaccggcctttcgatcttgatgaggctataatccgtaggttcgagcgaaggtctgccatcgatgggaagtcgggaactcataatgcggcgacttctgtcaaaggagaaagttgatgaagggctggacttcaaggagctagcaaccatgacagaaggatatagtggaagtgatctcaagaacctgtgcacgacggcagcgtatcgccctgtgagagagctaatccagaaggaaagaaagaaggagctggagaagctgaagtgtgagaaaggagaaactccgtcggatcctccgaagaaggaaaaggaggagaccatcattctaaggccgctgaacatgacagatctgaaagaagcaaagaaccaggtggctgcaagtttcgctgctgaaggcgccataatgagcgagctgaggcaatggaacgagttgtacggtgaaggcggctccagaaagaagcagcagttgacatacttcctctgagcaatatgaaaatcaggcgcaaaaatgtatgaacataatttgagaagtagagtagagcacaaagcagccatgaggaaatagaccgaacatgtaatcgtgtataagaagaacatgagaaaagggtgcgtgttagggggacaaggacaagaaatcaggccgtaaaagccagtatctggtgtaggacaaggaaggacagttttcatctccaccaaaattccagtttgcctgtgctggttgttgttgtattacactaataatggatctgcggtgtagatcgctcttctcttcatcttttcctggtcgcatcatccttctgtatatgtacaaactggtaggttgtggcaacgaaaggtttttaaagcagcttatatatatcttctccaagactcc

SEQ ID NO: 203768 - DNA, 3347 bp, Zea Mays
ctcgccgcagcccgggaaagaaaaggaaatgccgtgcgtgtatcgattcgctacaccacacacacgtacgcaggccgcgtgccggcgcgccattgcactgcaccaccagcctgcctgtgcagagagacggaggaggagacacacagggcagcgaccagcgaaggaccgagaagctagcaacggcaacgagcagaggcccgagcccgacacttgcgctccgcttcccccgccccctccgcctctcccgtctctccaggccgccaccaacaccacaccaccacccgttgccacgctgccggccgcccacgcctcgcgccagccgatcctttcattccatcctccctccctccgcccccgcctcccaattttagccgcacggccgccgccgccgccggccggccggagagcaggagcagctaggccgccatggaggcgaagagcgtggtcatgtcggcgctcgggatcgggatcggcgtcggcgtcggcctgggcctcgcgtccgcgccctgggccgccggcgcctcggcctcctccagggccgcgggggtcaccgtcgaccgggtggagcaggacctccgccgcctcctcgtcgacggcgccgacaccaaggtcaccttcgacgagttcccgtactacctcagtgagcaaacacgtgttgtgctgacgagcgctgcgtacgtccacttgaagcaagcagatatttctaagtacaccaggaaccttgctccagccagccgtacaatcctgctgtcaggtcctgcagagctctaccagcagatgcttgccagggcgcttgcccactattttcaagcaaagttgctcttgctagatcctactgatttccttataaagatccatagcaaatatggcacaggtggcagcacagagaagacggttaaaagatcaatctccgagacgacgcttgaacgtgtgtcgggattgcttggatctctttctattcttccacaaaaggaacagcccaaaggaactatacgtagacaaagcagcatgatggatgtcaaattaaggagttctgagagtatgagcaacttaacaaagctcagaagaaatgcatctacttcctctgatatgagtagcatggcttcgcaaggaccttcaactagtacaggcggtcaagcagttggacttttgatgagaaaattttagtgcaagcattgtacaaggttctgctttcagtgtcaaagaagtacccagttgtactctatataagagatgttgagaagttccttcacaagtccccaaaaatgtatctcctgtttgagaaactactaaacaagcttgaaggtccagtgttaatcctcggatcaaggattgtagatatgaacagtgatgaggaatcggatgacagattgactgttctgttcccatataatatagaaatcaagccacctgaaaatgaaaaccaccttgtaagttggaactcccaattagaagaagacatgaagatgattcagtttcaagataaccgaaatcatattatggaagtgcttgcagaaaatgatcttgaatgtgatgatttaggttcgatttgcctatctgatactatgtgccttagcaagtatatagaggaaattgtggtgtctgcagtttcgtatcacttgatgaataacaaagatccagagtatcgaaatgggaaattagttctatccacaaagagcttgtcccatgcattggaaatttttcaaggcaacaagataagtgataaggacagcatgaaattggaagcgacagatgacgccttaaaggctgctgaaaaggcaactgctccaaccactgcaaaatcagaaacaaaatcagcaacatcactgccacctgctcgggctccggctgctgctgctgctgctcccgctagtgcccctgctcctagaattgagagcaaaacagaacttgaaaagaaggataatccacctccagttgcaaaagcaccggaagtaacacccgataatgagtttgaaaagcgtattagaccagaagtgatacctgctaatgaaattggagtttcatttgatgatattggtgccttggatgatatcaaagaatcccttcaagagcttgtcatgcttcctctaagacggcctgacctcttcaaaggcggtcttcttaaaccctgcagaggtatattactttttggtcctccaggaacaggcaagactatgcttgccaaggctatagcaaatgaagctcaagcaagttttataaatgtctctatgtcaactatcacatcgaagtggtttggtgaagacgaaaagaatgtccgagcattgttcacgttagcggctaaagtatcaccaaccatcattttcgtcgatgaagttgatagcatgcttgggcagcggaacagagctggagagcatgaggcaatgaggaagatcaagaatgaatttatgacacactgggatggcctcttgtcaagaccggatcagagaattcttgttcttgctgcaaccaaccggcctttcgatcttgatgaggctataatccgtaggttcgagcgaagaatcatggtaggtctgccatcgatgggaagtcgggaactcataatgcggcgacttctgtcaaaggagaaagttgatgaagggctggacttcaaggagctagcaaccatgacagaaggatatagtggaagtgatctcaagaacctgtgcacgacggcagcgtatcgccctgtgagagagctaatccagaaggaaagaaagaaggagctggagaagctgaagtgtgagaaaggagaaactccgtcggatcctccgaagaaggaaaaggaggagaccatcattctaaggccgctgaacatgacagatctgaaagaagcaaagaaccaggtggctgcaagtttcgctgctgaaggcgccataatgagcgagctgaggcaatggaacgagttgtacggtgaaggcggctccagaaagaagcagcagttgacatacttcctctgagcaatatgaaaatcaggcgcaaaaatgtatgaacataatttgagaagtagagtagagcacaaagcagccatgaggaaatagaccgaacatgtaatcgtgtataagaagaacatgagaaaagggtgcgtgttagggggacaaggacaagaaatcaggccgtaaaagccagtatctggtgtaggacaaggaaggacagttttcatctccaccaaaattccagtttgcctgtgctggttgttgttgtattacactaataatggatctgcggtgtagatcgctcttctcttcatcttttcctggtcgcatcatccttctgtatatgtacaaactggtaggttgtggcaacgaaaggtttttaaagcagcttatatatatcttctccaagactcc
